(19) United States
(12) Patent Application Publication
(10) Pub. No.: US 2024/0309370 A1
(43) Pub. Date: Sep. 19, 2024

(54) METABOLIC DISORDER-ASSOCIATED TARGET GENE IRNA COMPOSITIONS AND METHODS OF USE THEREOF

(71) Applicant: Alnylam Pharmaceuticals, Inc., Cambridge, MA (US)

(72) Inventors: Aimee M. Deaton, Somerville, MA (US); Jeffrey Zuber, Somerville, MA (US)

(21) Appl. No.: 18/403,912

(22) Filed: Jan. 4, 2024

Related U.S. Application Data
(63) Continuation of application No. PCT/US22/37658, filed on Jul. 20, 2022.
(60) Provisional application No. 63/223,995, filed on Jul. 21, 2021.
(60) Provisional application No. 63/278,126, filed on Nov. 11, 2021.
(60) Provisional application No. 63/285,143, filed on Dec. 2, 2021.
(60) Provisional application No. 63/287,578, filed on Dec. 9, 2021.
(60) Provisional application No. 63/321,799, filed on Mar. 21, 2022.
(60) Provisional application No. 63/323,543, filed on Mar. 25, 2022.

(51) Int. Cl. C12N 15/113

(52) U.S. Cl. CPC C12N 15/113; C12N 15/1137; C12N 15/1138; C12Y 301/04017; C12N 2310/14; C12N 2310/3125; C12N 2310/315; C12N 2310/321; C12N 2310/322; C12N 2310/3231; C12N 2310/344; C12N 2310/351

(57) ABSTRACT

The present invention relates to RNAi agents, e.g., double stranded RNA (dsRNA) agents, targeting a metabolic disorder-associated target gene, e.g., inhibin subunit beta E (INHBE), activin A receptor type 1C (ACVR1C), perilipin-1 (PLIN1), phosphodiesterase 3B (PDE3B), or inhibin subunit beta C (INHBC) gene. The invention also relates to methods of using such RNAi agents to inhibit expression of a metabolic disorder-associated target gene and to methods of preventing and treating a metabolic disorder, e.g., metabolic syndrome.

### RELATED APPLICATIONS

[0001] This application is a 35 § U.S.C. 111(a) continuation application which claims the benefit of priority to PCT/US2022/037658, filed on Jul. 20, 2022, which, in turn, claims the benefit of priority to U.S. Provisional Application No. 63/223,995, filed on Jul. 21, 2021, U.S. Provisional Application No. 63/278,126, filed on Nov. 11, 2021, U.S. Provisional Application No. 63/285,143, filed on Dec. 2, 2021, U.S. Provisional Application No. 63/287,578, filed on Dec. 9, 2021, U.S. Provisional Application No. 63/321,799, filed on Mar. 21, 2022, and U.S. Provisional Application No. 63/323,543, filed on Mar. 25, 2022. The entire contents of each of the foregoing applications are incorporated herein by reference.

### SEQUENCE LISTING

[0002] The instant application contains a Sequence Listing which has been submitted electronically in XML file format via Patent Center and is hereby incorporated by reference in its entirety. Said XML copy, created on Jan. 3, 2024, is named 121301_16307_SL.xml and is 58,454,450 bytes in size.

### BACKGROUND OF THE INVENTION

[0003] With the successful conquest of many infectious diseases in most of the world, non-communicable diseases, metabolic disorders in particular, have become a major health hazard of the modern world. The increase in consumption of high calorie-low fiber fast food and the decrease in physical activity due to mechanized transportations and sedentary lifestyle have resulted in the spread of metabolic disorders such as metabolic syndrome, type 2 diabetes, hypertension, cardiovascular diseases, stroke, and other disabilities. Indeed, the occurrences of subjects with a metabolic disorder, such as, metabolic syndrome, who have a number of health conditions placing them at higher risk for heart disease, diabetes, stroke, and other diseases have increased in the recent years.

[0004] Current treatments for disorders of metabolic disorders include lifestyle changes, dieting, exercise and treatment with agents, such as lipid lowering agents, e.g., statins, and other drugs. However, these therapies and treatments are often limited by compliance, are not always effective, result in side effects, and result in drug-drug interactions. Accordingly, there is a need in the art for alternative treatments for subjects having metabolic disorders, such as metabolic syndrome and related diseases, e.g., diabetes, hypertension, and cardiovascular disease, such as an agent that can selectively and efficiently silence a metabolic disorder-associated target gene, i.e., inhibin subunit beta E (INHBE), activin A receptor type 1C (ACVR1C), perilipin-1 (PLIN1), phosphodiesterase 3B (PDE3B), or inhibin subunit beta C (INHBC), using the cell's own RNAi machinery that has both high biological activity and in vivo stability, and that can effectively inhibit expression of the metabolic disorder-associated target INHBE gene.

### SUMMARY OF THE INVENTION

[0005] The present invention provides iRNA compositions which effect the RNA-induced silencing complex (RISC)-mediated cleavage of RNA transcripts of a gene encoding a metabolic disorder-associated target gene selected from the group consisting of inhibin subunit beta E (INHBE), activin A receptor type 1C (ACVR1C), perilipin-1 (PLIN1), phosphodiesterase 3B (PDE3B), and inhibin subunit beta C (INHBC). The target gene may be within a cell, e.g., a cell within a subject, such as a human subject. The present invention also provides methods of using the iRNA compositions of the invention for inhibiting the expression of a metabolic disorder-associated target gene selected from the group consisting of inhibin subunit beta E (INHBE), activin A receptor type 1C (ACVR1C), perilipin-1 (PLIN1), phosphodiesterase 3B (PDE3B), and inhibin subunit beta C (INHBC), and/or for treating a subject who would benefit from inhibiting or reducing the expression of a metabolic disorder-associated target gene selected from the group consisting of inhibin subunit beta E (INHBE), activin A receptor type 1C (ACVR1C), perilipin-1 (PLIN1), phosphodiesterase 3B (PDE3B), and inhibin subunit beta C (INHBC), e.g., a subject suffering or prone to suffering from a metabolic disorder, e.g., metabolic syndrome, and/or cardiovascular disease.

[0006] Accordingly, in an aspect, the invention provides a double stranded ribonucleic acid (dsRNA) agent for inhibiting expression of a metabolic disorder-associated target gene selected from the group consisting of inhibin subunit beta E (INHBE), activin A receptor type 1C (ACVR1C), perilipin-1 (PLIN1), phosphodiesterase 3B (PDE3B), and inhibin subunit beta C (INHBC) in a cell, such as an adipocyte and/or a liver cell, wherein the dsRNA agent comprises a sense strand and an antisense strand forming a double stranded region, wherein the sense strand comprises at least 15, e.g., 15, 16, 17, 18, 19, 20, or 21, contiguous nucleotides differing by no more than 0, 1, 2, or 3 nucleotides from the nucleotide sequence of any one of SEQ ID NOs:1, 3, 5, 7, 9, 11, 13, 15, 17, 19, 21, 23, 25, 27, 29, 31, 33, 35, 37, 39, 41, 43, 45, 47, 49, 51, 53, or 55, and the antisense strand comprises at least 15, e.g., 15, 16, 17, 18, 19, 20, 21, 22, or 23, contiguous nucleotides differing by no more than 0, 1, 2, or 3 nucleotides from the corresponding portion of the nucleotide sequence of any one of SEQ ID NOs:2, 4, 6, 8, 10, 12, 14, 16, 18, 20, 22, 24, 26, 28, 30, 32, 34, 36, 38, 40, 42, 44, 46, 48, 50, 52, 54, or 56.

[0007] In another aspect, the present invention provides a double stranded ribonucleic acid (dsRNA) agent for inhibiting expression of a metabolic disorder-associated target gene selected from the group consisting of inhibin subunit beta E (INHBE), activin A receptor type 1C (ACVR1C), perilipin-1 (PLIN1), phosphodiesterase 3B (PDE3B), and inhibin subunit beta C (INHBC) in a cell, such as an adipocyte and/or a liver cell, wherein the dsRNA agent comprises a sense strand and an antisense strand forming a double stranded region, wherein the antisense strand comprises a region of complementarity to an mRNA encoding the target gene, and wherein the region of complementarity comprises at least 15, e.g., 15, 16, 17, 18, 19, 20, 21, 22, or 23, contiguous nucleotides differing by no more than 0, 1, 2, or 3 nucleotides from any one of the antisense nucleotide sequences in any one of Tables 2-17, 19 and 20.

[0008] In yet another aspect, the present invention provides a double stranded ribonucleic acid (dsRNA) agent for inhibiting expression of a metabolic disorder-associated target gene selected from the group consisting of inhibin subunit beta E (INHBE), activin A receptor type 1C (ACVR1C), perilipin-1 (PLIN1), phosphodiesterase 3B (PDE3B), and inhibin subunit beta C (INHBC) in a cell, such as an adipocyte and/or a liver cell, wherein the dsRNA agent comprises a sense strand and an antisense strand forming a double stranded region, wherein the sense strand comprises at least 15, e.g., 15, 16, 17, 18, 19, 20, or 21, contiguous nucleotides differing by no more than 0, 1, 2, or 3 nucleotides from any one of the sense nucleotide sequences in any one of Tables 2-17, 19 and 20 and the antisense strand comprises at least 15, e.g., 15, 16, 17, 18, 19, 20, 21, 22, or 23, contiguous nucleotides differing by no more than 0, 1, 2, or 3 nucleotides from any one of the antisense nucleotide sequences in any one of Tables 2-17, 19 and 20. In some embodiments, these dsRNA agents further comprise one or more C22 hydrocarbon chains conjugated to one or more positions, e.g., internal positions, on at least one strand of the dsRNA agent.

[0009] In another aspect, the present invention provides a double stranded ribonucleic acid (dsRNA) agent for inhibiting expression of a metabolic disorder-associated target gene selected from the group consisting of inhibin subunit beta E (INHBE), activin A receptor type 1C (ACVR1C), perilipin-1 (PLIN1), phosphodiesterase 3B (PDE3B), and inhibin subunit beta C (INHBC) in a cell, such as an adipocyte and/or a liver cell, wherein the dsRNA agent comprises a sense strand and an antisense strand forming a double stranded region, wherein the sense strand comprises at least 15, e.g., 15, 16, 17, 18, 19, 20, or 21, contiguous nucleotides differing by no more than 0, 1, 2, or 3 nucleotides from any one of the sense nucleotide sequences in any one of Tables 2-17, 19 and 20 and the antisense strand comprises at least 15, e.g., 15, 16, 17, 18, 19, 20, 21, 22, or 23, contiguous nucleotides differing by no more than 0, 1, 2, or 3 nucleotides from any one of the antisense nucleotide sequences in any one of Tables 2-17, 19 and 20. In some embodiments, these dsRNA agents further comprise one or more GalNAcligands conjugated to at least one strand of the dsRNA agent, e.g., through a bivalent or trivalent branched linker.

[0010] In one embodiment, the dsRNA agent comprises a sense strand comprising a contiguous nucleotide sequence which has at least 85%, e.g., 85%, 90%, 91%, 92%, 93%, 94%, 95%, 96%, 97%, 98%, 99%, or 100%, nucleotide sequence identity over its entire length to any one of the nucleotide sequences of the sense strands in any one of Tables 2-17, 19 and 20 and an antisense strand comprising a contiguous nucleotide sequence which has at least 85%, e.g., 85%, 90%, 91%, 92%, 93%, 94%, 95%, 96%, 97%, 98%, 99%, or 100%, nucleotide sequence identity over its entire length to any one of the nucleotide sequences of the antisense strands in any one of Tables 2-17, 19 and 20.

[0011] In one embodiment, the dsRNA agent comprises a sense strand comprising at least 15, e.g., 15, 16, 17, 18, 19, 20, or 21, contiguous nucleotides differing by no more than three nucleotides from any one of the nucleotide sequences of the sense strands in any one of Tables 2-17, 19 and 20 and an antisense strand comprising at least 15, e.g., 15, 16, 17, 18, 19, 20, 21, 22, or 23 contiguous nucleotides differing by no more than three nucleotides from any one of the nucleotide sequences of the antisense strands in any one of Tables 2-17, 19 and 20.

[0012] In one embodiment, the dsRNA agent comprises a sense strand comprising at least 15, e.g., 15, 16, 17, 18, 19, 20, or 21, contiguous nucleotides differing by no more than two nucleotides from any one of the nucleotide sequences of the sense strands in any one of Tables 2-17, 19 and 20 and an antisense strand comprising at least 15, e.g., 15, 16, 17, 18, 19, 20, 21, or 23 contiguous nucleotides differing by no more than two nucleotides from any one of the nucleotide sequences of the antisense strands in any one of Tables 2-17, 19 and 20.

[0013] In one embodiment, the dsRNA agent comprises a sense strand comprising at least 15, e.g., 15, 16, 17, 18, 19, 20, or 21, contiguous nucleotides differing by no more than one nucleotide from any one of the nucleotide sequences of the sense strands in any one of Tables 2-17, 19 and 20 and an antisense strand comprising at least 15, e.g., 15, 16, 17, 18, 19, 20, 21, 22, or 23 contiguous nucleotides differing by no more than one nucleotide from any one of the nucleotide sequences of the antisense strands in any one of Tables 2-17, 19 and 20.

[0014] In one embodiment, the dsRNA agent comprises a sense strand comprising or consisting of a nucleotide sequence selected from the group consisting of any one of the nucleotide sequences of the sense strands in any one of Tables 2-17, 19 and 20 and an antisense strand comprising or consisting of a nucleotide sequence selected from the group consisting of any one of the nucleotide sequences of the antisense strands in any one of Tables 2-17, 19 and 20.

[0015] In one embodiment, the target gene is INHBE.

[0016] In one embodiment, the target gene is ACVR1C.

[0017] In one embodiment, the target gene is PLIN1.

[0018] In one embodiment, the target gene is PDE3B.

[0019] In one embodiment, the target gene is INHBC.

[0020] In one aspect, the present invention provides a double stranded ribonucleic acid (dsRNA) agent for inhibiting expression of inhibin subunit beta E (INHBE) in a cell, such as an adipocyte and/or a liver cell, wherein said dsRNA agent comprises a sense strand and an antisense strand forming a double stranded region, wherein the sense strand comprises at least 15, e.g., 15, 16, 17, 18, 19, 20, or 21, contiguous nucleotides differing by no more than 0, 1, 2, or 3 nucleotides from any one of the nucleotide sequences of nucleotides 400-422, 410-432, 518-540, 519-541, 640-662, 1430-1452, 1863-1885, or 1864-1886 of SEQ ID NO: 1, and the antisense strand comprises at least 15, e.g., 15, 16, 17, 18, 19, 20, 21, 22, or 23, differing by no more than 0, 1, 2, or 3 nucleotides from the corresponding nucleotide sequence of SEQ ID NO:2.

[0021] In one aspect, the present invention provides a double stranded ribonucleic acid (dsRNA) agent for inhibiting expression of inhibin subunit beta E (INHBE) in a cell, such as an adipocyte and/or a liver cell, wherein said dsRNA agent comprises a sense strand and an antisense strand forming a double stranded region, wherein the sense strand comprises at least 15, e.g., 15, 16, 17, 18, 19, 20, or 21, contiguous nucleotides differing by no more than 0, 1, 2, or 3 nucleotides from any one of the nucleotide sequence of nucleotides 400-422, 410-432, 518-540, 519-541, 640-662, 1430-1452, 1863-1885, or 1864-1886 of SEQ ID NO: 1, and the antisense strand comprises at least 15, e.g., 15, 16, 17, 18, 19, 20, 21, 22, or 23, contiguous nucleotides differing by no more than 0, 1, 2, or 3 nucleotides from the corresponding nucleotide sequence of SEQ ID NO:2. In some embodiments, these dsRNA agents further comprise one or more C22 hydrocarbon chains conjugated to one or more positions, e.g., internal positions, on at least one strand of the dsRNA agent.

[0022] In one aspect, the present invention provides a double stranded ribonucleic acid (dsRNA) agent for inhibiting expression of inhibin subunit beta E (INHBE) in a cell, such as an adipocyte and/or a liver cell, wherein said dsRNA agent comprises a sense strand and an antisense strand forming a double stranded region, wherein the sense strand comprises at least 15, e.g., 15, 16, 17, 18, 19, 20, or 21, contiguous nucleotides differing by no more than 0, 1, 2, or 3 nucleotides from any one of the nucleotide sequence of nucleotides 400-422, 410-432, 518-540, 519-541, 640-662, 1430-1452, 1863-1885, or 1864-1886 of SEQ ID NO: 1, and the antisense strand comprises at least 15, e.g., 15, 16, 17, 18, 19, 20, 21, 22, or 23, contiguous nucleotides differing by no more than 0, 1, 2, or 3 nucleotides from the corresponding nucleotide sequence of SEQ ID NO:2. In some embodiments, these dsRNA agents further comprise one or more GalNAcligands conjugated to at least one strand of the dsRNA agent, e.g., through a bivalent or trivalent branched linker.

[0023] In some embodiments, the antisense strand comprises at least 15, e.g., 15, 16, 17, 18, 19, 20, 21, 22, or 23, contiguous nucleotides differing by no more than 0, 1, 2, or 3 nucleotides from any one of the antisense strand nucleotide sequences of a duplex selected from the group consisting of AD-1706583, AD-1711744, AD-1706593, AD-1708473, AD-1706662, AD-1706761, AD-1707306, AD-1707639, AD-1707640.

[0024] In some embodiments, the sense and the antisense strand comprise at least 15, e.g., 15, 16, 17, 18, 19, 20, 21, 22, or 23, contiguous nucleotides differing by no more than 0, 1, 2, or 3 nucleotides from any one of the sense and the antisense strand nucleotide sequences of a duplex selected from the group consisting of AD-1706583, AD-1711744, AD-1706593, AD-1708473, AD-1706662, AD-1706761, AD-1707306, AD-1707639, AD-1707640.

[0025] In some embodiments, the antisense strand comprises at least 15, e.g., 15, 16, 17, 18, 19, 20, 21, 22, or 23, contiguous nucleotides differing by no more than 0, 1, 2, or 3 nucleotides from any one of the antisense strand nucleotide sequences selected from the group consisting of

(SEQ ID NO: 57)
(a) 5′-AGUUAUTCUGGGACGACUGGUCA-3′;
(SEQ ID NO: 58)
(b) 5′-AGUUAUTCUGGGACGACUGGUCU-3′;
(SEQ ID NO: 59)
(c) 5′-ATGGAGGAUGAGUUAUUCUGGGA-3′;
(SEQ ID NO: 60)
(d) 5′-AUGAAGTGGAGUCUGUGACAGUA-3′;
(SEQ ID NO: 61)
(e) 5′-ACUGAAGUGGAGUCUGUGACAGU-3′;
(SEQ ID NO: 62)
(f) 5′-ACGGAAGAUCCTCAAGCAAAGAG-3′;
(SEQ ID NO: 63)
(g) 5′-ACAGACAAGAAAGUGCCCAUUUG-3′;
(SEQ ID NO: 64)
(h) 5′-AAGAAAGUAUAAAUGCUUGUCUC-3′;
and
(SEQ ID NO: 65)
(i) 5′-AAAGAAAGUAUAAAUGCUUGUCU-3′.

[0026] In some embodiments, the sense strand comprises at least 15, e.g., 15, 16, 17, 18, 19, 20, or 21, contiguous nucleotides differing by no more than 0, 1, 2, or 3 nucleotides and the antisense strand comprises at least 15, e.g., 15, 16, 17, 18, 19, 20, 21, 22, or 23, contiguous nucleotides differing by no more than 0, 1, 2, or 3 nucleotides from any one of the sense and antisense strand nucleotide sequences selected from the group consisting of

(SEQ ID NO: 66)
(a) 5′-ACCAGUCGUCCCAGAAUAACU-3′
and
(SEQ ID NO: 57)
5′-AGUUAUTCUGGGACGACUGGUCA-3′;
(SEQ ID NO: 66)
(b) 5′-ACCAGUCGUCCCAGAAUAACU-3′
and
(SEQ ID NO: 58)
5′-AGUUAUTCUGGGACGACUGGUCU-3′;
(SEQ ID NO: 67)
(c) 5′-CCAGAAUAACUCAUCCUCCAU-3′
and
(SEQ ID NO: 59)
5′-ATGGAGGAUGAGUUAUUCUGGGA-3′;
(SEQ ID NO: 68)
(d) 5′-CUGUCACAGACUCCACUUCAU-3′
and
(SEQ ID NO: 60)
5′-AUGAAGTGGAGUCUGUGACAGUA-3′;
(SEQ ID NO: 69)
(e) 5′-UGUCACAGACUCCACUUCAGU-3′
and
(SEQ ID NO: 61)
5′-ACUGAAGUGGAGUCUGUGACAGU-3′;
(SEQ ID NO: 70)
(f) 5′-CUUUGCUUGAGGAUCUUCCGU-3′
and
(SEQ ID NO: 62)
5′-ACGGAAGAUCCTCAAGCAAAGAG-3′;
(SEQ ID NO: 71)
(g) 5′-AAUGGGCACUUUCUUGUCUGU-3′
and
(SEQ ID NO: 63)
5′-ACAGACAAGAAAGUGCCCAUUUG-3′;
(SEQ ID NO: 72)
(h) 5′-GACAAGCAUUUAUACUUUCUU-3′
and
(SEQ ID NO: 64)
5′-AAGAAAGUAUAAAUGCUUGUCUC-3′;
and
(SEQ ID NO: 73)
(i) 5′-ACAAGCAUUUAUACUUUCUUU-3′
and
(SEQ ID NO: 65)
5′-AAAGAAAGUAUAAAUGCUUGUCU-3′.

[0027] In one embodiment, the dsRNA agent comprises at least one modified nucleotide.

[0028] In one embodiment, substantially all of the nucleotides of the sense strand are modified nucleotides; substantially all of the nucleotides of the antisense strand are modified nucleotides; or substantially all of the nucleotides of the sense strand and substantially all of the nucleotides of the antisense strand are modified nucleotides.

[0029] In one embodiment, all of the nucleotides of the sense strand are modified nucleotides; all of the nucleotides of the antisense strand are modified nucleotides; or all of the nucleotides of the sense strand and all of the nucleotides of the antisense strand are modified nucleotides.

[0030] In one embodiment, at least one of the modified nucleotides is selected from the group consisting of a deoxy-nucleotide, a 3′-terminal deoxythimidine (dT) nucleotide, a 2′-O-methyl modified nucleotide, a 2′-fluoro modified nucleotide, a 2′-deoxy-modified nucleotide, a locked nucleotide, an unlocked nucleotide, a conformationally restricted nucleotide, a constrained ethyl nucleotide, an abasic nucleotide, a 2′-amino-modified nucleotide, a 2′-O-allyl-modified nucleotide, 2′-C-alkyl-modified nucleotide, 2′-hydroxly-modified nucleotide, a 2′-methoxyethyl modified nucleotide, a 2′-O-alkyl-modified nucleotide, a morpholino nucleotide, a phosphoramidate, a non-natural base comprising nucleotide, a tetrahydropyran modified nucleotide, a 1,5-anhydrohexitol modified nucleotide, a cyclohexenyl modified nucleotide, a nucleotide comprising a phosphorothioate group, a nucleotide comprising a methylphosphonate group, a nucleotide comprising a 5′-phosphate, a nucleotide comprising a 5′-phosphate mimic, a thermally destabilizing nucleotide, a glycol modified nucleotide (GNA), a nucleotide comprising a 2′ phosphate, and a 2-O—(N-methylacetamide) modified nucleotide; and combinations thereof.

[0031] In one embodiment, at least one of the modified nucleotides is selected from the group consisting of LNA, HNA, CeNA, 2′-methoxyethyl, 2′-O-alkyl, 2′-O-allyl, 2′-C— allyl, 2′-fluoro, 2′-deoxy, 2′-hydroxyl, and glycol; and combinations thereof.

[0032] In one embodiment, at least one of the modified nucleotides is selected from the group consisting of a deoxy-nucleotide, a 2′-O-methyl modified nucleotide, a 2′-fluoro modified nucleotide, a 2′-deoxy-modified nucleotide, a glycol modified nucleotide (GNA), e.g., Ggn, Cgn, Tgn, or Agn, a nucleotide with a 2′ phosphate, e.g., G2p, C2p, A2p or U2p, a nucleotide comprising a phosphorothioate group, and a vinyl-phosphonate nucleotide; and combinations thereof.

[0033] In another embodiment, at least one of the modified nucleotides is a nucleotide with a thermally destabilizing nucleotide modification.

[0034] In one embodiment, the thermally destabilizing nucleotide modification is selected from the group consisting of an abasic modification; a mismatch with the opposing nucleotide in the duplex; a destabilizing sugar modification, a 2′-deoxy modification, an acyclic nucleotide, an unlocked nucleic acid (UNA), and a glycerol nucleic acid (GNA).

[0035] In some embodiments, the modified nucleotide comprises a short sequence of 3′-terminal deoxythimidine nucleotides (dT).

[0036] In some embodiments, the dsRNA agents further comprise a phosphate or phosphate mimic at the 5′-end of the antisense strand.

[0037] In some embodiments, phosphate mimic is a 5′-vinyl phosphonate (VP).

[0038] In some embodiments, the 5′-end of the antisense strand of the dsRNA agent does not contain a 5′-vinyl phosphonate (VP).

[0039] In some embodiments, the dsRNA agent further comprises at least one terminal, chiral phosphorus atom.

[0040] A site specific, chiral modification to the internucleotide linkage may occur at the 5′ end, 3′ end, or both the 5′ end and 3′ end of a strand. This is being referred to herein as a “terminal” chiral modification. The terminal modification may occur at a 3′ or 5′ terminal position in a terminal region, e.g., at a position on a terminal nucleotide or within the last 2, 3, 4, 5, 6, 7, 8, 9 or 10 nucleotides of a strand. A chiral modification may occur on the sense strand, antisense strand, or both the sense strand and antisense strand. Each of the chiral pure phosphorus atoms may be in either Rp configuration or Sp configuration, and combination thereof. More details regarding chiral modifications and chirally-modified dsRNA agents can be found in PCT/US18/67103, entitled “Chirally-Modified Double-Stranded RNA Agents,” filed Dec. 21, 2018, which is incorporated herein by reference in its entirety.

[0041] In some embodiments, the dsRNA agent further comprises a terminal, chiral modification occurring at the first internucleotide linkage at the 3′ end of the antisense strand, having the linkage phosphorus atom in Sp configuration; a terminal, chiral modification occurring at the first internucleotide linkage at the 5′ end of the antisense strand, having the linkage phosphorus atom in Rp configuration; and a terminal, chiral modification occurring at the first internucleotide linkage at the 5′ end of the sense strand, having the linkage phosphorus atom in either Rp configuration or Sp configuration.

[0042] In one embodiment, the dsRNA agent further comprises a terminal, chiral modification occurring at the first and second internucleotide linkages at the 3′ end of the antisense strand, having the linkage phosphorus atom in Sp configuration; a terminal, chiral modification occurring at the first internucleotide linkage at the 5′ end of the antisense strand, having the linkage phosphorus atom in Rp configuration; and a terminal, chiral modification occurring at the first internucleotide linkage at the 5′ end of the sense strand, having the linkage phosphorus atom in either Rp or Sp configuration.

[0043] In one embodiment, the dsRNA agent further comprises a terminal, chiral modification occurring at the first, second, and third internucleotide linkages at the 3′ end of the antisense strand, having the linkage phosphorus atom in Sp configuration; a terminal, chiral modification occurring at the first internucleotide linkage at the 5′ end of the antisense strand, having the linkage phosphorus atom in Rp configuration; and a terminal, chiral modification occurring at the first internucleotide linkage at the 5′ end of the sense strand, having the linkage phosphorus atom in either Rp or Sp configuration.

[0044] In one embodiment, the dsRNA agent further comprises a terminal, chiral modification occurring at the first and second internucleotide linkages at the 3′ end of the antisense strand, having the linkage phosphorus atom in Sp configuration; a terminal, chiral modification occurring at the third internucleotide linkages at the 3′ end of the antisense strand, having the linkage phosphorus atom in Rp configuration; a terminal, chiral modification occurring at the first internucleotide linkage at the 5′ end of the antisense strand, having the linkage phosphorus atom in Rp configuration; and a terminal, chiral modification occurring at the first internucleotide linkage at the 5′ end of the sense strand, having the linkage phosphorus atom in either Rp or Sp configuration.

[0045] In one embodiment, the dsRNA agent further comprises a terminal, chiral modification occurring at the first and second internucleotide linkages at the 3′ end of the antisense strand, having the linkage phosphorus atom in Sp configuration; a terminal, chiral modification occurring at the first, and second internucleotide linkages at the 5′ end of the antisense strand, having the linkage phosphorus atom in Rp configuration; and a terminal, chiral modification occurring at the first internucleotide linkage at the 5′ end of the sense strand, having the linkage phosphorus atom in either Rp or Sp configuration.

[0046] In some embodiments, the 3′ end of the sense strand is protected via an end cap which is a cyclic group having an amine, said cyclic group being selected from the group consisting of pyrrolidinyl, pyrazolinyl, pyrazolidinyl, imidazolinyl, imidazolidinyl, piperidinyl, piperazinyl, [1,3]dioxolanyl, oxazolidinyl, isoxazolidinyl, morpholinyl, thiazolidinyl, isothiazolidinyl, quinoxalinyl, pyridazinonyl, tetrahydrofuranyl, and decalinyl.

[0047] In one embodiment, the dsRNA agent further comprises at least one phosphorothioate or methylphosphonate internucleotide linkage.

[0048] In one embodiment, the phosphorothioate or methylphosphonate internucleotide linkage is at the 3′-terminus of one strand, e.g., the antisense strand or the sense strand.

[0049] In another embodiment, the phosphorothioate or methylphosphonate internucleotide linkage is at the 5′-terminus of one strand, e.g., the antisense strand or the sense strand.

[0050] In one embodiment, the phosphorothioate or methylphosphonate internucleotide linkage is at the both the 5′- and 3′-terminus of one strand. In one embodiment, the strand is the antisense strand.

[0051] In one embodiment, the base pair at the 1 position of the 5′-end of the antisense strand of the duplex is an AU base pair.

[0052] The double stranded region may be 19-30 nucleotide pairs in length; 19-25 nucleotide pairs in length; 19-23 nucleotide pairs in length; 23-27 nucleotide pairs in length; or 21-23 nucleotide pairs in length.

[0053] In one embodiment, each strand is independently no more than 30 nucleotides in length.

[0054] In one embodiment, the sense strand is 21 nucleotides in length and the antisense strand is 23 nucleotides in length.

[0055] The region of complementarity may be at least 17 nucleotides in length; between 19 and 23 nucleotides in length; or 19 nucleotides in length.

[0056] In one embodiment, at least one strand comprises a 3′ overhang of at least 1 nucleotide. In another embodiment, at least one strand comprises a 3′ overhang of at least 2 nucleotides.

[0057] In some embodiments, one or more C22 hydrocarbon chains is conjugated to one or more internal positions on at least one strand of the dsRNA agent.

[0058] In some embodiments, the lipophilicity of the one or more C22 hydrocarbon chain, measured by octanol-water partition coefficient, log K_{ow}, exceeds 0. The lipophilic moiety may possess a log K_{ow} exceeding 1, exceeding 1.5, exceeding 2, exceeding 3, exceeding 4, exceeding 5, or exceeding 10.

[0059] In some embodiments, the hydrophobicity of the dsRNA agent, measured by the unbound fraction in the plasma protein binding assay of the dsRNA agent, exceeds 0.2. In one embodiment, the plasma protein binding assay determined is an electrophoretic mobility shift assay (EMSA) using human serum albumin protein. The hydrophobicity of the dsRNA agent, measured by fraction of unbound dsRNA in the binding assay, exceeds 0.15, exceeds 0.2, exceeds 0.25, exceeds 0.3, exceeds 0.35, exceeds 0.4, exceeds 0.45, or exceeds 0.5 for an enhanced in vivo delivery of dsRNA/

[0060] The C₂₂ hydrocarbon chain may be saturated or unsaturated.

[0061] The C₂₂ hydrocarbon chain may be linear or branched

[0062] In some embodiments, the internal positions include all positions except the three terminal positions from each end of the at least one strand.

[0063] In some embodiments, the internal positions exclude a cleavage site region of the sense strand.

[0064] In some embodiments, the internal positions exclude positions 9-12 or positions 11-13, counting from the 5′-end of the sense strand.

[0065] In some embodiments, the internal positions exclude a cleavage site region of the antisense strand.

[0066] In some embodiments, the internal positions exclude positions 12-14, counting from the 5′-end of the antisense strand.

[0067] In some embodiments, the one or more C₂₂ hydrocarbon chains are conjugated to one or more of the following internal positions: positions 4-8 and 13-18 on the sense strand, and positions 6-10 and 15-18 on the antisense strand, counting from the 5′end of each strand.

[0068] In some embodiments, the one or more C₂₂ hydrocarbon chains are conjugated to one or more of the following internal positions: positions 5, 6, 7, 15, and 17 on the sense strand, and positions 15 and 17 on the antisense strand, counting from the 5′-end of each strand.

[0069] In some embodiments, the one or more C₂₂ hydrocarbon chains are conjugated to position 6 on the sense strand, counting from the 5′-end of the sense strand.

[0070] In some embodiments, the one or more C₂₂ hydrocarbon chains is an aliphatic, alicyclic, or polyalicyclic compound, e.g., the one or more C₂₂ hydrocarbon chains contains a functional group selected from the group consisting of hydroxyl, amine, carboxylic acid, sulfonate, phosphate, thiol, azide, and alkyne.

[0071] In some embodiments, the one or more C₂₂ hydrocarbon chains is a C22 acid, e.g. the C22 acid is selected from the group consisting of docosanoic acid, 6-octyltetradecanoic acid, 10-hexylhexadecanoic acid, all-cis-7,10,13,16,19-docosapentaenoic acid, all-cis-4,7,10,13,16,19-docosahexaenoic acid, all-cis-13,16-docosadienoic acid, all-cis-7,10,13,16-docosatetraenoic acid, all-cis-4,7,10,13,16-docosapentaenoic acid, and cis-13-docosenoic acid.

[chemical structure]

[0072] In some embodiments, the one or more C₂₂ hydrocarbon chains is a C22 alcohol, e.g., the C22 alcohol is selected from the group consisting of 1-docosanol, 6-octyltetradecan-1-ol, 10-hexylhexadecan-1-ol, cis-13-docosen-1-ol, docosan-9-ol, docosan-2-ol, docosan-10-ol, docosan-11-ol, and cis-4,7,10,13,16,19-docosahexanol.

[chemical structure]

[0073] In some embodiments, the one or more C₂₂ hydrocarbon chains is a C22 amide, e.g., the C22 amide is selected from the group consisting of (E)-Docos-4-enamide, (E)-Docos-5-enamide, (Z)-Docos-9-enamide, (E)-Docos-11-enamide, 12-Docosenamide, (Z)-Docos-13-enamide, (Z)—N-Hydroxy-13-docoseneamide, (E)-Docos-14-enamide, 6-cis-Docosenamide, 14-Docosenamide Docos-11-enamide, (4E,13E)-Docosa-4,13-dienamide, and (5E,13E)-Docosa-5,13-dienamide.

[0074] The one or more C₂₂ hydrocarbon chains may be conjugated to the dsRNA agent via a direct attachment to the ribosugar of the dsRNA agent. Alternatively, the one or more C₂₂ hydrocarbon chains may be conjugated to the dsRNA agent via a linker or a carrier. In some embodiments, the one or more C₂₂ hydrocarbon chains may be conjugated to the dsRNA agent via internucleotide phosphate linkage.

[chemical structure]

[0075] In certain embodiments, the one or more C₂₂ hydrocarbon chains is conjugated to the dsRNA agent via one or more linkers (tethers), e.g., a carrier that replaces one or more nucleotide(s) in the internal position(s).

[0076] In some embodiments, the one or more C₂₂ hydrocarbon chains is conjugated to the dsRNA agent via a linker a linker containing an ether, thioether, urea, carbonate, amine, amide, maleimide-thioether, disulfide, phosphodiester, sulfonamide linkage, a product of a click reaction (e.g., a triazole from the azide-alkyne cycloaddition), or carbamate.

[0077] In some embodiments, at least one of the linkers (tethers) is a redox cleavable linker (such as a reductively cleavable linker; e.g., a disulfide group), an acid cleavable linker (e.g., a hydrazone group, an ester group, an acetal group, or a ketal group), an esterase cleavable linker (e.g., an ester group), a phosphatase cleavable linker (e.g., a phosphate group), or a peptidase cleavable linker (e.g., a peptide bond).

[0078] In other embodiments, at least one of the linkers (tethers) is a bio-cleavable linker selected from the group consisting of DNA, RNA, disulfide, amide, functionalized monosaccharides or oligosaccharides of galactosamine, glucosamine, glucose, galactose, mannose, and combinations thereof.

[0079] In certain embodiments, the one or more C₂₂ hydrocarbon chains is conjugated to the dsRNA agent via a carrier that replaces one or more nucleotide(s). The carrier can be a cyclic group or an acyclic group. In one embodiment, the cyclic group is selected from the group consisting of pyrrolidinyl, pyrazolinyl, pyrazolidinyl, imidazolinyl, imidazolidinyl, piperidinyl, piperazinyl, [1,3]dioxolane, oxazolidinyl, isoxazolidinyl, morpholinyl, thiazolidinyl, isothiazolidinyl, quinoxalinyl, pyridazinonyl, tetrahydrofuryl, and decalin. In one embodiment, the acyclic group is a moiety based on a serinol backbone or a diethanolamine backbone.

[0080] In some embodiments, the carrier replaces one or more nucleotide(s) in the internal position(s) of the dsRNA agent.

[0081] In some embodiments, the dsRNA agent further comprises a targeting ligand that targets a receptor which mediates delivery to adipose tissue. In one embodiment, the targeting ligand is selected from the group consisting of Angiopep-2, lipoprotein receptor related protein (LRP) ligand, bEnd.3 cell binding ligand, transferrin receptor (TfR) ligand, manose receptor ligand, glucose transporter protein, LDL receptor ligand, trans-retinol, RGD peptide, LDL receptor ligand, CD63 ligand, and carbohydrate based ligand.

[0082] In some embodiments, the dsRNA agent further comprises a targeting ligand that targets a liver tissue.

[0083] In one embodiment, the targeting ligand is conjugated to the 3′ end of the sense strand of the dsRNA agent.

[0084] In some embodiments, the targeting ligand is a carbohydrate-based ligand.

[0085] In one embodiment, the targeting ligand is an N-acetylgalactosamine (GalNAc) derivative.

[0086] In one embodiment, the targeting ligand is one or more GalNAc derivatives attached through a monovalent, bivalent, or trivalent branched linker.

[0087] In one embodiment, the targeting ligand is

[chemical structure]

[0088] In one embodiment, the dsRNA agent is conjugated to the targeting ligand as shown in the following schematic

[chemical structure]

and, wherein X is O or S.

[0089] In one embodiment, the X is O.

[0090] In some embodiments, the one or more C₂₂ hydrocarbon chains or targeting ligand is conjugated via a bio-cleavable linker selected from the group consisting of DNA, RNA, disulfide, amide, functionalized monosaccharides or oligosaccharides of galactosamine, glucosamine, glucose, galactose, mannose, and combinations thereof.

[0091] In one aspect, the present invention provides a double stranded ribonucleic acid (dsRNA) agent for inhibiting expression of inhibin subunit beta E (INHBE), wherein said dsRNA agent comprises a sense strand and an antisense strand forming a double stranded region, wherein the sense strand comprises at least 15, e.g., 15, 16, 17, 18, 19, 20, or 21, contiguous nucleotides differing by no more than 0, 1, 2, 3, or 4 nucleotides from the nucleotide sequence ascscagucgUfCfCfcagaaaawu (SEQ ID NO: 74), wherein the antisense strand comprises at least 15, e.g., 15, 16, 17, 18, 19, 20, 21, 22, or 23, contiguous nucleotides differencing by no more than 0, 1, 2, 3, or 4 nucleotides from the nucleotide sequence asdGsuudAudTcuggdGaCfgacugguscsa (SEQ ID NO:75), wherein a, g, c and u are 2′-O-methyl (2′-OMe) A, G, C, and U; Af, Gf, Cf, and Uf are 2′-fluoro A, G, C and U; dA, dG, dC and dT are 2′-deoxy A, G, C and T; s is a phosphorothioate linkage; and wherein the dsRNA comprises one or more C22 hydrocarbon chains conjugated to one or more internal positions on at least one strand of the dsRNA agent.

[0092] In one aspect, the present invention provides a double stranded ribonucleic acid (dsRNA) agent for inhibiting expression of inhibin subunit beta E (INHBE), wherein said dsRNA agent comprises a sense strand and an antisense strand forming a double stranded region, wherein the sense strand comprises at least 15, e.g., 15, 16, 17, 18, 19, 20, or 21, contiguous nucleotides differing by no more than 0, 1, 2, 3, or 4 nucleotides from the nucleotide sequence ascscagucgUfCfCfcagaaaawu (SEQ ID NO: 74), wherein the antisense strand comprises at least 15, e.g., 15, 16, 17, 18, 19, 20, 21, 22, or 23, contiguous nucleotides differencing by no more than 0, 1, 2, 3, or 4 nucleotides from the nucleotide sequence asdGsuudAudTcuggdGaCfgacugguscsu (SEQ ID NO: 76), wherein a, g, c and u are 2′-O-methyl (2′-OMe) A, G, C, and U; Af, Gf, Cf, and Uf are 2′-fluoro A, G, C and U; dA, dG, dC and dT are 2′-deoxy A, G, C and T; s is a phosphorothioate linkage; and wherein the dsRNA comprises one or more C22 hydrocarbon chains conjugated to one or more internal positions on at least one strand of the dsRNA agent.

[0093] In one aspect, the present invention provides a double stranded ribonucleic acid (dsRNA) agent for inhibiting expression of inhibin subunit beta E (INHBE), wherein said dsRNA agent comprises a sense strand and an antisense strand forming a double stranded region, wherein the sense strand comprises at least 15, e.g., 15, 16, 17, 18, 19, 20, or 21, contiguous nucleotides differing by no more than 0, 1, 2, 3, or 4 nucleotides from the nucleotide sequence cscsagaauaAfCfUfcauccuccau (SEQ ID NO:77), wherein the antisense strand comprises at least 15, e.g., 15, 16, 17, 18, 19, 20, 21, 22, or 23, contiguous nucleotides differencing by no more than 0, 1, 2, 3, or 4 nucleotides from the nucleotide sequence asdTsggdAgdGaugadGuUfauucuggsgsa (SEQ ID NO: 78), wherein a, g, c and u are 2′-O-methyl (2′-OMe) A, G, C, and U; Af, Gf, Cf, and Uf are 2′-fluoro A, G, C and U; dA, dG, dC and dT are 2′-deoxy A, G, C and T; s is a phosphorothioate linkage; and wherein the dsRNA comprises one or more C22 hydrocarbon chains conjugated to one or more internal positions on at least one strand of the dsRNA agent.

[0094] In one aspect, the present invention provides a double stranded ribonucleic acid (dsRNA) agent for inhibiting expression of inhibin subunit beta E (INHBE), wherein said dsRNA agent comprises a sense strand and an antisense strand forming a double stranded region, wherein the sense strand comprises at least 15, e.g., 15, 16, 17, 18, 19, 20, or 21, contiguous nucleotides differing by no more than 0, 1, 2, 3, or 4 nucleotides from the nucleotide sequence csusgucaCfaGfAftfuccacuucau (SEQ ID NO: 79), wherein the antisense strand comprises at least 15, e.g., 15, 16, 17, 18, 19, 20, 21, 22, or 23, contiguous nucleotides differencing by no more than 0, 1, 2, 3, or 4 nucleotides from the nucleotide sequence asUfsgadAg(Tgn)ggagucUfgUfgacagsusa (SEQ ID NO: 80), wherein a, g, c and u are 2′-O-methyl (2′-OMe) A, G, C, and U; Af, Gf, Cf, and Uf are 2′-fluoro A, G, C and U; dA, dG, dC and dT are 2′-deoxy A, G, C and T; Tgn is thymidine-glycol nucleic acid (GNA) S-isomer; s is a phosphorothioate linkage; and wherein the dsRNA comprises one or more C22 hydrocarbon chains conjugated to one or more internal positions on at least one strand of the dsRNA agent.

[0095] In one aspect, the present invention provides a double stranded ribonucleic acid (dsRNA) agent for inhibiting expression of inhibin subunit beta E (INHBE), wherein said dsRNA agent comprises a sense strand and an antisense strand forming a double stranded region, wherein the sense strand comprises at least 15, e.g., 15, 16, 17, 18, 19, 20, or 21, contiguous nucleotides differing by no more than 0, 1, 2, 3, or 4 nucleotides from the nucleotide sequence usgsucacagAfCfUfccacuucagu (SEQ ID NO: 81), wherein the antisense strand comprises at least 15, e.g., 15, 16, 17, 18, 19, 20, 21, 22, or 23, contiguous nucleotides differencing by no more than 0, 1, 2, 3, or 4 nucleotides from the nucleotide sequence asdCsugdAadGuggadGuCfugugacasgsu (SEQ ID NO: 82), wherein a, g, c and u are 2′-O-methyl (2′-OMe) A, G, C, and U; Af, Gf, Cf, and Uf are 2′-fluoro A, G, C and U; dA, dG, dC and dT are 2′-deoxy A, G, C and T; s is a phosphorothioate linkage; and wherein the dsRNA comprises one or more C22 hydrocarbon chains conjugated to one or more internal positions on at least one strand of the dsRNA agent.

[0096] In one aspect, the present invention provides a double stranded ribonucleic acid (dsRNA) agent for inhibiting expression of inhibin subunit beta E (INHBE), wherein said dsRNA agent comprises a sense strand and an antisense strand forming a double stranded region, wherein the sense strand comprises at least 15, e.g., 15, 16, 17, 18, 19, 20, or 21, contiguous nucleotides differing by no more than 0, 1, 2, 3, or 4 nucleotides from the nucleotide sequence csusuugcuuGfAfGfgaucuuccgu (SEQ ID NO: 83), wherein the antisense strand comprises at least 15, e.g., 15, 16, 17, 18, 19, 20, 21, 22, or 23, contiguous nucleotides differencing by no more than 0, 1, 2, 3, or 4 nucleotides from the nucleotide sequence asdCsggdAadGauccdTcAfagcaaagsasg (SEQ ID NO: 84), wherein a, g, c and u are 2′-O-methyl (2′-OMe) A, G, C, and U; Af, Gf, Cf, and Uf are 2′-fluoro A, G, C and U; dA, dG, dC and dT are 2′-deoxy A, G, C and T; s is a phosphorothioate linkage; and wherein the dsRNA comprises one or more C22 hydrocarbon chains conjugated to one or more internal positions on at least one strand of the dsRNA agent.

[0097] In one aspect, the present invention provides a double stranded ribonucleic acid (dsRNA) agent for inhibiting expression of inhibin subunit beta E (INHBE), wherein said dsRNA agent comprises a sense strand and an antisense strand forming a double stranded region, wherein the sense strand comprises at least 15, e.g., 15, 16, 17, 18, 19, 20, or 21, contiguous nucleotides differing by no more than 0, 1, 2, 3, or 4 nucleotides from the nucleotide sequence asasugggcaCfUfUfucuugucugu (SEQ ID NO: 85), wherein the antisense strand comprises at least 15, e.g., 15, 16, 17, 18, 19, 20, 21, 22, or 23, contiguous nucleotides differencing by no more than 0, 1, 2, 3, or 4 nucleotides from the nucleotide sequence asdCsagdAcdAagaadAgUfgcccauususg (SEQ ID NO: 86), wherein a, g, c and u are 2′-O-methyl (2′-OMe) A, G, C, and U; Af, Gf, Cf, and Uf are 2′-fluoro A, G, C and U; dA, dG, dC and dT are 2′-deoxy A, G, C and T; s is a phosphorothioate linkage; and wherein the dsRNA comprises one or more C22 hydrocarbon chains conjugated to one or more internal positions on at least one strand of the dsRNA agent.

[0098] In one aspect, the present invention provides a double stranded ribonucleic acid (dsRNA) agent for inhibiting expression of inhibin subunit beta E (INHBE), wherein said dsRNA agent comprises a sense strand and an antisense strand forming a double stranded region, wherein the sense strand comprises at least 15, e.g., 15, 16, 17, 18, 19, 20, or 21, contiguous nucleotides differing by no more than 0, 1, 2, 3, or 4 nucleotides from the nucleotide sequence gsascaagcaUfUfUfauacuuucuu (SEQ ID NO: 87), wherein the antisense strand comprises at least 15, e.g., 15, 16, 17, 18, 19, 20, 21, 22, or 23, contiguous nucleotides differencing by no more than 0, 1, 2, 3, or 4 nucleotides from the nucleotide sequence asdAsgadAadGuauadAaUfgcuugucsusc (SEQ ID NO:88), wherein a, g, c and u are 2′-O-methyl (2′-OMe) A, G, C, and U; Af, Gf, Cf, and Uf are 2′-fluoro A, G, C and U; dA, dG, dC and dT are 2′-deoxy A, G, C and T; s is a phosphorothioate linkage; and wherein the dsRNA comprises one or more C22 hydrocarbon chains conjugated to one or more positions on at least one strand of the dsRNA agent.

[0099] In one aspect, the present invention provides a double stranded ribonucleic acid (dsRNA) agent for inhibiting expression of inhibin subunit beta E (INHBE), wherein said dsRNA agent comprises a sense strand and an antisense strand forming a double stranded region, wherein the sense strand comprises at least 15, e.g., 15, 16, 17, 18, 19, 20, or 21, contiguous nucleotides differing by no more than 0, 1, 2, 3, or 4 nucleotides from the nucleotide sequence ascsaagcauUfUfAfuacuuucuuu (SEQ ID NO: 89), wherein the antisense strand comprises at least 15, e.g., 15, 16, 17, 18, 19, 20, 21, 22, or 23, contiguous nucleotides differencing by no more than 0, 1, 2, 3, or 4 nucleotides from the nucleotide sequence asdAsagdAadAguaudAaAfugcuuguscsu (SEQ ID NO:90), wherein a, g, c and u are 2′-O-methyl (2′-OMe) A, G, C, and U; Af, Gf, Cf, and Uf are 2′-fluoro A, G, C and U; dA, dG, dC and dT are 2′-deoxy A, G, C and T; s is a phosphorothioate linkage; and wherein the dsRNA comprises one or more C22 hydrocarbon chains conjugated to one or more internal positions on at least one strand of the dsRNA agent.

[0100] In some embodiments, the lipophilicity of the one or more C₂₂ hydrocarbon chain, measured by octanol-water partition coefficient, log K_{ow}, exceeds 0. The lipophilic moiety may possess a log K_{ow} exceeding 1, exceeding 1.5, exceeding 2, exceeding 3, exceeding 4, exceeding 5, or exceeding 10.

[0101] In some embodiments, the hydrophobicity of the dsRNA agent, measured by the unbound fraction in the plasma protein binding assay of the dsRNA agent, exceeds 0.2. In one embodiment, the plasma protein binding assay determined is an electrophoretic mobility shift assay (EMSA) using human serum albumin protein. The hydrophobicity of the dsRNA agent, measured by fraction of unbound dsRNA in the binding assay, exceeds 0.15, exceeds 0.2, exceeds 0.25, exceeds 0.3, exceeds 0.35, exceeds 0.4, exceeds 0.45, or exceeds 0.5 for an enhanced in vivo delivery of dsRNA/

[0102] The C₂₂ hydrocarbon chain may be saturated or unsaturated.

[0103] The C₂₂ hydrocarbon chain may be linear or branched

[0104] In some embodiments, the internal positions include all positions except the three terminal positions from each end of the at least one strand.

[0105] In some embodiments, the internal positions exclude a cleavage site region of the sense strand.

[0106] In some embodiments, the internal positions exclude positions 9-12 or positions 11-13, counting from the 5′-end of the sense strand.

[0107] In some embodiments, the internal positions exclude a cleavage site region of the antisense strand.

[0108] In some embodiments, the internal positions exclude positions 12-14, counting from the 5′ end of the antisense strand.

[0109] In some embodiments, the one or more C₂₂ hydrocarbon chains are conjugated to one or more of the following internal positions: positions 4-8 and 13-18 on the sense strand, and positions 6-10 and 15-18 on the antisense strand, counting from the 5′end of each strand.

[0110] In some embodiments, the one or more C₂₂ hydrocarbon chains are conjugated to one or more of the following internal positions: positions 5, 6, 7, 15, and 17 on the sense strand, and positions 15 and 17 on the antisense strand, counting from the 5′-end of each strand.

[0111] In some embodiments, the one or more C₂₂ hydrocarbon chains are conjugated to position 6 on the sense strand, counting from the 5′-end of the sense strand.

[0112] In some embodiments, the one or more C₂₂ hydrocarbon chains is an aliphatic, alicyclic, or polyalicyclic compound, e.g., the one or more C₂₂ hydrocarbon chains contains a functional group selected from the group consisting of hydroxyl, amine, carboxylic acid, sulfonate, phosphate, thiol, azide, and alkyne.

[0113] In some embodiments, the one or more C₂₂ hydrocarbon chains is a C22 acid, e.g. the C22 acid is selected from the group consisting of docosanoic acid, 6-octyltetradecanoic acid, 10-hexylhexadecanoic acid, all-cis-7,10,13,16,19-docosapentaenoic acid, all-cis-4,7,10,13,16,19-docosahexaenoic acid, all-cis-13,16-docosadienoic acid, all-cis-7,10,13,16-docosatetraenoic acid, all-cis-4,7,10,13,16-docosapentaenoic acid, and cis-13-docosenoic acid.

[chemical structure]

[0114] In some embodiments, the one or more C₂₂ hydrocarbon chains is a C22 alcohol, e.g., the C22 alcohol is selected from the group consisting of 1-docosanol, 6-octyltetradecan-1-ol, 10-hexylhexadecan-1-ol, cis-13-docosen-1-ol, docosan-9-ol, docosan-2-ol, docosan-10-ol, docosan-11-ol, and cis-4,7,10,13,16,19-docosahexanol.

[chemical structure]

[0115] In some embodiments, the one or more C₂₂ hydrocarbon chains is a C22 amide, e.g., the C22 amide is selected from the group consisting of (E)-Docos-4-enamide, (E)-Docos-5-enamide, (Z)-Docos-9-enamide, (E)-Docos-11-enamide, 12-Docosenamide, (Z)-Docos-13-enamide, (Z)—N-Hydroxy-13-docoseneamide, (E)-Docos-14-enamide, 6-cis-Docosenamide, 14-Docosenamide Docos-11-enamide, (4E,13E)-Docosa-4,13-dienamide, and (5E,13E)-Docosa-5,13-dienamide.

[0116] The one or more C₂₂ hydrocarbon chains may be conjugated to the dsRNA agent via a direct attachment to the ribosugar of the dsRNA agent. Alternatively, the one or more C₂₂ hydrocarbon chains may be conjugated to the dsRNA agent via a linker or a carrier. In some embodiments, the one or more C₂₂ hydrocarbon chains may be conjugated to the dsRNA agent via internucleotide phosphate linkage.

[chemical structure]

[0117] In certain embodiments, the one or more C₂₂ hydrocarbon chains is conjugated to the dsRNA agent via one or more linkers (tethers), e.g., a carrier that replaces one or more nucleotide(s) in the internal position(s).

[0118] In some embodiments, the one or more C₂₂ hydrocarbon chains is conjugated to the dsRNA agent via a linker a linker containing an ether, thioether, urea, carbonate, amine, amide, maleimide-thioether, disulfide, phosphodiester, sulfonamide linkage, a product of a click reaction (e.g., a triazole from the azide-alkyne cycloaddition), or carbamate.

[0119] In some embodiments, at least one of the linkers (tethers) is a redox cleavable linker (such as a reductively cleavable linker; e.g., a disulfide group), an acid cleavable linker (e.g., a hydrazone group, an ester group, an acetal group, or a ketal group), an esterase cleavable linker (e.g., an ester group), a phosphatase cleavable linker (e.g., a phosphate group), or a peptidase cleavable linker (e.g., a peptide bond).

[0120] In other embodiments, at least one of the linkers (tethers) is a bio-cleavable linker selected from the group consisting of DNA, RNA, disulfide, amide, functionalized monosaccharides or oligosaccharides of galactosamine, glucosamine, glucose, galactose, mannose, and combinations thereof.

[0121] In certain embodiments, the one or more C₂₂ hydrocarbon chains is conjugated to the dsRNA agent via a carrier that replaces one or more nucleotide(s). The carrier can be a cyclic group or an acyclic group. In one embodiment, the cyclic group is selected from the group consisting of pyrrolidinyl, pyrazolinyl, pyrazolidinyl, imidazolinyl, imidazolidinyl, piperidinyl, piperazinyl, [1,3]dioxolane, oxazolidinyl, isoxazolidinyl, morpholinyl, thiazolidinyl, isothiazolidinyl, quinoxalinyl, pyridazinonyl, tetrahydrofuryl, and decalin. In one embodiment, the acyclic group is a moiety based on a serinol backbone or a diethanolamine backbone.

[0122] In some embodiments, the carrier replaces one or more nucleotide(s) in the internal position(s) of the dsRNA agent.

[0123] In some embodiments, the dsRNA agent further comprises a targeting ligand that targets a receptor which mediates delivery to adipose tissue. In one embodiment, the targeting ligand is selected from the group consisting of Angiopep-2, lipoprotein receptor related protein (LRP) ligand, bEnd.3 cell binding ligand, transferrin receptor (TfR) ligand, manose receptor ligand, glucose transporter protein, LDL receptor ligand, trans-retinol, RGD peptide, LDL receptor ligand, CD63 ligand, and carbohydrate based ligand.

[0124] In some embodiments, the dsRNA agent further comprises a targeting ligand that targets a liver tissue.

[0125] In one embodiment, the targeting ligand is conjugated to the 3′ end of the sense strand of the dsRNA agent.

[0126] In some embodiments, the targeting ligand is a carbohydrate-based ligand.

[0127] In one embodiment, the targeting ligand is an N-acetylgalactosamine (GalNAc) derivative.

[0128] In one embodiment, the targeting ligand is one or more GalNAc derivatives attached through a monovalent, bivalent, or trivalent branched linker.

[0129] In one embodiment, the targeting ligand is

[chemical structure]

[0130] In one embodiment, the dsRNA agent is conjugated to the targeting ligand as shown in the following schematic

[chemical structure]

and, wherein X is O or S.

[0131] In one embodiment, the X is O.

[0132] In some embodiments, the one or more C22 hydrocarbon chains or targeting ligand is conjugated via a bio-cleavable linker selected from the group consisting of DNA, RNA, disulfide, amide, functionalized monosaccharides or oligosaccharides of galactosamine, glucosamine, glucose, galactose, mannose, and combinations thereof.

[0133] The present invention also provides cells containing any of the dsRNA agents of the invention and pharmaceutical compositions comprising any of the dsRNA agents of the invention.

[0134] The pharmaceutical composition of the invention may include dsRNA agent in an unbuffered solution, e.g., saline or water, or the pharmaceutical composition of the invention may include the dsRNA agent is in a buffer solution, e.g., a buffer solution comprising acetate, citrate, prolamine, carbonate, or phosphate or any combination thereof; or phosphate buffered saline (PBS).

[0135] In one aspect, the present invention provides a method of inhibiting expression of a metabolic disorder-associated target gene selected from the group consisting of inhibin subunit beta E (INHBE), activin A receptor type 1C (ACVR1C), perilipin-1 (PLIN1), phosphodiesterase 3B (PDE3B), and inhibin subunit beta C (INHBC) in a cell, such as an adipocyte and/or a liver cell. The method includes contacting the cell with any of the dsRNAs of the invention or any of the pharmaceutical compositions of the invention, thereby inhibiting expression of the target gene in the cell.

[0136] In one embodiment, the target gene is INHBE.

[0137] In one embodiment, the target gene is ACVR1C.

[0138] In one embodiment, the target gene is PLIN1.

[0139] In one embodiment, the target gene is PDE3B.

[0140] In one embodiment, the target gene is INHBC.

[0141] In one embodiment, the cell is within a subject, e.g., a human subject, e.g., a subject having a metabolic disorder, such as diabetes, metabolic syndrome, cardiovascular disease, or hypertension.

[0142] In one embodiment, the cell is an adipocyte.

[0143] In one embodiment, the cell is a hepatocyte.

[0144] In certain embodiments, the target gene expression is inhibited by at least about 30%, 40%, 50%, 60%, 70%, 80%, 90%, or 95%. In one embodiment, inhibiting expression of the target gene decreases target gene protein level in serum of the subject by at least 30%, 40%, 50%, 60%, 70%, 80%, 90%, or 95%.

[0145] In one aspect, the present invention provides a method of treating a metabolic disorder. The method includes administering to the subject a therapeutically effective amount of any of the dsRNAs of the invention or any of the pharmaceutical compositions of the invention, thereby treating the subject having the metabolic disorder.

[0146] In another aspect, the present invention provides a method of preventing at least one symptom in a subject having a metabolic disorder. The method includes administering to the subject a prophylactically effective amount of any of the dsRNAs of the invention or any of the pharmaceutical compositions of the invention, thereby preventing at least one symptom in the subject having the metabolic disorder.

[0147] In one embodiment, the target gene is INHBE.

[0148] In one embodiment, the target gene is ACVR1C.

[0149] In one embodiment, the target gene is PLIN1.

[0150] In one embodiment, the target gene is PDE3B.

[0151] In one embodiment, the target gene is INHBC.

[0152] In one embodiment, administration of a therapeutically or prophylactically effective amount decreases the waist-to-hip ratio adjusted for body mass index in the subject.

[0153] The metabolic disorder may be, e.g. metabolic syndrome, a disorder of carbohydrates, e.g., type II diabetes, pre-diabetes, a lipid metabolism disorder, e.g., a hyperlipidemia, hypertension, lipodystrophy; a kidney disease; a cardiovascular disease, a disorder of body weight.

[0154] In some embodiments, the metabolic disorder is metabolic syndrome.

[0155] In some embodiments, the metabolic disorder is type 2 diabetes.

[0156] In some embodiments, the metabolic disorder is obesity.

[0157] In some embodiments, the metabolic disorder is elevated triglyceride level.

[0158] In some embodiments, the metabolic disorder is lipodystrophy.

[0159] In some embodiments, the metabolic disorder liver inflammation.

[0160] In some embodiments, the metabolic disorder is fatty liver disease.

[0161] In some embodiments, the metabolic disorder is hypercholesterolemia.

[0162] In some embodiments, the metabolic disorder is elevated liver enzyme.

[0163] In some embodiments, the metabolic disorder is nonalcoholic steatohepatitis (NASH).

[0164] In some embodiments, the metabolic disorder is cardiovascular disease.

[0165] In some embodiments, the metabolic disorder is hypertension.

[0166] In some embodiments, the metabolic disorder is cardiomyopathy.

[0167] In some embodiments, the metabolic disorder is heart failure.

[0168] In some embodiments, the metabolic disorder is kidney disease.

[0169] In certain embodiments, administration of the dsRNA to the subject causes a decrease target gene protein accumulation in the subject.

[0170] In a further aspect, the present invention also provides methods of inhibiting the expression of a metabolic disorder-associated target gene selected from the group consisting of inhibin subunit beta E (INHBE), activin A receptor type 1C (ACVR1C), perilipin-1 (PLIN1), phosphodiesterase 3B (PDE3B), and inhibin subunit beta C (INHBC) in a subject. The methods include administering to the subject a therapeutically effective amount of any of the dsRNAs provided herein, thereby inhibiting the expression of the target gene in the subject.

[0171] In one embodiment, the subject is human.

[0172] In one embodiment, the dsRNA agent is administered to the subject at a dose of about 0.01 mg/kg to about 50 mg/kg.

[0173] In one embodiment, the dsRNA agent is administered to the subject subcutaneously.

[0174] In one embodiment, the methods of the invention include further determining the level of the target gene in a sample(s) from the subject.

[0175] In one embodiment, the level of the target gene in the subject sample(s) is a target gene protein level in a blood or serum or liver tissue sample(s).

[0176] In certain embodiments, the methods of the invention further comprise administering to the subject an additional therapeutic agent.

[0177] In certain embodiments, the additional therapeutic agent is selected from the group consisting of insulin, a glucagon-like peptide 1 agonist, a sulfonylurea, a seglitinide, a biguanide, a thiazolidinedione, an alpha-glucosidase inhibitor, an SGLT2 inhibitor, a DPP-4 inhibitor, an HMG-CoA reductase inhibitor, a statin, and a combination of any of the foregoing.

[0178] The present invention also provides kits comprising any of the dsRNAs of the invention or any of the pharmaceutical compositions of the invention, and optionally, instructions for use. In one embodiment, the invention provides a kit for performing a method of inhibiting expression of a metabolic disorder-associated target gene selected from the group consisting of inhibin subunit beta E (INHBE), activin A receptor type 1C (ACVR1C), perilipin-1 (PLIN1), phosphodiesterase 3B (PDE3B), and inhibin subunit beta C (INHBC) in a cell by contacting a cell with a double stranded RNAi agent of the invention in an amount effective to inhibit expression of the target gene in the cell. The kit comprises an RNAi agent and instructions for use and, optionally, means for administering the RNAi agent to a subject.

[0179] The present invention further provides an RNA-induced silencing complex (RISC) comprising an antisense strand of any of the dsRNA agents of the invention.

### BRIEF DESCRIPTION OF THE DRAWINGS

[0180] FIG. 1 is a schematic of the study design to determine the pharmacodynamic activity of duplexes of interest targeting INHBE in non-human primates (NHP).

[0181] FIG. 2A is a graph depicting the level of INHBE mRNA in the liver of non-human primates subcutaneously administered a single 3 mg/kg dose of the indicated duplexes at Day 28 post-dose.

[0182] FIG. 2B is a graph depicting the level of INHBC mRNA in the liver of non-human primates subcutaneously administered a single 3 mg/kg dose of the indicated duplexes at Day 28 post-dose.

### DETAILED DESCRIPTION OF THE INVENTION

[0183] The present invention provides iRNA compositions which effect the RNA-induced silencing complex (RISC)-mediated cleavage of RNA transcripts of a metabolic disorder-associated target gene selected from the group consisting of inhibin subunit beta E (INHBE), activin A receptor type 1C (ACVR1C), perilipin-1 (PLIN1), phosphodiesterase 3B (PDE3B), and inhibin subunit beta C (INHBC). The gene may be within a cell, such as an adipocyte and/or a liver cell, e.g., a cell within a subject, such as a human. The use of these iRNAs enables the targeted degradation of mRNAs of the corresponding gene (INHBE, ACVR1C, PLIN1, PDE3B, or INHBC) in mammals.

[0184] The iRNAs of the invention have been designed to target a metabolic disorder-associated target gene selected from the group consisting of inhibin subunit beta E (INHBE), activin A receptor type 1C (ACVR1C), perilipin-1 (PLIN1), phosphodiesterase 3B (PDE3B), and inhibin subunit beta C (INHBC), including portions of the gene that are conserved in orthologs of other mammalian species. Without intending to be limited by theory, it is believed that a combination or sub-combination of the foregoing properties and the specific target sites or the specific modifications in these iRNAs confer to the iRNAs of the invention improved efficacy, stability, potency, durability, and safety.

[0185] Accordingly, the present invention provides methods for treating and preventing a metabolic disorder, e.g. metabolic syndrome, a disorder of carbohydrates, e.g., type II diabetes, pre-diabetes, a lipid metabolism disorder, e.g., a hyperlipidemia, hypertension, lipodystrophy; a kidney disease; a cardiovascular disease, a disorder of body weight, using iRNA compositions which effect the RNA-induced silencing complex (RISC)-mediated cleavage of RNA transcripts of a metabolic disorder-associated target gene selected from the group consisting of inhibin subunit beta E (INHBE), activin A receptor type 1C (ACVR1C), perilipin-1 (PLIN1), phosphodiesterase 3B (PDE3B), and inhibin subunit beta C (INHBC).

[0186] The iRNAs of the invention include an RNA strand (the antisense strand) having a region which is up to about 30 nucleotides or less in length, e.g., 19-30, 19-29, 19-28, 19-27, 19-26, 19-25, 19-24, 19-23, 19-22, 19-21, 19-20, 20-30, 20-29, 20-28, 20-27, 20-26, 20-25, 20-24, 20-23, 20-22, 20-21, 21-30, 21-29, 21-28, 21-27, 21-26, 21-25, 21-24, 21-23, or 21-22 nucleotides in length, which region is substantially complementary to at least part of an mRNA transcript of a metabolic disorder-associated target gene.

[0187] In certain embodiments, one or both of the strands of the double stranded RNAi agents of the invention is up to 66 nucleotides in length, e.g., 36-66, 26-36, 25-36, 31-60, 22-43, 27-53 nucleotides in length, with a region of at least 19 contiguous nucleotides that is substantially complementary to at least a part of an mRNA transcript of a metabolic disorder-associated target gene. In some embodiments, such iRNA agents having longer length antisense strands may, for example, include a second RNA strand (the sense strand) of 20-60 nucleotides in length wherein the sense and antisense strands form a duplex of 18-30 contiguous nucleotides.

[0188] The use of iRNAs of the invention enables the targeted degradation of mRNAs of the corresponding gene (INHBE, ACVR1C, PLIN1, PDE3B, or INHBC gene) in mammals. Using in vitro assays, the present inventors have demonstrated that iRNAs targeting the gene can potently mediate RNAi, resulting in significant inhibition of expression of the target gene. Thus, methods and compositions including these iRNAs are useful for treating a subject having a metabolic disorder, e.g. metabolic syndrome, a disorder of carbohydrates, e.g., type II diabetes, pre-diabetes, a lipid metabolism disorder, e.g., a hyperlipidemia, hypertension, lipodystrophy; a kidney disease; a cardiovascular disease, a disorder of body weight.

[0189] Accordingly, the present invention provides methods and combination therapies for treating a subject having a metabolic disorder that would benefit from inhibiting or reducing the expression of a metabolic disorder associated target gene selected from the group consisting of inhibin subunit beta E (INHBE), activin A receptor type 1C (ACVR1C), perilipin-1 (PLIN1), phosphodiesterase 3B (PDE3B), and inhibin subunit beta C (INHBC), e.g., metabolic syndrome, a disorder of carbohydrates, e.g., type II diabetes, pre-diabetes, a lipid metabolism disorder, e.g., a hyperlipidemia, hypertension, lipodystrophy; a kidney disease; a cardiovascular disease, a disorder of body weight, using iRNA compositions which effect the RNA-induced silencing complex (RISC)-mediated cleavage of RNA transcripts of INHBE, ACVR1C, PLIN1, PDE3B, or INHBC.

[0190] The present invention also provides methods for preventing at least one symptom in a subject having a disorder that would benefit from inhibiting or reducing the expression of a metabolic disorder-associated target gene selected from the group consisting of inhibin subunit beta E (INHBE), activin A receptor type 1C (ACVR1C), perilipin-1 (PLIN1), phosphodiesterase 3B (PDE3B), and inhibin subunit beta C (INHBC), e.g., metabolic syndrome, a disorder of carbohydrates, e.g., type II diabetes, pre-diabetes, a lipid metabolism disorder, e.g., a hyperlipidemia, hypertension, lipodystrophy; a kidney disease; a cardiovascular disease, a disorder of body weight.

[0191] The following detailed description discloses how to make and use compositions containing iRNAs to inhibit the expression of a metabolic disorder-associated target gene selected from the group consisting of inhibin subunit beta E (INHBE), activin A receptor type 1C (ACVR1C), perilipin-1 (PLIN1), phosphodiesterase 3B (PDE3B), and inhibin subunit beta C (INHBC), as well as compositions, uses, and methods for treating subjects that would benefit from inhibition and/or reduction of the expression of a metabolic disorder-associated target gene selected from the group consisting of inhibin subunit beta E (INHBE), activin A receptor type 1C (ACVR1C), perilipin-1 (PLIN1), phosphodiesterase 3B (PDE3B), and inhibin subunit beta C (INHBC), e.g., subjects susceptible to or diagnosed with a metabolic disorder.

### I. Definitions

[0192] In order that the present invention may be more readily understood, certain terms are first defined. In addition, it should be noted that whenever a value or range of values of a parameter are recited, it is intended that values and ranges intermediate to the recited values are also intended to be part of this invention.

[0193] The articles “a” and “an” are used herein to refer to one or to more than one (i.e., to at least one) of the grammatical object of the article. By way of example, “an element” means one element or more than one element, e.g., a plurality of elements.

[0194] The term “including” is used herein to mean, and is used interchangeably with, the phrase “including but not limited to”.

[0195] The term “or” is used herein to mean, and is used interchangeably with, the term “and/or,” unless context clearly indicates otherwise. For example, “sense strand or antisense strand” is understood as “sense strand or antisense strand or sense strand and antisense strand.”

[0196] The term “about” is used herein to mean within the typical ranges of tolerances in the art. For example, “about” can be understood as about 2 standard deviations from the mean. In certain embodiments, about means ±10%. In certain embodiments, about means ±5%. When about is present before a series of numbers or a range, it is understood that “about” can modify each of the numbers in the series or range.

[0197] The term “at least”, “no less than”, or “or more” prior to a number or series of numbers is understood to include the number adjacent to the term “at least”, and all subsequent numbers or integers that could logically be included, as clear from context. For example, the number of nucleotides in a nucleic acid molecule must be an integer. For example, “at least 19 nucleotides of a 21 nucleotide nucleic acid molecule” means that 19, 20, or 21 nucleotides have the indicated property. When at least is present before a series of numbers or a range, it is understood that “at least” can modify each of the numbers in the series or range.

[0198] As used herein, “no more than” or “or less” is understood as the value adjacent to the phrase and logical lower values or integers, as logical from context, to zero. For example, a duplex with an overhang of “no more than 2 nucleotides” has a 2, 1, or 0 nucleotide overhang. When “no more than” is present before a series of numbers or a range, it is understood that “no more than” can modify each of the numbers in the series or range. As used herein, ranges include both the upper and lower limit.

[0199] As used herein, methods of detection can include determination that the amount of analyte present is below the level of detection of the method.

[0200] In the event of a conflict between an indicated target site and the nucleotide sequence for a sense or antisense strand, the indicated sequence takes precedence.

[0201] In the event of a conflict between a sequence and its indicated site on a transcript or other sequence, the nucleotide sequence recited in the specification takes precedence.

[0202] As used herein, the term “a metabolic disorder-associated target gene” or “target gene” refers to a gene encoding “inhibin subunit beta E” (“INHBE”), “activin A receptor type 1C” (“ACVR1C”), “perilipin-1” (“PLIN1”), “phosphodiesterase 3B” (“PDE3B”), or “inhibin subunit beta C” (“INHBC”).

[0203] In one embodiment, a metabolic disorder-associated target gene is inhibin subunit beta E (INHBE).

[0204] As used herein, “inhibin subunit beta E,” used interchangeably with the terms “INHBE,” refers to a growth factor that belongs to the transforming growth factor-β(TGF-β) family. INHBE mRNA is predominantly expressed in the liver (Fang J. et al. Biochemical & Biophysical Res. Comm. 1997; 231(3):655-61), and INHBE is involved in the regulation of liver cell growth and differentiation (Chabicovsky M. et al. Endocrinology. 2003; 144(8):3497-504). INHBE is also known as inhibin beta E chain, activin E, inhibin beta E subunit, inhibin beta E, and MGC4638. More specifically, INHBE is a hepatokine which has been shown to positively correlate with insulin resistance and body mass index in humans. Quantitative real time-PCR analysis also showed an increase in INHBE gene expression in liver samples from insulin-resistant human subjects. In addition, Inhbe gene expression was shown to be increased in the livers of an art-recognized animal model of a metabolic disorder, i.e., type 2 diabetes, the db/db mouse model. Inhibition of Inhbe expression in db/db mice was demonstrated to suppress body weight gain which was attributable to diminished fat rather than lean mass.

[0205] The sequence of a human INHBE mRNA transcript can be found at, for example, GenBank Accession No. GI: 1877089956 (NM_031479.5; SEQ ID NO:1; reverse complement, SEQ ID NO: 2). The sequence of mouse INHBE mRNA can be found at, for example, GenBank Accession No. GI: 1061899809 (NM_008382.3; SEQ ID NO:3; reverse complement, SEQ ID NO:4). The sequence of rat INHBE mRNA can be found at, for example, GenBank Accession No. GI: 148747589 (NM_031815.2; SEQ ID NO:5; reverse complement, SEQ ID NO: 6). The predicted sequence of Macaca mulatta INHBE mRNA can be found at, for example, GenBank Accession No. GI: 1622845604 (XM_001115958.3; SEQ ID NO:7; reverse complement, SEQ ID NO:8).

[0206] Additional examples of INHBE mRNA sequences are readily available through publicly available databases, e.g., GenBank, UniProt, OMIM, and the Macaca genome project web site.

[0207] Further information on INHBE can be found, for example, at www.ncbi.nlm.nih.gov/gene/?term=INHBE.

[0208] The entire contents of each of the foregoing GenBank Accession numbers and the Gene database numbers are incorporated herein by reference as of the date of filing this application.

[0209] The term INHBE, as used herein, also refers to variations of the INHBE gene including variants provided in the SNP database. Numerous sequence variations within the INHBE gene have been identified and may be found at, for example, NCBI dbSNP and UniProt (see, e.g., www.ncbi.nlm.nih.gov/snp/?term=INHBE, the entire contents of which is incorporated herein by reference as of the date of filing this application.

[0210] In one embodiment, a metabolic disorder-associated target gene is activin A receptor type 1C (ACVR1C).

[0211] As used herein, “activin A receptor type 1C,” used interchangeably with the terms “ACVR1C,” refers to a type I receptor for the TGF-β family of signaling molecule. ACVR1C has intrinsic serine/threonine kinase activities in its cytoplasmic domains, inducing phosphorylation and activation of the SMAD2/3/4 complex, which translocates into the nucleus where it binds SMAD-binding elements (SBE) to activate gene transcription. Expression levels of ACVR1C varies greatly among tissues, but white and brown adipose tissues have the highest level of expression. In addition to full length protein, variants of ACVR1C are also expressed in adipose tissues, brain and ovary (Murakami M et al. Biochem Genet. 2013; 51(3-4): 202-210). ACVR1C is also known as “activin receptor-like kinase 7” (ALK-7). A polymorphism in ACVR1C has been found to be associated with increased risk of metabolic syndrome in Chinese females and may be involved in cardiovascular remodeling in patients with metabolic syndrome (Zhang, W et al. Arq Bras Gambol. 2013: 101(2):134-140). Additionally, variants predicted to lead to loss of ACVR1C gene function are thought to influence body fat distribution and protect against type 2 diabetes (Emdin C A et al. Diabetes. 2019: 68(1):226-234). A study conducted in adipocytes of an obese mouse strain demonstrated that ACVR1C dysfunction (due to a nonsense mutation) caused increased lipolysis in adipocytes and led to decreased fat accumulation, and conversely, ACVR1C activation inhibited lipolysis by suppressing the expression of adipose lipases. Furthermore, ACVR1C-deficient mice with lower body weight exhibited enhanced glucose tolerance and insulin sensitivity, and measurement of metabolic rates in these mice revealed increased O₂ consumption, decreased respiratory quotients, and increased energy expenditure (Yogosawa, S et al. Diabetes 2013: 62(1):115-123). The sequence of a human ACVR1C mRNA transcript can be found at, for example, GenBank Accession No. GI: 1519315475 (NM_145259.3, SEQ ID NO:9; reverse complement, SEQ ID NO:10), GI: 1890343165 (NM_001111031.2, SEQ ID NO:11; reverse complement, SEQ ID NO:12), GI: 1676439980 (NM_001111032.2, SEQ ID NO:13, reverse complement SEQ ID NO:14), and GI: 1676318472 (NM_001111033.2, SEQ ID NO:15, reverse complement, SEQ ID NO:16). The sequence of mouse ACVR1C mRNA can be found at, for example, GenBank Accession No. GI: 161333830 (NM_001111030.1, SEQ ID NO:17; reverse complement, SEQ ID NO:18) or GI: 161333829 (NM_001033369.3, SEQ ID NO:19; reverse complement, SEQ ID NO:20). The sequence of rat ACVR1C mRNA can be found at, for example, GenBank Accession No. GI: 1937875934 (NM_139090.2; SEQ ID NO:21; reverse complement, SEQ ID NO:22). The sequence of Macaca mulatta ACVR1C mRNA can be found at, for example, GenBank Accession No. GI: 388454445 (NM_001266690.1; SEQ ID NO:23; reverse complement, SEQ ID NO:24).

[0212] Additional examples of ACVR1C mRNA sequences are readily available through publicly available databases, e.g., GenBank, UniProt, OMIM, and the Macaca genome project web site.

[0213] Further information on ACVR1C can be found, for example, at www.ncbi.nlm.nih.gov/gene/?term=ACVR1C.

[0214] The term ACVR1C, as used herein, also refers to variations of the ACVR1C gene including variants provided in the SNP database. Numerous sequence variations within the ACVR1C gene have been identified and may be found at, for example, NCBI dbSNP and UniProt (see, e.g., www.ncbi.nlm.nih.gov/snp/?term=ACVR1C, the entire contents of which is incorporated herein by reference as of the date of filing this application).

[0215] The entire contents of each of the foregoing GenBank Accession numbers and the Gene database numbers are incorporated herein by reference as of the date of filing this application.

[0216] In one embodiment, a metabolic disorder-associated target gene is perilipin-1 (PLIN1).

[0217] As used herein, “perilipin-1,” used interchangeably with the terms “PLIN1,” refers to a protein which coats lipid storage droplets in adipocytes, thereby protecting them until they can be broken down by hormone-sensitive lipase. PLIN1 expresses predominantly in adipose tissues. PLIN1 is also known as perilipin, lipid droplet-associated protein, PERI, PLIN and FPLD4.

[0218] Constitutive overexpression of PLIN1 in cultured adipocytes has been shown to block the ability of TNF-α to increase lipolysis. In animals, separate laboratories have independently generated lines of PLIN1-null mice and observed that the mice were lean and developed systemic insulin resistance as they got older. Studies comparing lipolysis in PLIN1-null and wild-type mice revealed that PLIN1-null adipocytes had increased rates of constitutive (unstimulated) lipolysis and reduced catecholamine-stimulated lipolysis. Several studies have found that polymorphisms in the PLIN1 gene influence body weight and the risk of metabolic disease. Interestingly, one PLIN1 polymorphism was found to be associated with reduced PLIN1 expression and increased rates of basal and stimulated adipocyte lipolysis; humans with this polymorphism tend to have reduced body weight and body fat mass (Greenberg, A S et al. J Clin Invest. 2011:121(6):2102-2110). Heterozygous frameshift variants in PLIN1 have also been implicated in familial partial lipodystrophy, a rare disease characterized by a limited capacity of peripheral fat to store triglycerides, which results in metabolic abnormalities including insulin resistance, hypertriglyceridemia, abd liver steatosis (Gandotra S, Le Dour C, Bottomley W, et al. N Eng J Med 2011; 364:740-748).

[0219] The sequence of a human PLIN1 mRNA transcript can be found at, for example, GenBank Accession No. GI: 1519242647 (NM_002666.5; SEQ ID NO:25; reverse complement, SEQ ID NO:26) and GI: 1675042447 (NM_001145311.2, SEQ ID NO:27; reverse complement, SEQ ID NO:28). The sequence of mouse PLIN1 mRNA can be found at, for example, GenBank Accession No. GI: 164698407 (NM_175640.2; SEQ ID NO:29; reverse complement, SEQ ID NO:30) and GI: 164698412 (NM_001113471.1, SEQ ID NO:31; reverse complement, SEQ ID NO:32). The sequence of rat PLIN1 mRNA can be found at, for example, GenBank Accession No. GI: 815890869 (NM_001308145.1; SEQ ID NO:33; reverse complement, SEQ ID NO:34). The predicted sequence of Macaca mulatta PLIN1 mRNA can be found at, for example, GenBank Accession No. GI: 1622954660 (XM_028851317.1; SEQ ID NO:35; reverse complement, SEQ ID NO:36).

[0220] Additional examples of PLIN1 mRNA sequences are readily available through publicly available databases, e.g., GenBank, UniProt, OMIM, and the Macaca genome project web site.

[0221] Further information on PLIN1 can be found, for example, at www.ncbi.nlm.nih.gov/gene/?term=PLIN1.

[0222] The entire contents of each of the foregoing GenBank Accession numbers and the Gene database numbers are incorporated herein by reference as of the date of filing this application.

[0223] The term PLIN1, as used herein, also refers to variations of the PLIN1 gene including variants provided in the SNP database. Numerous sequence variations within the PLIN1 gene have been identified and may be found at, for example, NCBI dbSNP and UniProt (see, e.g., www.ncbi.nlm.nih.gov/snp/?term=PLIN1, the entire contents of which is incorporated herein by reference as of the date of filing this application).

[0224] In one embodiment, a metabolic disorder-associated target gene is phosphodiesterase 3B (PDE3B).

[0225] As used herein, “phosphodiesterase 3B,” used interchangeably with the terms “PDE3B,” refers to a phosphodiesterase which hydrolyzes cAMP and cGMP and is expressed in cells of importance for regulation of energy homeostasis, including adipocytes, hepatocytes, hypothalamic cells and β cells. PDE3B is also known as CGMP-inhibited 3′,5′-cyclic phosphodiesterase B, cyclic GMP-inhibited phosphodiesterase B, CGIPDE1, CGIP1 and cyclic nucleotide phosphodiesterase.

[0226] PDE3B proteins are phosphorylated and activated in hepatocytes and adipocytes in response to stimulation by insulin and/or agents that increase cAMP. Activation of PDE3B leads to increased hydrolysis of cAMP and, thereby, inhibition of catecholamine-induced lipolysis. Mice that specifically over-express PDE3B in β cells show a decrease in glucose-induced insulin secretion. PDE3B knock-out (KO) mice demonstrate a number of alterations in the regulation of energy homeostasis, including reduced fat mass, smaller adipocytes, and reduced weight gain than control mice when maintained on a high fat diet (Degerman, E. et al. CurrOpin Pharmaco. 2011:11(6):676-682).

[0227] The sequence of a human PDE3B mRNA transcript can be found at, for example, GenBank Accession No. GI: 1889438535 (NM_001363570.2; SEQ ID NO:37; reverse complement, SEQ ID NO:38), GI: 1519241942 (NM_000922.4, SEQ ID NO:39; reverse complement, SEQ ID NO:40) and GI: 1889636835 (NM_001363569.2, SEQ ID NO:41; reverse complement, SEQ ID NO:42). The sequence of mouse PDE3B mRNA can be found at, for example, GenBank Accession No. GI: 112983647 (NM_011055.2; SEQ ID NO:43; reverse complement, SEQ ID NO:44). The sequence of rat PDE3B mRNA can be found at, for example, GenBank Accession No. GI: 1939401976 (NM_017229.2; SEQ ID NO:45; reverse complement, SEQ ID NO:46). The predicted sequence of Macaca mulatta PDE3B mRNA can be found at, for example, GenBank Accession No. GI: 1622864110 (XM_015114810.2; SEQ ID NO:47; reverse complement, SEQ ID NO:48).

[0228] Additional examples of PDE3B mRNA sequences are readily available through publicly available databases, e.g., GenBank, UniProt, OMIM, and the Macaca genome project web site.

[0229] Further information on PDE3B can be found, for example, at www.ncbi.nlm.nih.gov/gene/?term=PDE3B.

[0230] The entire contents of each of the foregoing GenBank Accession numbers and the Gene database numbers are incorporated herein by reference as of the date of filing this application.

[0231] The term PDE3B, as used herein, also refers to variations of the PDE3B gene including variants provided in the SNP database. Numerous sequence variations within the PDE3B gene have been identified and may be found at, for example, NCBI dbSNP and UniProt (see, e.g., www.ncbi.nlm.nih.gov/snp/?term=PDE3B, the entire contents of which is incorporated herein by reference as of the date of filing this application.

[0232] In one embodiment, a metabolic disorder-associated target gene is inhibin subunit beta C (INHBC).

[0233] As used herein, “inhibin subunit beta C,” used interchangeably with the terms “INHBC,” refers to the beta C chain of inhibin, a member of the TGF-β superfamily. INHBC mRNA is predominantly expressed in the liver, and INHBC is involved in the regulation of liver cell growth and differentiation (Chabicovsky M. et al. Endocrinology. 2003; 144(8):3497-504). INHBC is also known as inhibin beta C chain, inhibin beta C subunit, inhibin beta C, activin C, activin beta-C chain, and IHBC. In mice, overexpression of INHBC increased total liver weight as a percentage of body weight and increased both hepatocyte proliferation and apoptosis. INHBC has been demonstrated to be significantly upregulated in obese insulin-resistant subjects (Choi, et al. Front Physiol. 2019; 10: 379). SNPs at the INHBC locus were identified as having genome-wide significance with serum urate levels, and also associated with an increase risk of gout (Yang Q, et al. 2010, Circ. Cardiovasc. Genet., 3:523-530). In addition, the INHBC locus also colocalizes with GWAS signals for estimated glomerular filtration rate (eGFR), a marker of renal function (Gudjonsson A. et al., 2022, Nature Communication, 13: 480).

[0234] The sequence of a human INHBC mRNA transcript can be found at, for example, GenBank Accession No. GI: 1519246544 (NM_005538.4; SEQ ID NO:49; reverse complement, SEQ ID NO:50). The sequence of mouse INHBC mRNA can be found at, for example, GenBank Accession No. GI: 1049480142 (NM_010565.4; SEQ ID NO:51; reverse complement, SEQ ID NO:52). The sequence of rat INHBC mRNA can be found at, for example, GenBank Accession No. GI: 59709462 (NM_022614.2; SEQ ID NO:53; reverse complement, SEQ ID NO:54). The predicted sequence of Macaca mulatta INHBC mRNA can be found at, for example, GenBank Accession No. GI: 1622845603 (XM_001115940.4; SEQ ID NO:55; reverse complement, SEQ ID NO:56).

[0235] Additional examples of INHBC mRNA sequences are readily available through publicly available databases, e.g., GenBank, UniProt, OMIM, and the Macaca genome project web site.

[0236] Further information on INHBC can be found, for example, at www.ncbi.nlm.nih.gov/gene/?term=INHBC.

[0237] The entire contents of each of the foregoing GenBank Accession numbers and the Gene database numbers are incorporated herein by reference as of the date of filing this application.

[0238] The term INHBC, as used herein, also refers to variations of the INHBC gene including variants provided in the SNP database. Numerous sequence variations within the INHBC gene have been identified and may be found at, for example, NCBI dbSNP and UniProt (see, e.g., www.ncbi.nlm.nih.gov/snp/?term=INHBC, the entire contents of which is incorporated herein by reference as of the date of filing this application).

[0239] As used herein, “target sequence” or “target nucleic acid” refers to a contiguous portion of the nucleotide sequence of an mRNA molecule formed during the transcription of a target gene, including mRNA that is a product of RNA processing of a primary transcription product. In one embodiment, the target portion of the sequence will be at least long enough to serve as a substrate for RNAi-directed cleavage at or near that portion of the nucleotide sequence of an mRNA molecule formed during the transcription of a target gene. In one embodiment, the target sequence is within the protein coding region of the target gene. In another embodiment, the target sequence is within the 3′ UTR of the target gene. The target nucleic acid can be a cellular gene (or mRNA transcribed from the gene) whose expression is associated with a particular disorder or disease state.

[0240] The target sequence may be from about 19-36 nucleotides in length, e.g., about 19-30 nucleotides in length. For example, the target sequence can be about 19-30 nucleotides, 19-30, 19-29, 19-28, 19-27, 19-26, 19-25, 19-24, 19-23, 19-22, 19-21, 19-20, 20-30, 20-29, 20-28, 20-27, 20-26, 20-25, 20-24, 20-23, 20-22, 20-21, 21-30, 21-29, 21-28, 21-27, 21-26, 21-25, 21-24, 21-23, or 21-22 nucleotides in length. In certain embodiments, the target sequence is 19-23 nucleotides in length, optionally 21-23 nucleotides in length. Ranges and lengths intermediate to the above recited ranges and lengths are also contemplated to be part of the disclosure.

[0241] As used herein, the term “strand comprising a sequence” refers to an oligonucleotide comprising a chain of nucleotides that is described by the sequence referred to using the standard nucleotide nomenclature.

[0242] “G,” “C,” “A,” “T,” and “U” each generally stand for a nucleotide that contains guanine, cytosine, adenine, thymidine, and uracil as a base, respectively. However, it will be understood that the term “ribonucleotide” or “nucleotide” can also refer to a modified nucleotide, as further detailed below, or a surrogate replacement moiety (see, e.g., Table 1). The skilled person is well aware that guanine, cytosine, adenine, and uracil can be replaced by other moieties without substantially altering the base pairing properties of an oligonucleotide comprising a nucleotide bearing such replacement moiety. For example, without limitation, a nucleotide comprising inosine as its base can base pair with nucleotides containing adenine, cytosine, or uracil. Hence, nucleotides containing uracil, guanine, or adenine can be replaced in the nucleotide sequences of dsRNA featured in the invention by a nucleotide containing, for example, inosine. In another example, adenine and cytosine anywhere in the oligonucleotide can be replaced with guanine and uracil, respectively to form G-U Wobble base pairing with the target mRNA. Sequences containing such replacement moieties are suitable for the compositions and methods featured in the invention.

[0243] The terms “iRNA”, “RNAi agent,” “iRNA agent,”, “RNA interference agent” as used interchangeably herein, refer to an agent that contains RNA as that term is defined herein, and which mediates the targeted cleavage of an RNA transcript via an RNA-induced silencing complex (RISC) pathway. iRNA directs the sequence-specific degradation of mRNA through a process known as RNA interference (RNAi). The iRNA modulates, e.g., inhibits, the expression of a INHBE, ACVR1C, PLIN1, PDE3B, or INHBC gene in a cell, e.g., a liver cell and/or adipocyte, within a subject, such as a mammalian subject.

[0244] In one embodiment, an RNAi agent of the invention includes a single stranded RNA that interacts with a target RNA sequence, e.g., a metabolic disorder-associated target mRNA sequence, to direct the cleavage of the target RNA. Without wishing to be bound by theory it is believed that long double stranded RNA introduced into cells is broken down into siRNA by a Type III endonuclease known as Dicer (Sharp et al. (2001) Genes Dev. 15:485). Dicer, a ribonuclease-III-like enzyme, processes the dsRNA into 19-23 base pair short interfering RNAs with characteristic two base 3′ overhangs (Bernstein, et al., (2001) Nature 409:363). The siRNAs are then incorporated into an RNA-induced silencing complex (RISC) where one or more helicases unwind the siRNA duplex, enabling the complementary antisense strand to guide target recognition (Nykanen, et al., (2001) Cell 107:309). Upon binding to the appropriate target mRNA, one or more endonucleases within the RISC cleave the target to induce silencing (Elbashir, et al., (2001) Genes Dev. 15:188). Thus, in one aspect the invention relates to a single stranded RNA (siRNA) generated within a cell and which promotes the formation of a RISC complex to effect silencing of the target gene, i.e., a metabolic disorder-associated target gene selected from the group consisting of inhibin subunit beta E (INHBE), activin A receptor type 1C (ACVR1C), perilipin-1 (PLIN1), phosphodiesterase 3B (PDE3B), and inhibin subunit beta C (INHBC). Accordingly, the term “siRNA” is also used herein to refer to an iRNA as described above.

[0245] In certain embodiments, the RNAi agent may be a single-stranded siRNA (ssRNAi) that is introduced into a cell or organism to inhibit a target mRNA. Single-stranded RNAi agents bind to the RISC endonuclease, Argonaute 2, which then cleaves the target mRNA. The single-stranded siRNAs are generally 15-30 nucleotides and are chemically modified. The design and testing of single-stranded siRNAs are described in U.S. Pat. No. 8,101,348 and in Lima et al., (2012) Cell 150:883-894, the entire contents of each of which are hereby incorporated herein by reference. Any of the antisense nucleotide sequences described herein may be used as a single-stranded siRNA as described herein or as chemically modified by the methods described in Lima et al., (2012) Cell 150:883-894.

[0246] In certain embodiments, an “iRNA” for use in the compositions, uses, and methods of the invention is a double stranded RNA and is referred to herein as a “double stranded RNA agent,” “double stranded RNA (dsRNA) molecule,” “dsRNA agent,” or “dsRNA”. The term “dsRNA”, refers to a complex of ribonucleic acid molecules, having a duplex structure comprising two anti-parallel and substantially complementary nucleic acid strands, referred to as having “sense” and “antisense” orientations with respect to a target RNA, i.e., a metabolic disorder-associated target gene selected from the group consisting of inhibin subunit beta E (INHBE), activin A receptor type 1C (ACVR1C), perilipin-1 (PLIN1), phosphodiesterase 3B (PDE3B), and inhibin subunit beta C (INHBC). In some embodiments of the invention, a double stranded RNA (dsRNA) triggers the degradation of a target RNA, e.g., an mRNA, through a post-transcriptional gene-silencing mechanism referred to herein as RNA interference or RNAi.

[0247] In general, the majority of nucleotides of each strand of a dsRNA molecule are ribonucleotides, but as described in detail herein, each or both strands can also include one or more non-ribonucleotides, e.g., a deoxyribonucleotide or a modified nucleotide. In addition, as used in this specification, an “iRNA” may include ribonucleotides with chemical modifications; an iRNA may include substantial modifications at multiple nucleotides. As used herein, the term “modified nucleotide” refers to a nucleotide having, independently, a modified sugar moiety, a modified internucleotide linkage, or modified nucleobase, or any combination thereof. Thus, the term modified nucleotide encompasses substitutions, additions or removal of, e.g., a functional group or atom, to internucleoside linkages, sugar moieties, or nucleobases. The modifications suitable for use in the agents of the invention include all types of modifications disclosed herein or known in the art. Any such modifications, as used in a siRNA type molecule, are encompassed by “iRNA” or “RNAi agent” for the purposes of this specification and claims.

[0248] In certain embodiments of the instant disclosure, inclusion of a deoxy-nucleotide if present within an RNAi agent can be considered to constitute a modified nucleotide.

[0249] The duplex region may be of any length that permits specific degradation of a desired target RNA through a RISC pathway, and may range from about 19 to 36 base pairs in length, e.g., about 19-30 base pairs in length, for example, about 9, 10, 11, 12, 13, 14, 15, 16, 17, 18, 19, 20, 21, 22, 23, 24, 25, 26, 27, 28, 29, 30, 31, 32, 33, 34, 35, or 36 base pairs in length, such as about 19-30, 19-29, 19-28, 19-27, 19-26, 19-25, 19-24, 19-23, 19-22, 19-21, 19-20, 20-30, 20-29, 20-28, 20-27, 20-26, 20-25, 20-24, 20-23, 20-22, 20-21, 21-30, 21-29, 21-28, 21-27, 21-26, 21-25, 21-24, 21-23, or 21-22 base pairs in length. In certain embodiments, the duplex region is 19-21 base pairs in length, e.g., 21 base pairs in length. Ranges and lengths intermediate to the above recited ranges and lengths are also contemplated to be part of the disclosure.

[0250] The two strands forming the duplex structure may be different portions of one larger RNA molecule, or they may be separate RNA molecules. Where the two strands are part of one larger molecule, and therefore are connected by an uninterrupted chain of nucleotides between the 3′-end of one strand and the 5′-end of the respective other strand forming the duplex structure, the connecting RNA chain is referred to as a “hairpin loop.” A hairpin loop can comprise at least one unpaired nucleotide. In some embodiments, the hairpin loop can comprise at least 2, 3, 4, 5, 6, 7, 8, 9, 10, 20, 23 or more unpaired nucleotides. In some embodiments, the hairpin loop can be 10 or fewer nucleotides. In some embodiments, the hairpin loop can be 8 or fewer unpaired nucleotides. In some embodiments, the hairpin loop can be 4-10 unpaired nucleotides. In some embodiments, the hairpin loop can be 4-8 nucleotides.

[0251] In certain embodiment, the two strands of double-stranded oligomeric compound can be linked together. The two strands can be linked to each other at both ends, or at one end only. By linking at one end is meant that 5′-end of first strand is linked to the 3′-end of the second strand or 3′-end of first strand is linked to 5′-end of the second strand. When the two strands are linked to each other at both ends, 5′-end of first strand is linked to 3′-end of second strand and 3′-end of first strand is linked to 5′-end of second strand. The two strands can be linked together by an oligonucleotide linker including, but not limited to, (N)n; wherein N is independently a modified or unmodified nucleotide and n is 3-23. In some embodiments, n is 3-10, e.g., 3, 4, 5, 6, 7, 8, 9, or 10. In some embodiments, the oligonucleotide linker is selected from the group consisting of GNRA, (G)4, (U)4, and (dT)4, wherein N is a modified or unmodified nucleotide and R is a modified or unmodified purine nucleotide. Some of the nucleotides in the linker can be involved in base-pair interactions with other nucleotides in the linker. The two strands can also be linked together by a non-nucleoside linker, e.g. a linker described herein. It will be appreciated by one of skill in the art that any oligonucleotide chemical modifications or variations describe herein can be used in the oligonucleotide linker.

[0252] Hairpin and dumbbell type oligomeric compounds will have a duplex region equal to or at least 14, 15, 15, 16, 17, 18, 19, 29, 21, 22, 23, 24, or 25 nucleotide pairs. The duplex region can be equal to or less than 200, 100, or 50, in length. In some embodiments, ranges for the duplex region are 15-30, 17 to 23, 19 to 23, and 19 to 21 nucleotides pairs in length.

[0253] The hairpin oligomeric compounds can have a single strand overhang or terminal unpaired region, in some embodiments at the 3′, and in some embodiments on the antisense side of the hairpin. In some embodiments, the overhangs are 1-4, more generally 2-3 nucleotides in length. The hairpin oligomeric compounds that can induce RNA interference are also referred to as “shRNA” herein.

[0254] Where the two substantially complementary strands of a dsRNA are comprised by separate RNA molecules, those molecules need not be, but can be covalently connected. Where the two strands are connected covalently by means other than an uninterrupted chain of nucleotides between the 3′-end of one strand and the 5′-end of the respective other strand forming the duplex structure, the connecting structure is referred to as a “linker.” The RNA strands may have the same or a different number of nucleotides. The maximum number of base pairs is the number of nucleotides in the shortest strand of the dsRNA minus any overhangs that are present in the duplex. In addition to the duplex structure, an RNAi may comprise one or more nucleotide overhangs. In one embodiment of the RNAi agent, at least one strand comprises a 3′ overhang of at least 1 nucleotide. In another embodiment, at least one strand comprises a 3′ overhang of at least 2 nucleotides, e.g., 2, 3, 4, 5, 6, 7, 9, 10, 11, 12, 13, 14, or 15 nucleotides. In other embodiments, at least one strand of the RNAi agent comprises a 5′ overhang of at least 1 nucleotide. In certain embodiments, at least one strand comprises a 5′ overhang of at least 2 nucleotides, e.g., 2, 3, 4, 5, 6, 7, 9, 10, 11, 12, 13, 14, or 15 nucleotides. In still other embodiments, both the 3′ and the 5′ end of one strand of the RNAi agent comprise an overhang of at least 1 nucleotide.

[0255] In certain embodiments, an iRNA agent of the invention is a dsRNA, each strand of which comprises 19-23 nucleotides, that interacts with a target RNA sequence, e.g., a metabolic disorder-associated target gene sequence, to direct cleavage of the target RNA.

[0256] In some embodiments, an iRNA of the invention is a dsRNA of 24-30 nucleotides that interacts with a target RNA sequence, e.g., a metabolic disorder-associated target gene mRNA sequence, to direct the cleavage of the target RNA.

[0257] As used herein, the term “nucleotide overhang” refers to at least one unpaired nucleotide that protrudes from the duplex structure of a double stranded iRNA. For example, when a 3′-end of one strand of a dsRNA extends beyond the 5′-end of the other strand, or vice versa, there is a nucleotide overhang. A dsRNA can comprise an overhang of at least one nucleotide; alternatively the overhang can comprise at least two nucleotides, at least three nucleotides, at least four nucleotides, at least five nucleotides or more. A nucleotide overhang can comprise or consist of a nucleotide/nucleoside analog, including a deoxynucleotide/nucleoside. The overhang(s) can be on the sense strand, the antisense strand, or any combination thereof. Furthermore, the nucleotide(s) of an overhang can be present on the 5′-end, 3′-end, or both ends of either an antisense or sense strand of a dsRNA.

[0258] In one embodiment, the antisense strand of a dsRNA has a 1-10 nucleotide, e.g., a 1, 2, 3, 4, 5, 6, 7, 8, 9, or 10 nucleotide, overhang at the 3′-end or the 5′-end. In one embodiment, the sense strand of a dsRNA has a 1-10 nucleotide, e.g., a 1, 2, 3, 4, 5, 6, 7, 8, 9, or 10 nucleotide, overhang at the 3′-end or the 5′-end. In another embodiment, one or more of the nucleotides in the overhang is replaced with a nucleoside thiophosphate.

[0259] In certain embodiments, the antisense strand of a dsRNA has a 1-10 nucleotide, e.g., 0-3, 1-3, 2-4, 2-5, 4-10, 5-10, e.g., a 1, 2, 3, 4, 5, 6, 7, 8, 9, or 10 nucleotide, overhang at the 3′-end or the 5′-end. In one embodiment, the sense strand of a dsRNA has a 1-10 nucleotide, e.g., a 1, 2, 3, 4, 5, 6, 7, 8, 9, or 10 nucleotide, overhang at the 3′-end or the 5′-end. In another embodiment, one or more of the nucleotides in the overhang is replaced with a nucleoside thiophosphate.

[0260] In certain embodiments, the antisense strand of a dsRNA has a 1-10 nucleotides, e.g., a 1, 2, 3, 4, 5, 6, 7, 8, 9, or 10 nucleotide, overhang at the 3′-end or the 5′-end. In certain embodiments, the overhang on the sense strand or the antisense strand, or both, can include extended lengths longer than 10 nucleotides, e.g., 1-30 nucleotides, 2-30 nucleotides, 10-30 nucleotides, 10-25 nucleotides, 10-20 nucleotides, or 10-15 nucleotides in length. In certain embodiments, an extended overhang is on the sense strand of the duplex. In certain embodiments, an extended overhang is present on the 3′ end of the sense strand of the duplex. In certain embodiments, an extended overhang is present on the 5′ end of the sense strand of the duplex. In certain embodiments, an extended overhang is on the antisense strand of the duplex. In certain embodiments, an extended overhang is present on the 3′end of the antisense strand of the duplex. In certain embodiments, an extended overhang is present on the 5′end of the antisense strand of the duplex. In certain embodiments, one or more of the nucleotides in the extended overhang is replaced with a nucleoside thiophosphate. In certain embodiments, the overhang includes a self-complementary portion such that the overhang is capable of forming a hairpin structure that is stable under physiological conditions.

[0261] “Blunt” or “blunt end” means that there are no unpaired nucleotides at that end of the double stranded RNA agent, i.e., no nucleotide overhang. A “blunt ended” double stranded RNA agent is double stranded over its entire length, i.e., no nucleotide overhang at either end of the molecule. The RNAi agents of the invention include RNAi agents with no nucleotide overhang at one end (i.e., agents with one overhang and one blunt end) or with no nucleotide overhangs at either end. Most often such a molecule will be double-stranded over its entire length.

[0262] The term “antisense strand” or “guide strand” refers to the strand of an iRNA, e.g., a dsRNA, which includes a region that is substantially complementary to a target sequence, e.g., a metabolic disorder-associated target gene mRNA.

[0263] As used herein, the term “region of complementarity” refers to the region on the antisense strand that is substantially complementary to a sequence, for example a target sequence, e.g., an INHBE nucleotide sequence, as defined herein. Where the region of complementarity is not fully complementary to the target sequence, the mismatches can be in the internal or terminal regions of the molecule. Generally, the most tolerated mismatches are in the terminal regions, e.g., within 5, 4, or 3 nucleotides of the 5′- or 3′-end of the iRNA. In some embodiments, a double stranded RNA agent of the invention includes a nucleotide mismatch in the antisense strand. In some embodiments, the antisense strand of the double stranded RNA agent of the invention includes no more than 4 mismatches with the target mRNA, e.g., the antisense strand includes 4, 3, 2, 1, or 0 mismatches with the target mRNA. In some embodiments, the antisense strand double stranded RNA agent of the invention includes no more than 4 mismatches with the sense strand, e.g., the antisense strand includes 4, 3, 2, 1, or 0 mismatches with the sense strand. In some embodiments, a double stranded RNA agent of the invention includes a nucleotide mismatch in the sense strand. In some embodiments, the sense strand of the double stranded RNA agent of the invention includes no more than 4 mismatches with the antisense strand, e.g., the sense strand includes 4, 3, 2, 1, or 0 mismatches with the antisense strand. In some embodiments, the nucleotide mismatch is, for example, within 5, 4, 3 nucleotides from the 3′-end of the iRNA. In another embodiment, the nucleotide mismatch is, for example, in the 3′-terminal nucleotide of the iRNA agent. In some embodiments, the mismatch(s) is not in the seed region.

[0264] Thus, an RNAi agent as described herein can contain one or more mismatches to the target sequence. In one embodiment, an RNAi agent as described herein contains no more than 3 mismatches (i.e., 3, 2, 1, or 0 mismatches). In one embodiment, an RNAi agent as described herein contains no more than 2 mismatches. In one embodiment, an RNAi agent as described herein contains no more than 1 mismatch. In one embodiment, an RNAi agent as described herein contains 0 mismatches. In certain embodiments, if the antisense strand of the RNAi agent contains mismatches to the target sequence, the mismatch can optionally be restricted to be within the last 5 nucleotides from either the 5′- or 3′-end of the region of complementarity. For example, in such embodiments, for a 23 nucleotide RNAi agent, the strand which is complementary to a region of a metabolic disorder-associated target gene, generally does not contain any mismatch within the central 13 nucleotides. The methods described herein or methods known in the art can be used to determine whether an RNAi agent containing a mismatch to a target sequence is effective in inhibiting the expression of a target gene. Consideration of the efficacy of RNAi agents with mismatches in inhibiting expression of an INHBE, ACVR1C, PLIN1, PDE3B, or INHBC target gene is important, especially if the particular region of complementarity in the target gene is known to have polymorphic sequence variation within the population.

[0265] The term “sense strand” or “passenger strand” as used herein, refers to the strand of an iRNA that includes a region that is substantially complementary to a region of the antisense strand as that term is defined herein.

[0266] As used herein, “substantially all of the nucleotides are modified” are largely but not wholly modified and can include not more than 5, 4, 3, 2, or 1 unmodified nucleotides.

[0267] As used herein, the term “cleavage region” refers to a region that is located immediately adjacent to the cleavage site. The cleavage site is the site on the target at which cleavage occurs. In some embodiments, the cleavage region comprises three bases on either end of, and immediately adjacent to, the cleavage site. In some embodiments, the cleavage region comprises two bases on either end of, and immediately adjacent to, the cleavage site. In some embodiments, the cleavage site specifically occurs at the site bound by nucleotides 10 and 11 of the antisense strand, and the cleavage region comprises nucleotides 11, 12 and 13.

[0268] As used herein, and unless otherwise indicated, the term “complementary,” when used to describe a first nucleotide sequence in relation to a second nucleotide sequence, refers to the ability of an oligonucleotide or polynucleotide comprising the first nucleotide sequence to hybridize and form a duplex structure under certain conditions with an oligonucleotide or polynucleotide comprising the second nucleotide sequence, as will be understood by the skilled person. Such conditions can, for example, be stringent conditions, where stringent conditions can include: 400 mM NaCl, 40 mM PIPES pH 6.4, 1 mM EDTA, 50° C. or 70° C. for 12-16 hours followed by washing (see, e.g., “Molecular Cloning: A Laboratory Manual, Sambrook, et al. (1989) Cold Spring Harbor Laboratory Press). Other conditions, such as physiologically relevant conditions as can be encountered inside an organism, can apply. The skilled person will be able to determine the set of conditions most appropriate for a test of complementarity of two sequences in accordance with the ultimate application of the hybridized nucleotides.

[0269] Complementary sequences within an iRNA, e.g., within a dsRNA as described herein, include base-pairing of the oligonucleotide or polynucleotide comprising a first nucleotide sequence to an oligonucleotide or polynucleotide comprising a second nucleotide sequence over the entire length of one or both nucleotide sequences. Such sequences can be referred to as “fully complementary” with respect to each other herein. However, where a first sequence is referred to as “substantially complementary” with respect to a second sequence herein, the two sequences can be fully complementary, or they can form one or more, but generally not more than 5, 4, 3, or 2 mismatched base pairs upon hybridization for a duplex up to 30 base pairs, while retaining the ability to hybridize under the conditions most relevant to their ultimate application, e.g., inhibition of gene expression, in vitro or in vivo. However, where two oligonucleotides are designed to form, upon hybridization, one or more single stranded overhangs, such overhangs shall not be regarded as mismatches with regard to the determination of complementarity. For example, a dsRNA comprising one oligonucleotide 21 nucleotides in length and another oligonucleotide 23 nucleotides in length, wherein the longer oligonucleotide comprises a sequence of 21 nucleotides that is fully complementary to the shorter oligonucleotide, can yet be referred to as “fully complementary” for the purposes described herein.

[0270] “Complementary” sequences, as used herein, can also include, or be formed entirely from, non-Watson-Crick base pairs or base pairs formed from non-natural and modified nucleotides, in so far as the above requirements with respect to their ability to hybridize are fulfilled. Such non-Watson-Crick base pairs include, but are not limited to, G:U Wobble or Hoogsteen base pairing.

[0271] The terms “complementary,” “fully complementary” and “substantially complementary” herein can be used with respect to the base matching between the sense strand and the antisense strand of a dsRNA, or between two oligonucleotides or polynucleotides, such as the antisense strand of a double stranded RNA agent and a target sequence, as will be understood from the context of their use.

[0272] As used herein, a polynucleotide that is “substantially complementary to at least part of” a messenger RNA (mRNA) refers to a polynucleotide that is substantially complementary to a contiguous portion of the mRNA of interest (e.g., an mRNA encoding a metabolic disorder-associated target gene). For example, a polynucleotide is complementary to at least a part of a metabolic disorder-associated target gene mRNA if the sequence is substantially complementary to a non-interrupted portion of an mRNA encoding a metabolic disorder-associated target gene.

[0273] Accordingly, in some embodiments, the antisense strand polynucleotides disclosed herein are fully complementary to the target gene sequence.

[0274] In some embodiments, the antisense strand polynucleotides disclosed herein are substantially complementary to the target gene sequence and comprise a contiguous nucleotide sequence which is at least about 80% complementary over its entire length to the equivalent region of the nucleotide sequence of SEQ ID NOs: 1, 3, 5, or 7 for INHBE, or a fragment of SEQ ID NOs: 1, 3, 5, or 7, such as about 85%, 86%, 87%, 88%, 89%, 90%, 91%, 92%, 93%, 94%, 95%, 96%, 97%, 98%, or about 99% complementary.

[0275] In some embodiments, the antisense polynucleotides disclosed herein are substantially complementary to a fragment of a target INHBE sequence and comprise a contiguous nucleotide sequence which is at least 80% complementary over its entire length to a fragment of SEQ ID NO: 1 selected from the group of nucleotides 400-422, 410-432, 518-540, 519-541, 640-662, 1430-1452, 1863-1885, or 1864-1886 of SEQ ID NO: 1, such as about 85%, about 90%, about 91%, about 92%, about 93%, about 94%, about 95%, about 96%, about 97%, about 98%, or about 99% complementary.

[0276] In other embodiments, the antisense polynucleotides disclosed herein are substantially complementary to the target INHBE sequence and comprise a contiguous nucleotide sequence which is at least about 80% complementary over its entire length to any one of the sense strand nucleotide sequences in any one of Tables 2-3, or a fragment of any one of the sense strand nucleotide sequences in any one of Tables 2-3, such as about 85%, 86%, 87%, 88%, 89%, 90%, 91%, 92%, 93%, 94%, 95%, 96%, 97%, 98%, or about 99% complementary.

[0277] In one embodiment, an RNAi agent of the disclosure includes a sense strand that is substantially complementary to an antisense polynucleotide which, in turn, is the same as a target INHBE sequence, and wherein the sense strand polynucleotide comprises a contiguous nucleotide sequence which is at least about 80% complementary over its entire length to the equivalent region of the nucleotide sequence of SEQ ID NOs: 2, 4, 6, or 8, or a fragment of any one of SEQ ID NOs: 2, 4, 6, or 8, such as about 86%, 87%, 88%, 89%, 90%, 91%, 92%, 93%, 94%, 95%, 96%, 97%, 98%, or about 99% complementary.

[0278] In some embodiments, an iRNA of the invention includes a sense strand that is substantially complementary to an antisense polynucleotide which, in turn, is complementary to a target INHBE sequence, and wherein the sense strand polynucleotide comprises a contiguous nucleotide sequence which is at least about 80% complementary over its entire length to any one of the antisense strand nucleotide sequences in any one of any one of Tables 2-3, or a fragment of any one of the antisense strand nucleotide sequences in any one of Tables 2-3, such as about 86%, 87%, 88%, 89%, 90%, 91%, 92%, 93%, 94%, 95%, 96%, 97%, 98%, or about 99% complementary.

[0279] In some embodiments, the sense and antisense strands are selected from any one of duplexes AD-1706583, AD-1711744, AD-1706593, AD-1708473, AD-1706662, AD-1706761, AD-1707306, AD-1707639, and AD-1707640.

[0280] In some embodiments, the sense and antisense strands are selected from duplex AD-1706583.

[0281] In some embodiments, the sense and antisense strands are selected from duplex AD-1711744.

[0282] In some embodiments, the sense and antisense strands are selected from duplex AD-1706593.

[0283] In some embodiments, the sense and antisense strands are selected from duplex AD-1708473.

[0284] In some embodiments, the sense and antisense strands are selected from duplex AD-1706662.

[0285] In some embodiments, the sense and antisense strands are selected from duplex AD-1706761.

[0286] In some embodiments, the sense and antisense strands are selected from duplex AD-1707306.

[0287] In some embodiments, the sense and antisense strands are selected from duplex AD-1707639.

[0288] In some embodiments, the sense and antisense strands are selected from duplex AD-1707640.

[0289] In other embodiments, the antisense strand polynucleotides disclosed herein are substantially complementary to the target gene sequence and comprise a contiguous nucleotide sequence which is at least about 80% complementary over its entire length to the equivalent region of the nucleotide sequence of SEQ ID NOs: 9, 11, 13, 15, 17, 19, 21, or 23 for ACVR1C, or a fragment of SEQ ID NOs: 9, 11, 13, 15, 17, 19, 21, or 23, such as about 85%, 86%, 87%, 88%, 89%, 90%, 91%, 92%, 93%, 94%, 95%, 96%, 97%, 98%, or about 99% complementary.

[0290] In other embodiments, the antisense polynucleotides disclosed herein are substantially complementary to the target ACVR1C sequence and comprise a contiguous nucleotide sequence which is at least about 80% complementary over its entire length to any one of the sense strand nucleotide sequences in any one of Tables 4-7, or a fragment of any one of the sense strand nucleotide sequences in any one of Tables 4-7, such as about 85%, 86%, 87%, 88%, 89%, 90%, 91%, 92%, 93%, 94%, 95%, 96%, 97%, 98%, or about 99% complementary.

[0291] In one embodiment, an RNAi agent of the disclosure includes a sense strand that is substantially complementary to an antisense polynucleotide which, in turn, is the same as a target ACVR1C sequence, and wherein the sense strand polynucleotide comprises a contiguous nucleotide sequence which is at least about 80% complementary over its entire length to the equivalent region of the nucleotide sequence of SEQ ID NOs: 10, 12, 14, 16, 18, 20, 22, or 24, or a fragment of any one of SEQ ID NOs: 10, 12, 14, 16, 18, 20, 22, or 24, such as about 86%, 87%, 88%, 89%, 90%, 91%, 92%, 93%, 94%, 95%, 96%, 97%, 98%, or about 99% complementary.

[0292] In some embodiments, an iRNA of the invention includes a sense strand that is substantially complementary to an antisense polynucleotide which, in turn, is complementary to a target ACVR1C sequence, and wherein the sense strand polynucleotide comprises a contiguous nucleotide sequence which is at least about 80% complementary over its entire length to any one of the antisense strand nucleotide sequences in any one of any one of Tables 4-7, or a fragment of any one of the antisense strand nucleotide sequences in any one of Tables 4-7, such as about 86%, 87%, 88%, 89%, 90%, 91%, 92%, 93%, 94%, 95%, 96%, 97%, 98%, or about 99% complementary.

[0293] In other embodiments, the antisense strand polynucleotides disclosed herein are substantially complementary to the target gene sequence and comprise a contiguous nucleotide sequence which is at least about 80% complementary over its entire length to the equivalent region of the nucleotide sequence of SEQ ID NOs:25, 27, 29, 31, 33, or 35 for PLIN1, or a fragment of SEQ ID NOs: 25, 27, 29, 31, 33, or 35, such as about 85%, 86%, 87%, 88%, 89%, 90%, 91%, 92%, 93%, 94%, 95%, 96%, 97%, 98%, or about 99% complementary.

[0294] In other embodiments, the antisense polynucleotides disclosed herein are substantially complementary to the target PLIN1 sequence and comprise a contiguous nucleotide sequence which is at least about 80% complementary over its entire length to any one of the sense strand nucleotide sequences in any one of Tables 8-11, or a fragment of any one of the sense strand nucleotide sequences in any one of Tables 8-11, such as about 85%, 86%, 87%, 88%, 89%, 90%, 91%, 92%, 93%, 94%, 95%, 96%, 97%, 98%, or about 99% complementary.

[0295] In one embodiment, an RNAi agent of the disclosure includes a sense strand that is substantially complementary to an antisense polynucleotide which, in turn, is the same as a target PLIN1 sequence, and wherein the sense strand polynucleotide comprises a contiguous nucleotide sequence which is at least about 80% complementary over its entire length to the equivalent region of the nucleotide sequence of SEQ ID NOs: 26, 28, 30, 32, 34, or 36, or a fragment of any one of SEQ ID NOs: 26, 28, 30, 32, 34, or 36, such as about 86%, 87%, 88%, 89%, 90%, 91%, 92%, 93%, 94%, 95%, 96%, 97%, 98%, or about 99% complementary.

[0296] In some embodiments, an iRNA of the invention includes a sense strand that is substantially complementary to an antisense polynucleotide which, in turn, is complementary to a target PLIN1 sequence, and wherein the sense strand polynucleotide comprises a contiguous nucleotide sequence which is at least about 80% complementary over its entire length to any one of the antisense strand nucleotide sequences in any one of any one of Tables 8-11, or a fragment of any one of the antisense strand nucleotide sequences in any one of Tables 8-11, such as about 86%, 87%, 88%, 89%, 90%, 91%, 92%, 93%, 94%, 95%, 96%, 97%, 98%, or about 99% complementary.

[0297] In other embodiments, the antisense strand polynucleotides disclosed herein are substantially complementary to the target gene sequence and comprise a contiguous nucleotide sequence which is at least about 80% complementary over its entire length to the equivalent region of the nucleotide sequence of SEQ ID NOs:37, 39, 41, 43, 45, or 47 for PDE3B, or a fragment of SEQ ID NOs: 37, 39, 41, 43, 45, or 47, such as about 85%, 86%, 87%, 88%, 89%, 90%, 91%, 92%, 93%, 94%, 95%, 96%, 97%, 98%, or about 99% complementary.

[0298] In other embodiments, the antisense polynucleotides disclosed herein are substantially complementary to the target PDE3B sequence and comprise a contiguous nucleotide sequence which is at least about 80% complementary over its entire length to any one of the sense strand nucleotide sequences in any one of Tables 12-15, or a fragment of any one of the sense strand nucleotide sequences in any one of Tables 12-15, such as about 85%, 86%, 87%, 88%, 89%, 90%, 91%, 92%, 93%, 94%, 95%, 96%, 97%, 98%, or about 99% complementary.

[0299] In one embodiment, an RNAi agent of the disclosure includes a sense strand that is substantially complementary to an antisense polynucleotide which, in turn, is the same as a target PDE3B sequence, and wherein the sense strand polynucleotide comprises a contiguous nucleotide sequence which is at least about 80% complementary over its entire length to the equivalent region of the nucleotide sequence of SEQ ID NOs: 38, 40, 42, 44, 46, or 48, or a fragment of any one of SEQ ID NOs: 38, 40, 42, 44, 46, or 48, such as about 86%, 87%, 88%, 89%, 90%, 91%, 92%, 93%, 94%, 95%, 96%, 97%, 98%, or about 99% complementary.

[0300] In some embodiments, an iRNA of the invention includes a sense strand that is substantially complementary to an antisense polynucleotide which, in turn, is complementary to a target PDE3B sequence, and wherein the sense strand polynucleotide comprises a contiguous nucleotide sequence which is at least about 80% complementary over its entire length to any one of the antisense strand nucleotide sequences in any one of any one of Tables 12-15, or a fragment of any one of the antisense strand nucleotide sequences in any one of Tables 12-15, such as about 86%, 87%, 88%, 89%, 90%, 91%, 92%, 93%, 94%, 95%, 96%, 97%, 98%, or about 99% complementary.

[0301] In other embodiments, the antisense strand polynucleotides disclosed herein are substantially complementary to the target gene sequence and comprise a contiguous nucleotide sequence which is at least about 80% complementary over its entire length to the equivalent region of the nucleotide sequence of SEQ ID NOs:49, 51, 53, or 55 for INHBC, or a fragment of SEQ ID NOs: 49, 51, 53, or 55, such as about 85%, 86%, 87%, 88%, 89%, 90%, 91%, 92%, 93%, 94%, 95%, 96%, 97%, 98%, or about 99% complementary.

[0302] In other embodiments, the antisense polynucleotides disclosed herein are substantially complementary to the target INHBC sequence and comprise a contiguous nucleotide sequence which is at least about 80% complementary over its entire length to any one of the sense strand nucleotide sequences in any one of Tables 16-17, or a fragment of any one of the sense strand nucleotide sequences in any one of Tables 16-17, such as about 85%, 86%, 87%, 88%, 89%, 90%, 91%, 92%, 93%, 94%, 95%, 96%, 97%, 98%, or about 99% complementary.

[0303] In one embodiment, an RNAi agent of the disclosure includes a sense strand that is substantially complementary to an antisense polynucleotide which, in turn, is the same as a target INHBC sequence, and wherein the sense strand polynucleotide comprises a contiguous nucleotide sequence which is at least about 80% complementary over its entire length to the equivalent region of the nucleotide sequence of SEQ ID NOs: 50, 52, 54, or 56, or a fragment of any one of SEQ ID NOs: 50, 52, 54, or 56, such as about 86%, 87%, 88%, 89%, 90%, 91%, 92%, 93%, 94%, 95%, 96%, 97%, 98%, or about 99% complementary.

[0304] In some embodiments, an iRNA of the invention includes a sense strand that is substantially complementary to an antisense polynucleotide which, in turn, is complementary to a target INHBC sequence, and wherein the sense strand polynucleotide comprises a contiguous nucleotide sequence which is at least about 80% complementary over its entire length to any one of the antisense strand nucleotide sequences in any one of any one of Tables 16-17, or a fragment of any one of the antisense strand nucleotide sequences in any one of Tables 16-17, such as about 86%, 87%, 88%, 89%, 90%, 91%, 92%, 93%, 94%, 95%, 96%, 97%, 98%, or about 99% complementary.

[0305] In some embodiments, the double-stranded region of a double-stranded iRNA agent is equal to or at least, 10, 11, 12, 13, 14, 15, 16, 17, 18, 19, 20, 21, 22, 23, 23, 24, 25, 26, 27, 28, 29, 30 or more nucleotide pairs in length.

[0306] In some embodiments, the antisense strand of a double-stranded iRNA agent is equal to or at least 14, 15, 16, 17, 18, 19, 20, 21, 22, 23, 23, 24, 25, 26, 27, 28, 29, or 30 nucleotides in length.

[0307] In some embodiments, the sense strand of a double-stranded iRNA agent is equal to or at least 10, 11, 12, 13, 14, 15, 16, 17, 18, 19, 20, 21, 22, 23, 23, 24, 25, 26, 27, 28, 29, or 30 nucleotides in length.

[0308] In one embodiment, the sense and antisense strands of the double-stranded iRNA agent are each independently 15 to 30 nucleotides in length.

[0309] In one embodiment, the sense and antisense strands of the double-stranded iRNA agent are each independently 19 to 25 nucleotides in length.

[0310] In one embodiment, the sense and antisense strands of the double-stranded iRNA agent are each independently 21 to 23 nucleotides in length.

[0311] In one embodiment, the sense strand of the iRNA agent is 21-nucleotides in length, and the antisense strand is 23-nucleotides in length, wherein the strands form a double-stranded region of 21 consecutive base pairs having a 2-nucleotide long single stranded overhangs at the 3′-end.

[0312] In general, an “iRNA” includes ribonucleotides with chemical modifications. Such modifications may include all types of modifications disclosed herein or known in the art. Any such modifications, as used in a dsRNA molecule, are encompassed by “iRNA” for the purposes of this specification and claims.

[0313] In certain embodiments of the instant disclosure, inclusion of a deoxy-nucleotide if present within an RNAi agent can be considered to constitute a modified nucleotide.

[0314] In an aspect of the invention, an agent for use in the methods and compositions of the invention is a single-stranded antisense oligonucleotide molecule that inhibits a target mRNA via an antisense inhibition mechanism. The single-stranded antisense oligonucleotide molecule is complementary to a sequence within the target mRNA. The single-stranded antisense oligonucleotides can inhibit translation in a stoichiometric manner by base pairing to the mRNA and physically obstructing the translation machinery, see Dias, N. et al., (2002) Mol Cancer Ther 1:347-355. The single-stranded antisense oligonucleotide molecule may be about 14 to about 30 nucleotides in length and have a sequence that is complementary to a target sequence. For example, the single-stranded antisense oligonucleotide molecule may comprise a sequence that is at least about 14, 15, 16, 17, 18, 19, 20, or more contiguous nucleotides from any one of the antisense sequences described herein.

[0315] The phrase “contacting a cell with an iRNA,” such as a dsRNA, as used herein, includes contacting a cell by any possible means. Contacting a cell with an iRNA includes contacting a cell in vitro with the iRNA or contacting a cell in vivo with the iRNA. The contacting may be done directly or indirectly. Thus, for example, the iRNA may be put into physical contact with the cell by the individual performing the method, or alternatively, the iRNA may be put into a situation that will permit or cause it to subsequently come into contact with the cell.

[0316] Contacting a cell in vitro may be done, for example, by incubating the cell with the iRNA. Contacting a cell in vivo may be done, for example, by injecting the iRNA into or near the tissue where the cell is located, or by injecting the iRNA into another area, e.g., the bloodstream or the subcutaneous space, such that the agent will subsequently reach the tissue where the cell to be contacted is located. For example, the iRNA may contain or be coupled to a targeting ligand, e.g., GalNAc, that directs the iRNA to a site of interest, e.g., the liver. In other embodiments, the RNAi agent may contain or be coupled to one or more C22 hydrocarbon chains and one or more GalNAc derivatives. In other embodiments, the RNAi agent contains or is coupled to one or more C22 hydrocarbon chains and does not contain or is not coupled to one or more GalNAc derivatives. Combinations of in vitro and in vivo methods of contacting are also possible. For example, a cell may also be contacted in vitro with an RNAi agent and subsequently transplanted into a subject.

[0317] In certain embodiments, contacting a cell with an iRNA includes “introducing” or “delivering the iRNA into the cell” by facilitating or effecting uptake or absorption into the cell. Absorption or uptake of an iRNA can occur through unaided diffusion or active cellular processes, or by auxiliary agents or devices. Introducing an iRNA into a cell may be in vitro or in vivo. For example, for in vivo introduction, iRNA can be injected into a tissue site or administered systemically. In vitro introduction into a cell includes methods known in the art such as electroporation and lipofection. Further approaches are described herein below or are known in the art.

[0318] The term “lipid nanoparticle” or “LNP” is a vesicle comprising a lipid layer encapsulating a pharmaceutically active molecule, such as a nucleic acid molecule, e.g., an iRNA or a plasmid from which an iRNA is transcribed. LNPs are described in, for example, U.S. Pat. Nos. 6,858,225, 6,815,432, 8,158,601, and 8,058,069, the entire contents of which are hereby incorporated herein by reference.

[0319] As used herein, a “subject” is an animal, such as a mammal, including a primate (such as a human, a non-human primate, e.g., a monkey, and a chimpanzee), a non-primate (such as a cow, a pig, a horse, a goat, a rabbit, a sheep, a hamster, a guinea pig, a cat, a dog, a rat, or a mouse), or a bird that expresses the target gene, either endogenously or heterologously. In an embodiment, the subject is a human, such as a human being treated or assessed for a disease or disorder that would benefit from reduction in metabolic disorder-associated target gene expression; a human at risk for a disease or disorder that would benefit from reduction in metabolic disorder-associated target gene expression; a human having a disease or disorder that would benefit from reduction in metabolic disorder-associated target gene expression; or human being treated for a disease or disorder that would benefit from reduction in metabolic disorder-associated target gene expression as described herein. In some embodiments, the subject is a female human. In other embodiments, the subject is a male human. In one embodiment, the subject is an adult subject. In another embodiment, the subject is a pediatric subject.

[0320] As used herein, the terms “treating” or “treatment” refer to a beneficial or desired result, such as reducing at least one sign or symptom of a metabolic disorder in a subject. Treatment also includes a reduction of one or more sign or symptoms associated with unwanted metabolic disorder-associated target gene expression; diminishing the extent of unwanted metabolic disorder-associated target gene activation or stabilization; amelioration or palliation of unwanted metabolic disorder-associated target gene activation or stabilization. “Treatment” can also mean prolonging survival as compared to expected survival in the absence of treatment.

[0321] The term “lower” in the context of the level a metabolic disorder-associated target gene in a subject or a disease marker or symptom refers to a statistically significant decrease in such level. The decrease can be, for example, at least 10%, 15%, 20%, 25%, 30%, %, 40%, 45%, 50%, 55%, 60%, 65%, 70%, 75%, 80%, 85%, 90%, 95%, or more. In certain embodiments, a decrease is at least 20%. In certain embodiments, the decrease is at least 50% in a disease marker, e.g., protein or gene expression level. “Lower” in the context of the level of a metabolic disorder-associated target gene in a subject is a decrease to a level accepted as within the range of normal for an individual without such disorder. In certain embodiments, “lower” is the decrease in the difference between the level of a marker or symptom for a subject suffering from a disease and a level accepted within the range of normal for an individual. The term “lower” can also be used in association with normalizing a symptom of a disease or condition, i.e. decreasing the difference between a level in a subject suffering from a metabolic disorder towards or to a level in a normal subject not suffering from an metabolic disorder. As used herein, if a disease is associated with an elevated value for a symptom, “normal” is considered to be the upper limit of normal. If a disease is associated with a decreased value for a symptom, “normal” is considered to be the lower limit of normal.

[0322] As used herein, “prevention” or “preventing,” when used in reference to a disease, disorder or condition thereof, may be treated or ameliorated by a reduction in expression of a metabolic disorder-associated target gene, refers to a reduction in the likelihood that a subject will develop a symptom associated with such a disease, disorder, or condition, e.g., a symptom of a metabolic disorder, e.g., diabetes. The failure to develop a disease, disorder or condition, or the reduction in the development of a symptom associated with such a disease, disorder or condition (e.g., by at least about 10% on a clinically accepted scale for that disease or disorder), or the exhibition of delayed symptoms delayed (e.g., by days, weeks, months or years) is considered effective prevention.

[0323] The treatment and prophylactic methods of the invention are useful for treating any disease or disorder that is caused by, or associated with INHBE, ACVR1C, PLIN1, PDE3B, and/or INHBC gene expression or INHBE, ACVR1C, PLIN1, PDE3B, and/or INHBC protein production and includes a disease, disorder or condition that would benefit from a decrease in INHBE, ACVR1C, PLIN1, PDE3B, and/or INHBC gene expression, replication, or protein activity such as a metabolic disorder. In some embodiments, the metabolic disorder is metabolic syndrome.

[0324] A “metabolic disorder” is a disorder that disrupts normal metabolism, the process of converting food to energy on a cellular level. Metabolic diseases affect the ability of the cell to perform critical biochemical reactions that involve the processing or transport of proteins (amino acids), carbohydrates (sugars and starches), or lipids (fatty acids).

[0325] For example, metabolic disorders may be associated with a body fat distribution characterized by higher accumulation of fat around the waist (such as greater abdominal fat or larger waist circumference) and/or lower accumulation of fat around the hips (such as lower gluteofemoral fat or smaller hip circumference), resulting in a greater waist-to-hip ratio (WHR), and higher cardio-metabolic risk independent of body mass index (BMI).

[0326] Non-limiting examples of metabolic diseases include disorders of carbohydrates, e.g., diabetes, type I diabetes, type II diabetes, galactosemia, hereditary fructose intolerance, fructose 1,6-diphosphatase deficiency, glycogen storage disorders, congenital disorders of glycosylation, insulin resistance, insulin insufficiency, hyperinsulinemia, impaired glucose tolerance (IGT), abnormal glycogen metabolism; disorders of amino acid metabolism, e.g., maple syrup urine disease (MSUD), or homocystinuria; disorder of organic acid metabolism, e.g., methylmalonic aciduria, 3-methylglutaconic aciduria-Barth syndrome, glutaric aciduria or 2-hydroxyglutaric aciduria—D and L forms; disorders of fatty acid beta-oxidation, e.g., medium-chain acyl-CoA dehydrogenase deficiency (MCAD), long-chain 3-hydroxyacyl-CoA dehydrogenase deficiency (LCHAD), very-long-chain acyl-CoA dehydrogenase deficiency (VLCAD); disorders of lipid metabolism, e.g., GM1 Gangliosidosis, Tay-Sachs Disease, Sandhoff Disease, Fabry Disease, Gaucher Disease, Niemann-Pick Disease, Krabbe Disease, Mucolipidoses, or Mucopolysaccharidoses; disorders of lipid distribution and/or storage, e.g., lipodystrophy, mitochondrial disorders, e.g., mitochondrial cardiomyopathies; Leigh disease; mitochondrial encephalopathy, lactic acidosis, and stroke-like episodes (MELAS); myoclonic epilepsy with ragged-red fibers (MERRF); neuropathy, ataxia, and retinitis pigmentosa (NARP); Barth syndrome; peroxisomal disorders, e.g., Zellweger Syndrome (cerebrohepatorenal syndrome), X-Linked Adrenoleukodystrophy or Refsum Disease.

[0327] In certain embodiment, metabolic disorders are associated with body fat distribution and include, but are not limited to metabolic syndrome, type 2 diabetes, hyperlipidemia or dyslipidemia (high or altered circulating levels of low-density lipoprotein cholesterol (LDL-C), triglycerides, very low-density lipoprotein cholesterol (VLDL-C), apolipoprotein B or other lipid fractions), obesity (particularly abdominal obesity), lipodystrophy (such as an inability to deposit fat in adipose depots regionally (partial lipodystrophy) or in the whole body (lipoatrophy)), insulin resistance or higher or altered insulin levels at fasting or during a metabolic challenge, liver fat deposition or fatty liver disease and their complications (such as, for example, cirrhosis, fibrosis, or inflammation of the liver), nonalcoholic steatohepatitis, other types of liver inflammation, higher or elevated or altered liver enzyme levels or other markers of liver damage, inflammation or fat deposition in the liver, higher blood pressure and/or hypertension, higher blood sugar or glucose or hyperglycemia, metabolic syndrome, coronary artery disease, and other atherosclerotic conditions, and the complications of each of the aforementioned conditions.

[0328] In one embodiment, a metabolic disorder is metabolic syndrome. The term “metabolic syndrome,” as used herein, is disorder that includes a clustering of components that reflect overnutrition, sedentary lifestyles, genetic factors, increasing age, and resultant excess adiposity. Metabolic syndrome includes the clustering of abdominal obesity, insulin resistance, dyslipidemia, and elevated blood pressure and is associated with other comorbidities including the prothrombotic state, proinflammatory state, nonalcoholic fatty liver disease, and reproductive disorders. The prevalence of the metabolic syndrome has increased to epidemic proportions not only in the United States and the remainder of the urbanized world but also in developing nations. Metabolic syndrome is associated with an approximate doubling of cardiovascular disease risk and a 5-fold increased risk for incident type 2 diabetes mellitus.

[0329] Abdominal adiposity (e.g., a large waist circumference (high waist-to-hip ratio)), high blood pressure, insulin resistance and dislipidemia are central to metabolic syndrome and its individual components (e.g., central obesity, fasting blood glucose (FBG)/pre-diabetes/diabetes, hypercholesterolemia, hypertriglyceridemia, and hypertension).

[0330] In one embodiment, a metabolic disorder is a disorder of carbohydrates. In one embodiment, the disorder of carbohydrates is diabetes.

[0331] As used herein, the term “diabetes” refers to a group of metabolic disorders characterized by high blood sugar (glucose) levels which result from defects in insulin secretion or action, or both. There are two most common types of diabetes, namely type 1 diabetes and type 2 diabetes, which both result from the body's inability to regulate insulin. Insulin is a hormone released by the pancreas in response to increased levels of blood sugar (glucose) in the blood.

[0332] The term “type I diabetes,” as used herein, refers to a chronic disease that occurs when the pancreas produces too little insulin to regulate blood sugar levels appropriately. Type I diabetes is also referred to as insulin-dependent diabetes mellitus, IDDM, and juvenile onset diabetes. People with type I diabetes (insulin-dependent diabetes) produce little or no insulin at all. Although about 6 percent of the United States population has some form of diabetes, only about 10 percent of all diabetics have type I disorder. Most people who have type I diabetes developed the disorder before age 30. Type 1 diabetes represents the result of a progressive autoimmune destruction of the pancreatic β-cells with subsequent insulin deficiency. More than 90 percent of the insulin-producing cells (beta cells) of the pancreas are permanently destroyed. The resulting insulin deficiency is severe, and to survive, a person with type I diabetes must regularly inject insulin.

[0333] In type II diabetes (also referred to as noninsulin-dependent diabetes mellitus, NDDM), the pancreas continues to manufacture insulin, sometimes even at higher than normal levels. However, the body develops resistance to its effects, resulting in a relative insulin deficiency. Type II diabetes may occur in children and adolescents but usually begins after age 30 and becomes progressively more common with age: about 15 percent of people over age 70 have type II diabetes. Obesity is a risk factor for type II diabetes, and 80 to 90 percent of the people with this disorder are obese.

[0334] In some embodiments, diabetes includes pre-diabetes. “Pre-diabetes” refers to one or more early diabetic conditions including impaired glucose utilization, abnormal or impaired fasting glucose levels, impaired glucose tolerance, impaired insulin sensitivity and insulin resistance. Prediabetes is a major risk factor for the development of type 2 diabetes mellitus, cardiovascular disease and mortality. Much focus has been given to developing therapeutic interventions that prevent the development of type 2 diabetes by effectively treating prediabetes.

[0335] Diabetes can be diagnosed by the administration of a glucose tolerance test. Clinically, diabetes is often divided into several basic categories. Primary examples of these categories include, autoimmune diabetes mellitus, non-insulin-dependent diabetes mellitus (type 1 NDDM), insulin-dependent diabetes mellitus (type 2 IDDM), non-autoimmune diabetes mellitus, non-insulin-dependent diabetes mellitus (type 2 NIDDM), and maturity-onset diabetes of the young (MODY). A further category, often referred to as secondary, refers to diabetes brought about by some identifiable condition which causes or allows a diabetic syndrome to develop. Examples of secondary categories include, diabetes caused by pancreatic disease, hormonal abnormalities, drug- or chemical-induced diabetes, diabetes caused by insulin receptor abnormalities, diabetes associated with genetic syndromes, and diabetes of other causes. (see e.g., Harrison's (1996) 14th ed., New York, McGraw-Hill).

[0336] In one embodiment, a metabolic disorder is a lipid metabolism disorder. As used herein, a “lipid metabolism disorder” or “disorder of lipid metabolism” refers to any disorder associated with or caused by a disturbance in lipid metabolism. This term also includes any disorder, disease or condition that can lead to hyperlipidemia, or condition characterized by abnormal elevation of levels of any or all lipids and/or lipoproteins in the blood. This term refers to an inherited disorder, such as familial hypertriglyceridemia, familial partial lipodystrophy type 1 (FPLD1), or an induced or acquired disorder, such as a disorder induced or acquired as a result of a disease, disorder or condition (e.g., renal failure), a diet, or intake of certain drugs (e.g., as a result of highly active antiretroviral therapy (HAART) used for treating, e.g., AIDS or HIV). This term also refers to a disorder of fat distribution/storage, e.g., lipodystrophy.

[0337] Additional examples of disorders of lipid metabolism include, but are not limited to, atherosclerosis, dyslipidemia, hypertriglyceridemia (including drug-induced hypertriglyceridemia, diuretic-induced hypertriglyceridemia, alcohol-induced hypertriglyceridemia, β-adrenergic blocking agent-induced hypertriglyceridemia, estrogen-induced hypertriglyceridemia, glucocorticoid-induced hypertriglyceridemia, retinoid-induced hypertriglyceridemia, cimetidine-induced hypertriglyceridemia, and familial hypertriglyceridemia), acute pancreatitis associated with hypertriglyceridemia, chylomicron syndrome, familial chylomicronemia, Apo-E deficiency or resistance, LPL deficiency or hypoactivity, hyperlipidemia (including familial combined hyperlipidemia), hypercholesterolemia, lipodystrophy, gout associated with hypercholesterolemia, xanthomatosis (subcutaneous cholesterol deposits), hyperlipidemia with heterogeneous LPL deficiency, hyperlipidemia with high LDL and heterogeneous LPL deficiency, fatty liver disease, or non-alcoholic stetohepatitis (NASH).

[0338] Cardiovascular diseases are also considered “metabolic disorders”, as defined herein. These diseases may include coronary artery disease (also called ischemic heart disease), hypertension, inflammation associated with coronary artery disease, restenosis, peripheral vascular diseases, and stroke.

[0339] Kidney diseases are also considered “bolic disorders”, as defined herein. Such diseases may include chronic kidney disease, diabetic nephrophathy, diabetic kidney disease, or gout.

[0340] Disorders related to body weight are also considered “metabolic disorders”, as defined herein. Such disorders may include obesity, hypo-metabolic states, hypothyroidism, uremia, and other conditions associated with weight gain (including rapid weight gain), weight loss, maintenance of weight loss, or risk of weight regain following weight loss.

[0341] Blood sugar disorders are further considered “metabolic disorders”, as defined herein. Such disorders may include diabetes, hypertension, and polycystic ovarian syndrome related to insulin resistance. Other exemplary disorders of metabolic disorders may also include renal transplantation, nephrotic syndrome, Cushing's syndrome, acromegaly, systemic lupus erythematosus, dysglobulinemia, lipodystrophy, glycogenosis type I, and Addison's disease.

[0342] In one embodiment, a metabolic disorder is primary hypertension. “Primary hypertension” is a result of environmental or genetic causes (e.g., a result of no obvious underlying medical cause).

[0343] In one embodiment, a metabolic disorder is secondary hypertension. “Secondary hypertension” has an identifiable underlying disorder which can be of multiple etiologies, including renal, vascular, and endocrine causes, e.g., renal parenchymal disease (e.g., polycystic kidneys, glomerular or interstitial disease), renal vascular disease (e.g., renal artery stenosis, fibromuscular dysplasia), endocrine disorders (e.g., adrenocorticosteroid or mineralocorticoid excess, pheochromocytoma, hyperthyroidism or hypothyroidism, growth hormone excess, hyperparathyroidism), coarctation of the aorta, or oral contraceptive use.

[0344] In one embodiment, a metabolic disorder is resistant hypertension. “Resistant hypertension” is blood pressure that remains above goal (e.g., above 130 mm Hg systolic or above 90 diastolic) in spite of concurrent use of three antihypertensive agents of different classes, one of which is a thiazide diuretic. Subjects whose blood pressure is controlled with four or more medications are also considered to have resistant hypertension.

[0345] Additional diseases or conditions related to metabolic disorders that would be apparent to the skilled artisan and are within the scope of this disclosure.

[0346] “Therapeutically effective amount,” as used herein, is intended to include the amount of an RNAi agent that, when administered to a subject having a metabolic disorder, is sufficient to effect treatment of the disease (e.g., by diminishing, ameliorating, or maintaining the existing disease or one or more symptoms of disease). The “therapeutically effective amount” may vary depending on the RNAi agent, how the agent is administered, the disease and its severity and the history, age, weight, family history, genetic makeup, the types of preceding or concomitant treatments, if any, and other individual characteristics of the subject to be treated.

[0347] “Prophylactically effective amount,” as used herein, is intended to include the amount of an RNAi agent that, when administered to a subject having a metabolic disorder, is sufficient to prevent or ameliorate the disease or one or more symptoms of the disease. Ameliorating the disease includes slowing the course of the disease or reducing the severity of later-developing disease. The “prophylactically effective amount” may vary depending on the RNAi agent, how the agent is administered, the degree of risk of disease, and the history, age, weight, family history, genetic makeup, the types of preceding or concomitant treatments, if any, and other individual characteristics of the patient to be treated.

[0348] A “therapeutically-effective amount” or “prophylactically effective amount” also includes an amount of an RNAi agent that produces some desired effect at a reasonable benefit/risk ratio applicable to any treatment. The iRNA employed in the methods of the present invention may be administered in a sufficient amount to produce a reasonable benefit/risk ratio applicable to such treatment.

[0349] The phrase “pharmaceutically acceptable” is employed herein to refer to those compounds, materials, compositions, or dosage forms which are, within the scope of sound medical judgment, suitable for use in contact with the tissues of human subjects and animal subjects without excessive toxicity, irritation, allergic response, or other problem or complication, commensurate with a reasonable benefit/risk ratio.

[0350] The phrase “pharmaceutically-acceptable carrier” as used herein means a pharmaceutically-acceptable material, composition, or vehicle, such as a liquid or solid filler, diluent, excipient, manufacturing aid (e.g., lubricant, talc magnesium, calcium or zinc stearate, or steric acid), or solvent encapsulating material, involved in carrying or transporting the subject compound from one organ, or portion of the body, to another organ, or portion of the body. Each carrier must be “acceptable” in the sense of being compatible with the other ingredients of the formulation and not injurious to the subject being treated. Such carriers are known in the art. Pharmaceutically acceptable carriers include carriers for administration by injection.

[0351] The term “sample,” as used herein, includes a collection of similar fluids, cells, or tissues isolated from a subject, as well as fluids, cells, or tissues present within a subject. Examples of biological fluids include blood, serum and serosal fluids, plasma, cerebrospinal fluid, ocular fluids, lymph, urine, saliva, and the like. Tissue samples may include samples from tissues, organs, or localized regions. For example, samples may be derived from particular organs, parts of organs, or fluids or cells within those organs. In certain embodiments, samples may be derived from the liver (e.g., whole liver or certain segments of liver or certain types of cells in the liver, such as, e.g., hepatocytes). In some embodiments, a “sample derived from a subject” refers to urine obtained from the subject. A “sample derived from a subject” can refer to blood or blood derived serum or plasma from the subject.

### II. iRNAs of the Invention

[0352] The present invention provides iRNAs which inhibit the expression of a metabolic disorder-associated target gene, e.g., INHBE, ACVR1C, PLIN1, PDE3B, or INHBC. In certain embodiments, the iRNA includes double stranded ribonucleic acid (dsRNA) molecules for inhibiting the expression of a metabolic disorder-associated target gene in a cell (e.g., an adipocyte and/or a hepatocyte), such as a cell within a subject, e.g., a mammal, such as a human susceptible to developing a metabolic disorder, e.g., metabolic syndrome, a disorder of carbohydrates, e.g., type II diabetes, pre-diabetes, a lipid metabolism disorder, e.g., a hyperlipidemia, hypertension, lipodystrophy; a kidney disease; a cardiovascular disease, a disorder of body weight. The dsRNAi agent includes an antisense strand having a region of complementarity which is complementary to at least a part of an mRNA formed in the expression of a metabolic disorder-associated target gene. The region of complementarity is about 19-30 nucleotides in length (e.g., about 30, 29, 28, 27, 26, 25, 24, 23, 22, 21, 20, or 19 nucleotides in length).

[0353] Upon contact with a cell expressing the target gene, the iRNA inhibits the expression of the target gene (e.g., a human, a primate, a non-primate, or a rat INHBE, ACVR1C, PLIN1, PDE3B, or INHBC gene) by at least about 50% as assayed by, for example, a PCR or branched DNA (bDNA)-based method, or by a protein-based method, such as by immunofluorescence analysis, using, for example, western blotting or flow cytometric techniques. In certain embodiments, inhibition of expression is determined by the qPCR method provided in the examples herein with the siRNA at, e.g., a 10 nM concentration, in an appropriate organism cell line provided therein. In certain embodiments, inhibition of expression in vivo is determined by knockdown of the human gene in a rodent expressing the human gene, e.g., a mouse or an AAV-infected mouse expressing the human target gene, e.g., when administered as single dose, e.g., at 3 mg/kg at the nadir of RNA expression.

[0354] A dsRNA includes two RNA strands that are complementary and hybridize to form a duplex structure under conditions in which the dsRNA will be used. One strand of a dsRNA (the antisense strand) includes a region of complementarity that is substantially complementary, and generally fully complementary, to a target sequence. The target sequence can be derived from the sequence of an mRNA formed during the expression of an INHBE, ACVR1C, PLIN1, PDE3B, or INHBC gene. The other strand (the sense strand) includes a region that is complementary to the antisense strand, such that the two strands hybridize and form a duplex structure when combined under suitable conditions. As described elsewhere herein and as known in the art, the complementary sequences of a dsRNA can also be contained as self-complementary regions of a single nucleic acid molecule, as opposed to being on separate oligonucleotides.

[0355] Generally, the duplex structure is 15 to 30 base pairs in length, e.g., 15-29, 15-28, 15-27, 15-26, 15-25, 15-24, 15-23, 15-22, 15-21, 15-20, 15-19, 15-18, 15-17, 18-30, 18-29, 18-28, 18-27, 18-26, 18-25, 18-24, 18-23, 18-22, 18-21, 18-20, 19-30, 19-29, 19-28, 19-27, 19-26, 19-25, 19-24, 19-23, 19-22, 19-21, 19-20, 20-30, 20-29, 20-28, 20-27, 20-26, 20-25, 20-24, 20-23, 20-22, 20-21, 21-30, 21-29, 21-28, 21-27, 21-26, 21-25, 21-24, 21-23, or 21-22 base pairs in length. In certain embodiments, the duplex structure is 18 to 25 base pairs in length, e.g., 18-25, 18-24, 18-23, 18-22, 18-21, 18-20, 19-25, 19-24, 19-23, 19-22, 19-21, 19-20, 20-25, 20-24, 20-23, 20-22, 20-21, 21-25, 21-24, 21-23, 21-22, 22-25, 22-24, 22-23, 23-25, 23-24 or 24-25 base pairs in length, for example, 19-21 basepairs in length. Ranges and lengths intermediate to the above recited ranges and lengths are also contemplated to be part of the disclosure.

[0356] Similarly, the region of complementarity to the target sequence is 15 to 30 nucleotides in length, e.g., 15-29, 15-28, 15-27, 15-26, 15-25, 15-24, 15-23, 15-22, 15-21, 15-20, 15-19, 15-18, 15-17, 18-30, 18-29, 18-28, 18-27, 18-26, 18-25, 18-24, 18-23, 18-22, 18-21, 18-20, 19-30, 19-29, 19-28, 19-27, 19-26, 19-25, 19-24, 19-23, 19-22, 19-21, 19-20, 20-30, 20-29, 20-28, 20-27, 20-26, 20-25, 20-24, 20-23, 20-22, 20-21, 21-30, 21-29, 21-28, 21-27, 21-26, 21-25, 21-24, 21-23, or 21-22 nucleotides in length, for example 19-23 nucleotides in length or 21-23 nucleotides in length. Ranges and lengths intermediate to the above recited ranges and lengths are also contemplated to be part of the disclosure.

[0357] In some embodiments, the duplex structure is 19 to 30 base pairs in length. Similarly, the region of complementarity to the target sequence is 19 to 30 nucleotides in length.

[0358] In some embodiments, the dsRNA is about 19 to about 23 nucleotides in length, or about 25 to about 30 nucleotides in length. In general, the dsRNA is long enough to serve as a substrate for the Dicer enzyme. For example, it is well-known in the art that dsRNAs longer than about 21-23 nucleotides in length may serve as substrates for Dicer. As the ordinarily skilled person will also recognize, the region of an RNA targeted for cleavage will most often be part of a larger RNA molecule, often an mRNA molecule. Where relevant, a “part” of an mRNA target is a contiguous sequence of an mRNA target of sufficient length to allow it to be a substrate for RNAi-directed cleavage (i.e., cleavage through a RISC pathway).

[0359] One of skill in the art will also recognize that the duplex region is a primary functional portion of a dsRNA, e.g., a duplex region of about 19 to about 30 base pairs, e.g., about 19-30, 19-29, 19-28, 19-27, 19-26, 19-25, 19-24, 19-23, 19-22, 19-21, 19-20, 20-30, 20-29, 20-28, 20-27, 20-26, 20-25, 20-24, 20-23, 20-22, 20-21, 21-30, 21-29, 21-28, 21-27, 21-26, 21-25, 21-24, 21-23, or 21-22 base pairs. Thus, in one embodiment, to the extent that it becomes processed to a functional duplex, of e.g., 15-30 base pairs, that targets a desired RNA for cleavage, an RNA molecule or complex of RNA molecules having a duplex region greater than 30 base pairs is a dsRNA. Thus, an ordinarily skilled artisan will recognize that in one embodiment, a miRNA is a dsRNA. In another embodiment, a dsRNA is not a naturally occurring miRNA. In another embodiment, an iRNA agent useful to target INHBE, ACVR1C, PLIN1, PDE3B, or INHBC gene expression is not generated in the target cell by cleavage of a larger dsRNA.

[0360] A dsRNA as described herein can further include one or more single-stranded nucleotide overhangs, e.g., 1-4, 2-4, 1-3, 2-3, 1, 2, 3, or 4 nucleotides. dsRNAs having at least one nucleotide overhang can have superior inhibitory properties relative to their blunt-ended counterparts. A nucleotide overhang can comprise or consist of a nucleotide/nucleoside analog, including a deoxynucleotide/nucleoside. The overhang(s) can be on the sense strand, the antisense strand, or any combination thereof. Furthermore, the nucleotide(s) of an overhang can be present on the 5′-end, 3′-end, or both ends of an antisense or sense strand of a dsRNA.

[0361] A dsRNA can be synthesized by standard methods known in the art. Double stranded RNAi compounds of the invention may be prepared using a two-step procedure. First, the individual strands of the double stranded RNA molecule are prepared separately. Then, the component strands are annealed. The individual strands of the siRNA compound can be prepared using solution-phase or solid-phase organic synthesis or both. Organic synthesis offers the advantage that the oligonucleotide strands comprising unnatural or modified nucleotides can be easily prepared. Similarly, single-stranded oligonucleotides of the invention can be prepared using solution-phase or solid-phase organic synthesis or both.

[0362] In an aspect, a dsRNA of the invention includes at least two nucleotide sequences, a sense sequence and an anti-sense sequence. The sense strand is selected from the group of sequences provided in any one of Tables 2-17, 19 and 20, and the corresponding antisense strand of the sense strand is selected from the group of sequences of any one of Tables 2-17, 19 and 20. In this aspect, one of the two sequences is complementary to the other of the two sequences, with one of the sequences being substantially complementary to a sequence of an mRNA generated in the expression of a-associated target gene. As such, in this aspect, a dsRNA will include two oligonucleotides, where one oligonucleotide is described as the sense strand in any one of Tables 2-17, 19 and 20, and the second oligonucleotide is described as the corresponding antisense strand of the sense strand in any one of Tables 2-17, 19 and 20.

[0363] In certain embodiments, the substantially complementary sequences of the dsRNA are contained on separate oligonucleotides. In other embodiments, the substantially complementary sequences of the dsRNA are contained on a single oligonucleotide.

[0364] In some embodiments, the sense or antisense strands are selected from the sense or antisense strand of any one of duplexes AD-1706583, AD-1711744, AD-1706593, AD-1708473, AD-1706662, AD-1706761, AD-1707306, AD-1707639, and AD-1707640.

[0365] In some embodiments, the sense or antisense strands are selected from the sense or antisense strand of duplex AD-1706583.

[0366] In some embodiments, the sense or antisense strands are selected from the sense or antisense strand of duplex AD-1711744.

[0367] In some embodiments, the sense or antisense strands are selected from the sense or antisense strand of duplex AD-1706593.

[0368] In some embodiments, the sense or antisense strands are selected from the sense or antisense strand of duplex AD-1708473.

[0369] In some embodiments, the sense or antisense strands are selected from the sense or antisense strand of duplex AD-1706662.

[0370] In some embodiments, the sense or antisense strands are selected from the sense or antisense strand of duplex AD-1706761.

[0371] In some embodiments, the sense or antisense strands are selected from the sense or antisense strand of duplex AD-1707306.

[0372] In some embodiments, the sense or antisense strands are selected from the sense or antisense strand of duplex AD-1707639.

[0373] In some embodiments, the sense or antisense strands are selected from the sense or antisense strand of duplex AD-1707640.

[0374] It will be understood that, although the sequences in, for example, Table 2, are not described as modified or conjugated sequences, the RNA of the iRNA of the invention e.g., a dsRNA of the invention, may comprise any one of the sequences set forth in any one of Tables 2-17, 19 and 20 that is un-modified, un-conjugated, or modified or conjugated differently than described therein. In other words, the invention encompasses dsRNA of Tables 2-17, 19 and 20 which are un-modified, un-conjugated, modified, or conjugated, as described herein.

[0375] The skilled person is well aware that dsRNAs having a duplex structure of about 20 to 23 base pairs, e.g., 21, base pairs have been hailed as particularly effective in inducing RNA interference (Elbashir et al., EMBO 2001, 20:6877-6888). However, others have found that shorter or longer RNA duplex structures can also be effective (Chu and Rana (2007) RNA 14:1714-1719; Kim et al. (2005) Nat Biotech 23:222-226). In the embodiments described above, by virtue of the nature of the oligonucleotide sequences provided in any one of Tables 2-17, 19 and 20. dsRNAs described herein can include at least one strand of a length of minimally 21 nucleotides. It can be reasonably expected that shorter duplexes having any one of the sequences in any one of Tables 2-17, 19 and 20 minus only a few nucleotides on one or both ends can be similarly effective as compared to the dsRNAs described above. Hence, dsRNAs having a sequence of at least 19, 20, or more contiguous nucleotides derived from any one of the sequences of any one of Tables 2-17, 19 and 20, and differing in their ability to inhibit the expression of an INHBE gene by not more than about 5, 10, 15, 20, 25, or 30% inhibition from a dsRNA comprising the full sequence, are contemplated to be within the scope of the present invention.

[0376] In addition, the RNAs provided in Tables 2-17, 19 and 20 identify a site(s) in a metabolic disorder-associated target gene transcript that is susceptible to RISC-mediated cleavage. As such, the present invention further features iRNAs that target within one of these sites. As used herein, an iRNA is said to target within a particular site of an RNA transcript if the iRNA promotes cleavage of the transcript anywhere within that particular site. Such an iRNA will generally include at least about 19 contiguous nucleotides from any one of the sequences provided in any one of Tables 2-17, 19 and 20 coupled to additional nucleotide sequences taken from the region contiguous to the selected sequence in a metabolic disorder-associated target gene.

### III. Modifications for the RNAi Agents of the Invention

[0377] In certain embodiments, the RNA of the iRNA of the invention e.g., a dsRNA, is un modified, and does not comprise, e.g., chemical modifications or conjugations known in the art and described herein. In other embodiments, the RNA of an iRNA of the invention, e.g., a dsRNA, is chemically modified to enhance stability or other beneficial characteristics. In certain embodiments of the invention, substantially all of the nucleotides of an iRNA of the invention are modified. In other embodiments of the invention, all of the nucleotides of an iRNA or substantially all of the nucleotides of an iRNA are modified, i.e., not more than 5, 4, 3, 2, or 1 unmodified nucleotides are present in a strand of the iRNA.

[0378] In some embodiments, the dsRNA agents of the invention comprise at least one nucleic acid modification described herein. For example, at least one modification selected from the group consisting of modified internucleoside linkage, modified nucleobase, modified sugar, and any combinations thereof. Without limitations, such a modification can be present anywhere in the dsRNA agent of the invention. For example, the modification can be present in one of the RNA molecules.

[0379] In one embodiment, the dsRNA agents of the disclosure comprise one or more C22 hydrocarbon chains conjugated to one or more internal positions on at least one strand and do not comprise additional chemical modifications known in the art and described herein, in the remaining positions of the sense and anti-sense strands.

[0380] In some embodiments, the dsRNA agents of the invention comprise one or more C22 hydrocarbon chains conjugated to one or more internal positions on at least one strand, and comprise at least one additional nucleic acid modification described herein. For example, at least one modification selected from the group consisting of modified internucleoside linkage, modified nucleobase, modified sugar, and any combinations thereof. Without limitations, such a modification can be present anywhere in the dsRNA agent of the invention. For example, the modification can be present in one of the RNA molecules.

[0381] In one embodiment, the dsRNA agents of the disclosure comprise one or more targeting ligands, e.g., one or more GalNAc derivatives, and do not comprise additional chemical modifications known in the art and described herein, in the remaining positions of the sense and anti-sense strands.

[0382] In some embodiments, the dsRNA agents of the invention comprise one or more targeting ligands, e.g., one or more GalNAc derivatives, and comprise at least one additional nucleic acid modification described herein. For example, at least one modification selected from the group consisting of modified internucleoside linkage, modified nucleobase, modified sugar, and any combinations thereof. Without limitations, such a modification can be present anywhere in the dsRNA agent of the invention. For example, the modification can be present in one of the RNA molecules.

[0383] Modifications include, for example, end modifications, e.g., 5′-end modifications (phosphorylation, conjugation, inverted linkages) or 3′-end modifications (conjugation, DNA nucleotides, inverted linkages, etc.); base modifications, e.g., replacement with stabilizing bases, destabilizing bases, or bases that base pair with an expanded repertoire of partners, removal of bases (abasic nucleotides), or conjugated bases; sugar modifications (e.g., at the 2′-position or 4′-position) or replacement of the sugar; or backbone modifications, including modification or replacement of the phosphodiester linkages. Specific examples of RNAi agents useful in the embodiments described herein include, but are not limited to, RNAs containing modified backbones or no natural internucleoside linkages. RNAs having modified backbones include, among others, those that do not have a phosphorus atom in the backbone. For the purposes of this specification, and as sometimes referenced in the art, modified RNAs that do not have a phosphorus atom in their internucleoside backbone can also be considered to be oligonucleosides. In some embodiments, a modified RNAi agent will have a phosphorus atom in its internucleoside backbone.

### A. Nucleobase Modifications

[0384] The naturally occurring base portion of a nucleoside is typically a heterocyclic base. The two most common classes of such heterocyclic bases are the purines and the pyrimidines. For those nucleosides that include a pentofuranosyl sugar, a phosphate group can be linked to the 2′, 3′ or 5′ hydroxyl moiety of the sugar. In forming oligonucleotides, those phosphate groups covalently link adjacent nucleosides to one another to form a linear polymeric compound. Within oligonucleotides, the phosphate groups are commonly referred to as forming the internucleoside backbone of the oligonucleotide. The naturally occurring linkage or backbone of RNA and of DNA is a 3′ to 5′ phosphodiester linkage.

[0385] In addition to “unmodified” or “natural” nucleobases such as the purine nucleobases adenine (A) and guanine (G), and the pyrimidine nucleobases thymine (T), cytosine (C) and uracil (U), many modified nucleobases or nucleobase mimetics known to those skilled in the art are amenable with the compounds described herein. The unmodified or natural nucleobases can be modified or replaced to provide iRNAs having improved properties. For example, nuclease resistant oligonucleotides can be prepared with these bases or with synthetic and natural nucleobases (e.g., inosine, xanthine, hypoxanthine, nubularine, isoguanisine, or tubercidine) and any one of the oligomer modifications described herein. Alternatively, substituted or modified analogs of any of the above bases and “universal bases” can be employed. When a natural base is replaced by a non-natural and/or universal base, the nucleotide is said to comprise a modified nucleobase and/or a nucleobase modification herein. Modified nucleobase and/or nucleobase modifications also include natural, non-natural and universal bases, which comprise conjugated moieties, e.g. a ligand described herein. Preferred conjugate moieties for conjugation with nucleobases include cationic amino groups which can be conjugated to the nucleobase via an appropriate alkyl, alkenyl or a linker with an amide linkage.

[0386] An oligomeric compound described herein can also include nucleobase (often referred to in the art simply as “base”) modifications or substitutions. As used herein, “unmodified” or “natural” nucleobases include the purine bases adenine (A) and guanine (G), and the pyrimidine bases thymine (T), cytosine (C) and uracil (U). Exemplary modified nucleobases include, but are not limited to, other synthetic and natural nucleobases such as inosine, xanthine, hypoxanthine, nubularine, isoguanisine, tubercidine, 2-(halo)adenine, 2-(alkyl)adenine, 2-(propyl)adenine, 2-(amino)adenine, 2-(aminoalkyll)adenine, 2-(aminopropyl)adenine, 2-(methylthio)-N⁶-(isopentenyl)adenine, 6-(alkyl)adenine, 6-(methyl)adenine, 7-(deaza)adenine, 8-(alkenyl)adenine, 8-(alkyl)adenine, 8-(alkynyl)adenine, 8-(amino)adenine, 8-(halo)adenine, 8-(hydroxyl)adenine, 8-(thioalkyl)adenine, 8-(thiol)adenine, N⁶-(isopentyl)adenine, N⁶-(methyl)adenine, N⁶, N⁶-(dimethyl)adenine, 2-(alkyl)guanine, 2-(propyl)guanine, 6-(alkyl)guanine, 6-(methyl)guanine, 7-(alkyl)guanine, 7-(methyl)guanine, 7-(deaza)guanine, 8-(alkyl)guanine, 8-(alkenyl)guanine, 8-(alkynyl)guanine, 8 (amino)guanine, 8-(halo)guanine, 8-(hydroxyl)guanine, 8-(thioalkyl)guanine, 8-(thiol)guanine, N-(methyl)guanine, 2-(thio)cytosine, 3-(deaza)-5-(aza)cytosine, 3-(alkyl)cytosine, 3-(methyl)cytosine, 5-(alkyl)cytosine, 5-(alkynyl)cytosine, 5-(halo)cytosine, 5-(methyl)cytosine, 5-(propynyl)cytosine, 5-(propynyl)cytosine, 5-(trifluoromethyl)cytosine, 6-(azo)cytosine, N4-(acetyl)cytosine, 3-(3-amino-3-carboxypropyl)uracil, 2-(thio)uracil, 5-(methyl)-2-(thio)uracil, 5-(methylaminomethyl)-2-(thio)uracil, 4-(thio)uracil, 5-(methyl)-4-(thio)uracil, 5-(methylaminomethyl)-4-(thio)uracil, 5-(methyl)-2,4-(dithio)uracil, 5-(methylaminomethyl)-2,4-(dithio)uracil, 5-(2-aminopropyl)uracil, 5-(alkyl)uracil, 5-(alkynyl)uracil, 5-(allylamino)uracil, 5-(aminoallyl)uracil, 5-(aminoalkyl)uracil, 5-(guanidiniumalkyl)uracil, 5-(1,3-diazole-1-alkyl)uracil, 5-(cyanoalkyl)uracil, 5-(dialkylaminoalkyl)uracil, 5-(dimethylaminoalkyl)uracil, 5-(halo)uracil, 5-(methoxy)uracil, uracil-5-oxyacetic acid, 5-(methoxycarbonylmethyl)-2-(thio)uracil, 5-(methoxycarbonyl-methyl)uracil, 5-(propynyl)uracil, 5-(propynyl)uracil, 5-(trifluoromethyl)uracil, 6-(azo)uracil, dihydrouracil, N³-(methyl)uracil, 5-uracil (i.e., pseudouracil), 2-(thio)pseudouracil, 4-(thio)pseudouracil, 2,4-(dithio)psuedouracil, 5-(alkyl)pseudouracil, 5-(methyl)pseudouracil, 5-(alkyl)-2-(thio)pseudouracil, 5-(methyl)-2-(thio)pseudouracil, 5-(alkyl)-4-(thio)pseudouracil, 5-(methyl)-4-(thio)pseudouracil, 5 (alkyl)-2,4-(dithio)pseudouracil, 5-(methyl)-2,4-(dithio)pseudouracil, 1-substituted pseudouracil, 1-substituted 2(thio)-pseudouracil, 1-substituted 4-(thio)pseudouracil, 1-substituted 2,4-(dithio)pseudouracil, 1-(aminocarbonylethylenyl)-pseudouracil, 1-(aminocarbonylethylenyl)-2(thio)-pseudouracil, 1-(aminocarbonylethylenyl)-4-(thio)pseudouracil, 1-(aminocarbonylethylenyl)-2,4-(dithio)pseudouracil, 1-(aminoalkylaminocarbonylethylenyl)-pseudouracil, 1-(aminoalkylamino-carbonylethylenyl)-2(thio)-pseudouracil, 1-(aminoalkylaminocarbonylethylenyl)-4-(thio)pseudouracil, 1-(aminoalkylaminocarbonylethylenyl)-2,4-(dithio)pseudouracil, 1,3-(diaza)-2-(oxo)-phenoxazin-1-yl, 1-(aza)-2-(thio)-3-(aza)-phenoxazin-1-yl, 1,3-(diaza)-2-(oxo)-phenthiazin-1-yl, 1-(aza)-2-(thio)-3-(aza)-phenthiazin-1-yl, 7-substituted 1,3-(diaza)-2-(oxo)-phenoxazin-1-yl, 7-substituted 1-(aza)-2-(thio)-3-(aza)-phenoxazin-1-yl, 7-substituted 1,3-(diaza)-2-(oxo)-phenthiazin-1-yl, 7-substituted 1-(aza)-2-(thio)-3-(aza)-phenthiazin-1-yl, 7-(aminoalkylhydroxy)-1,3-(diaza)-2-(oxo)-phenoxazin-1-yl, 7-(aminoalkylhydroxy)-1-(aza)-2-(thio)-3-(aza)-phenoxazin-1-yl, 7-(aminoalkylhydroxy)-1,3-(diaza)-2-(oxo)-phenthiazin-1-yl, 7-(aminoalkylhydroxy)-1-(aza)-2-(thio)-3-(aza)-phenthiazin-1-yl, 7-(guanidiniumalkylhydroxy)-1,3-(diaza)-2-(oxo)-phenoxazin-1-yl, 7-(guanidiniumalkylhydroxy)-1-(aza)-2-(thio)-3-(aza)-phenoxazin-1-yl, 7-(guanidiniumalkyl-hydroxy)-1,3-(diaza)-2-(oxo)-phenthiazin-1-yl, 7-(guanidiniumalkylhydroxy)-1-(aza)-2-(thio)-3-(aza)-phenthiazin-1-yl, 1,3,5-(triaza)-2,6-(dioxa)-naphthalene, inosine, xanthine, hypoxanthine, nubularine, tubercidine, isoguanisine, inosinyl, 2-aza-inosinyl, 7-deaza-inosinyl, nitroimidazolyl, nitropyrazolyl, nitrobenzimidazolyl, nitroindazolyl, aminoindolyl, pyrrolopyrimidinyl, 3-(methyl)isocarbostyrilyl, 5 (methyl)isocarbostyrilyl, 3-(methyl)-7-(propynyl)isocarbostyrilyl, 7-(aza)indolyl, 6-(methyl)-7-(aza)indolyl, imidizopyridinyl, 9-(methyl)-imidizopyridinyl, pyrrolopyrizinyl, isocarbostyrilyl, 7-(propynyl)isocarbostyrilyl, propynyl-7-(aza)indolyl, 2,4,5-(trimethyl)phenyl, 4-(methyl)indolyl, 4,6-(dimethyl)indolyl, phenyl, napthalenyl, anthracenyl, phenanthracenyl, pyrenyl, stilbenyl, tetracenyl, pentacenyl, difluorotolyl, 4-(fluoro)-6-(methyl)benzimidazole, 4-(methyl)benzimidazole, 6 (azo)thymine, 2-pyridinone, 5-nitroindole, 3-nitropyrrole, 6-(aza)pyrimidine, 2-(amino)purine, 2,6-(diamino)purine, 5-substituted pyrimidines, N²-substituted purines, N⁶-substituted purines, O⁶-substituted purines, substituted 1,2,4-triazoles, pyrrolo-pyrimidin-2-on-3-yl, 6-phenyl-pyrrolo-pyrimidin-2-on-3-yl, para-substituted-6-phenyl-pyrrolo-pyrimidin-2-on-3-yl, ortho-substituted-6-phenyl-pyrrolo-pyrimidin-2-on-3-yl, bis-ortho-substituted-6-phenyl-pyrrolo-pyrimidin-2-on-3-yl, para-(aminoalkylhydroxy)-6-phenyl-pyrrolo-pyrimidin-2-on-3-yl, ortho-(aminoalkylhydroxy)-6-phenyl-pyrrolo-pyrimidin-2-on-3-yl, bis-ortho-(aminoalkylhydroxy)-6-phenyl-pyrrolo-pyrimidin-2-on-3-yl, pyridopyrimidin-3-yl, 2-oxo-7-amino-pyridopyrimidin-3-yl, 2-oxo-pyridopyrimidine-3-yl, or any O-alkylated or N-alkylated derivatives thereof. Alternatively, substituted or modified analogs of any of the above bases and “universal bases” can be employed.

[0387] As used herein, a universal nucleobase is any nucleobase that can base pair with all of the four naturally occurring nucleobases without substantially affecting the melting behavior, recognition by intracellular enzymes or activity of the iRNA duplex. Some exemplary universal nucleobases include, but are not limited to, 2,4-difluorotoluene, nitropyrrolyl, nitroindolyl, 8-aza-7-deazaadenine, 4-fluoro-6-methylbenzimidazle, 4-methylbenzimidazle, 3-methyl isocarbostyrilyl, 5-methyl isocarbostyrilyl, 3-methyl-7-propynyl isocarbostyrilyl, 7-azaindolyl, 6-methyl-7-azaindolyl, imidizopyridinyl, 9-methyl-imidizopyridinyl, pyrrolopyrizinyl, isocarbostyrilyl, 7-propynyl isocarbostyrilyl, propynyl-7-azaindolyl, 2,4,5-trimethylphenyl, 4-methylinolyl, 4,6-dimethylindolyl, phenyl, napthalenyl, anthracenyl, phenanthracenyl, pyrenyl, stilbenyl, tetracenyl, pentacenyl, and structural derivatives thereof (see for example, Loakes, 2001, Nucleic Acids Research, 29, 2437-2447).

[0388] Further nucleobases include those disclosed in U.S. Pat. No. 3,687,808; those disclosed in International Application No. PCT/US09/038425, filed Mar. 26, 2009; those disclosed in the Concise Encyclopedia Of Polymer Science And Engineering, pages 858-859, Kroschwitz, J. I., ed. John Wiley & Sons, 1990; those disclosed by English et al., Angewandte Chemie, International Edition, 1991, 30, 613; those disclosed in Modified Nucleosides in Biochemistry, Biotechnology and Medicine, Herdewijin, P. Ed. Wiley-VCH, 2008; and those disclosed by Sanghvi, Y. S., Chapter 15, dsRNA Research and Applications, pages 289-302, Crooke, S. T. and Lebleu, B., Eds., CRC Press, 1993. Contents of all of the above are herein incorporated by reference.

[0389] In certain embodiments, a modified nucleobase is a nucleobase that is fairly similar in structure to the parent nucleobase, such as for example a 7-deaza purine, a 5-methyl cytosine, or a G-clamp. In certain embodiments, nucleobase mimetic include more complicated structures, such as for example a tricyclic phenoxazine nucleobase mimetic. Methods for preparation of the above noted modified nucleobases are well known to those skilled in the art.

### B. Sugar Modifications

[0390] DsRNA agent of the inventions provided herein can comprise one or more (e.g., 1, 2, 3, 4, 5, 6, 7, 8, 9, 10, 11, 12, 13, 14, 15 or more) monomer, including a nucleoside or nucleotide, having a modified sugar moiety. For example, the furanosyl sugar ring of a nucleoside can be modified in a number of ways including, but not limited to, addition of a substituent group, bridging of two non-geminal ring atoms to form a locked nucleic acid or bicyclic nucleic acid. In certain embodiments, oligomeric compounds comprise one or more (e.g., 1, 2, 3, 4, 5, 6, 7, 8, 9, 10, 11, 12, 13, 14, 15 or more) monomers that are LNA.

[0391] In some embodiments of a locked nucleic acid, the 2′ position of furnaosyl is connected to the 4′ position by a linker selected independently from —[C(R1)(R2)]ₙ—, —[C(R1)(R2)]ₙ—O—, [C(R1)(R2)]ₙ—N(R1)-, —[C(R1)(R2)]ₙ—N(R1)-O—, —[C(R1R2)]ₙ—O—N(R1)-, —C(R1)=(R2)-O—, —C(R1)=N—, —C(R1)=N—O—, —C(═NR1)-, —C(═NR1)-O—, —C(═O)—, —C(═O)O—, —C(═S)—, —C(═S)O—, —C(═S)S—, —O—, —Si(R1)2-, —S(═O)ₓ— and —N(R1)-;
[0392] wherein:
[0393] x is 0, 1, or 2;
[0394] n is 1, 2, 3, or 4;
[0395] each R1 and R2 is, independently, H, a protecting group, hydroxyl, C1-C12 alkyl, substituted C1-C12 alkyl, C2-C12 alkenyl, substituted C2-C12 alkenyl, C2-C12 alkynyl, substituted C2-C12 alkynyl, C5-C20 aryl, substituted C5-C20 aryl, heterocycle radical, substituted heterocycle radical, heteroaryl, substituted heteroaryl, C5-C7 alicyclic radical, substituted C5-C7 alicyclic radical, halogen, OJ1, NJ1J2, SJ1, N3, COOJ1, acyl (C(═O)—H), substituted acyl, CN, sulfonyl (S(═O)2-J1), or sulfoxyl (S(═O)-J1); and
[0396] each J1 and J2 is, independently, H, C1-C12 alkyl, substituted C1-C12 alkyl, C2-C12 alkenyl,
[0397] substituted C2-C12 alkenyl, C2-C12 alkynyl, substituted C2-C12 alkynyl, C5-C20 aryl, substituted C5-C20 aryl, acyl (C(═O)—H), substituted acyl, a heterocycle radical, a substituted heterocycle radical, C1-C12 aminoalkyl, substituted C1-C12 aminoalkyl or a protecting group.

[0398] In some embodiments, each of the linkers of the LNA compounds is, independently, —[C(R1)(R2)]n-, —[C(R1)(R2)]n-O—, —C(R1R2) N(R1)-O— or —C(R1R2)-O—N(R1)-. In another embodiment, each of said linkers is, independently, 4′-CH₂-2′, 4′-(CH₂)₂-2′, 4′-(CH₂)₃-2′, 4′—CH₂—O-2′, 4′-(CH₂)₂—O-2′, 4′-CH₂—O—N(R1)-2′ and 4′-CH₂—N(R1)-O-2′- wherein each R1 is, independently, H, a protecting group or C1-C12 alkyl.

[0399] Certain LNA's have been prepared and disclosed in the patent literature as well as in scientific literature (Singh et al., Chem. Commun., 1998, 4, 455-456; Koshkin et al., Tetrahedron, 1998, 54, 3607-3630; Wahlestedt et al., Proc. Natl. Acad. Sci. U.S.A., 2000, 97, 5633-5638; Kumar et al., Bioorg. Med. Chem. Lett., 1998, 8, 2219-2222; WO 94/14226; WO 2005/021570; Singh et al., J. Org. Chem., 1998, 63, 10035-10039; Examples of issued US patents and published applications that disclose LNA s include, for example, U.S. Pat. Nos. 7,053,207; 6,268,490; 6,770,748; 6,794,499; 7,034,133; and 6,525,191; and U.S. Pre-Grant Publication Nos. 2004-0171570; 2004-0219565; 2004-0014959; 2003-0207841; 2004-0143114; and 20030082807.

[0400] Also provided herein are LNAs in which the 2′-hydroxyl group of the ribosyl sugar ring is linked to the 4′ carbon atom of the sugar ring thereby forming a methyleneoxy (4′-CH₂—O-2′) linkage to form the bicyclic sugar moiety (reviewed in Elayadi et al., Cuff. Opinion Invens. Drugs, 2001, 2, 558-561; Braasch et al., Chem. Biol., 2001, 8 1-7; and Orum et al., CWT. Opinion Mol. Ther., 2001, 3, 239-243; see also U.S. Pat. Nos. 6,268,490 and 6,670,461). The linkage can be a methylene (—CH₂—) group bridging the 2′ oxygen atom and the 4′ carbon atom, for which the term methyleneoxy (4′-CH₂—O-2′) LNA is used for the bicyclic moiety; in the case of an ethylene group in this position, the term ethyleneoxy (4′-CH₂CH₂—O-2′) LNA is used (Singh et al., Chem. Commun., 1998, 4, 455-456: Morita et al., Bioorganic Medicinal Chemistry, 2003, 11, 2211-2226). Methyleneoxy (4′-CH₂—O-2′) LNA and other bicyclic sugar analogs display very high duplex thermal stabilities with complementary DNA and RNA (Tm=+3 to +10° C.), stability towards 3′-exonucleolytic degradation and good solubility properties. Potent and nontoxic antisense oligonucleotides comprising BNAs have been described (Wahlestedt et al., Proc. Natl. Acad. Sci. U.S.A., 2000, 97, 5633-5638).

[0401] An isomer of methyleneoxy (4′-CH₂—O-2′) LNA that has also been discussed is alpha-L methyleneoxy (4′-CH₂—O-2′) LNA which has been shown to have superior stability against a 3′-exonuclease. The alpha-L-methyleneoxy (4′-CH₂—O-2′) LNA's were incorporated into antisense gapmers and chimeras that showed potent antisense activity (Frieden et al., Nucleic Acids Research, 2003, 21, 6365-6372).

[0402] The synthesis and preparation of the methyleneoxy (4′-CH₂—O-2′) LNA monomers adenine, cytosine, guanine, 5-methyl-cytosine, thymine and uracil, along with their oligomerization, and nucleic acid recognition properties have been described (Koshkin et al., Tetrahedron, 1998, 54, 3607-3630). BNAs and preparation thereof are also described in WO 98/39352 and WO 99/14226.

[0403] Analogs of methyleneoxy (4′-CH₂—O-2′) LNA, phosphorothioate-methyleneoxy (4′-CH₂—O-2′) LNA and 2′-thio-LNAs, have also been prepared (Kumar et al., Bioorg. Med. Chem. Lett., 1998, 8, 2219-2222). Preparation of locked nucleoside analogs comprising oligodeoxyribonucleotide duplexes as substrates for nucleic acid polymerases has also been described Mengel et al., WO 99/14226). Furthermore, synthesis of 2′-amino-LNA, a novel comformationally restricted high-affinity oligonucleotide analog has been described in the art (Singh et al., J. Org. Chem., 1998, 63, 10035-10039). In addition, 2′-Amino- and 2′-methylamino-LNA's have been prepared and the thermal stability of their duplexes with complementary RNA and DNA strands has been previously reported.

[0404] Modified sugar moieties are well known and can be used to alter, typically increase, the affinity of the antisense compound for its target and/or increase nuclease resistance. A representative list of preferred modified sugars includes but is not limited to bicyclic modified sugars, including methyleneoxy (4′-CH₂—O-2′) LNA and ethyleneoxy (4′-(CH₂)₂—O-2′ bridge) ENA; substituted sugars, especially 2′-substituted sugars having a 2′-F, 2′-OCH₃ or a 2′-O(CH₂)₂—OCH₃ substituent group; and 4′-thio modified sugars. Sugars can also be replaced with sugar mimetic groups among others. Methods for the preparations of modified sugars are well known to those skilled in the art. Some representative patents and publications that teach the preparation of such modified sugars include, but are not limited to, U.S. Pat. Nos. 4,981,957; 5,118,800; 5,319,080; 5,359,044; 5,393,878; 5,446,137; 5,466,786; 5,514,785; 5,519,134; 5,567,811; 5,576,427; 5,591,722; 5,597,909; 5,610,300; 5,627,053; 5,639,873; 5,646,265; 5,658,873; 5,670,633; 5,792,747; 5,700,920; 6,531,584; and 6,600,032; and WO 2005/121371.

[0405] Examples of “oxy”-2′ hydroxyl group modifications include alkoxy or aryloxy (OR, e.g., R═H, alkyl, cycloalkyl, aryl, aralkyl, heteroaryl or sugar); polyethyleneglycols (PEG), O(CH₂CH₂O)ₙCH₂CH₂OR, n=1-50; “locked” nucleic acids (LNA) in which the furanose portion of the nucleoside includes a bridge connecting two carbon atoms on the furanose ring, thereby forming a bicyclic ring system; O-AMINE or O—(CH₂)ₙAMINE (n=1-10, AMINE=NH₂; alkylamino, dialkylamino, heterocyclyl, arylamino, diaryl amino, heteroaryl amino, diheteroaryl amino, ethylene diamine or polyamino); and O—CH₂CH₂(NCH₂CH₂NMe₂)₂.

[0406] “Deoxy” modifications include hydrogen (i.e. deoxyribose sugars, which are of particular relevance to the single-strand overhangs); halo (e.g., fluoro); amino (e.g. NH₂; alkylamino, dialkylamino, heterocyclyl, arylamino, diaryl amino, heteroaryl amino, diheteroaryl amino, or amino acid); NH(CH₂CH₂NH)ₙCH₂CH₂-AMINE (AMINE=NH₂; alkylamino, dialkylamino, heterocyclyl, arylamino, diaryl amino, heteroaryl amino, or diheteroaryl amino); NHC(O)R (R=alkyl, cycloalkyl, aryl, aralkyl, heteroaryl or sugar); cyano; mercapto; alkyl-thio-alkyl; thioalkoxy; thioalkyl; alkyl; cycloalkyl; aryl; alkenyl and alkynyl, which can be optionally substituted with e.g., an amino functionality.

[0407] Other suitable 2′-modifications, e.g., modified MOE, are described in U.S. Patent Application Publication No. 20130130378, contents of which are herein incorporated by reference.

[0408] A modification at the 2′ position can be present in the arabinose configuration The term “arabinose configuration” refers to the placement of a substituent on the C2′ of ribose in the same configuration as the 2′-OH is in the arabinose.

[0409] The sugar can comprise two different modifications at the same carbon in the sugar, e.g., gem modification. The sugar group can also contain one or more carbons that possess the opposite stereochemical configuration than that of the corresponding carbon in ribose. Thus, an oligomeric compound can include one or more monomers containing e.g., arabinose, as the sugar. The monomer can have an alpha linkage at the 1′ position on the sugar, e.g., alpha-nucleosides. The monomer can also have the opposite configuration at the 4′-position, e.g., C5′ and H4′ or substituents replacing them are interchanged with each other. When the C5′ and H4′ or substituents replacing them are interchanged with each other, the sugar is said to be modified at the 4′ position.

[0410] DsRNA agent of the inventions disclosed herein can also include abasic sugars, i.e., a sugar which lack a nucleobase at C-1′ or has other chemical groups in place of a nucleobase at C1′. See for example U.S. Pat. No. 5,998,203, content of which is herein incorporated in its entirety. These abasic sugars can also be further containing modifications at one or more of the constituent sugar atoms. DsRNA agent of the inventions can also contain one or more sugars that are the L isomer, e.g. L-nucleosides. Modification to the sugar group can also include replacement of the 4′-0 with a sulfur, optionally substituted nitrogen or CH₂ group. In some embodiments, linkage between C1′ and nucleobase is in a configuration.

[0411] Sugar modifications can also include acyclic nucleotides, wherein a C—C bonds between ribose carbons (e.g., C1′-C2′, C2′-C3′, C3′-C4′, C4′-O4′, C1′-O4′) is absent and/or at least one of ribose carbons or oxygen (e.g., C1′, C2′, C3′, C4′ or O4′) are independently or in combination absent from the nucleotide. In some embodiments, acyclic nucleotide is

[chemical structure]

wherein B is a modified or unmodified nucleobase, R₁ and R₂ independently are H, halogen, OR₃, or alkyl; and R₃ is H, alkyl, cycloalkyl, aryl, aralkyl, heteroaryl or sugar).

[0412] In some embodiments, sugar modifications are selected from the group consisting of 2′-H, 2′-O-Me (2′-O-methyl), 2′-O-MOE (2′-O-methoxyethyl), 2′-F, 2′-O-[2-(methylamino)-2-oxoethyl] (2′-O-NMA), 2′-S methyl, 2′-O—CH₂-(4′-C) (LNA), 2′-O—CH₂CH₂-(4′-C) (ENA), 2′-O-aminopropyl (2′-O-AP), 2′-O-dimethylaminoethyl (2′-O-DMAOE), 2′-O-dimethylaminopropyl (2′-O-DMAP), 2′-O-dimethylaminoethyloxyethyl (2′-O-DMAEOE) and gem 2′-OMe/2′F with 2′-O-Me in the arabinose configuration.

[0413] It is to be understood that when a particular nucleotide is linked through its 2′-position to the next nucleotide, the sugar modifications described herein can be placed at the 3′-position of the sugar for that particular nucleotide, e.g., the nucleotide that is linked through its 2′-position. A modification at the 3′ position can be present in the xylose configuration The term “xylose configuration” refers to the placement of a substituent on the C3′ of ribose in the same configuration as the 3′-OH is in the xylose sugar.

[0414] The hydrogen attached to C4′ and/or C1′ can be replaced by a straight- or branched-optionally substituted alkyl, optionally substituted alkenyl, optionally substituted alkynyl, wherein backbone of the alkyl, alkenyl and alkynyl can contain one or more of O, S, S(O), SO₂, N(R′), C(O), N(R′)C(O)O, OC(O)N(R′), CH(Z′), phosphorous containing linkage, optionally substituted aryl, optionally substituted heteroaryl, optionally substituted heterocyclic or optionally substituted cycloalkyl, where R′ is hydrogen, acyl or optionally substituted aliphatic, Z′ is selected from the group consisting of OR₁₁, COR₁₁, CO₂R₁₁,

[chemical structure]

NR₂₁R₃₁, CONR₂₁R₃₁, CON(H)NR₂₁R₃₁, ONR₂₁R₃₁, CON(H)N═R₄₁R₅₁, N(R₂₁)C(═NR₃₁)NR₂₁R₃₁, N(R₂₁)C(O)NR₂₁R₃₁, N(R₂₁)C(S)NR₂₁R₃₁, OC(O)NR₂₁R₃₁, SC(O)NR₂₁R₃₁, N(R₂₁)C(S)OR₁₁, N(R₂₁)C(O)OR₁₁, N(R₂₁)C(O)SR₁₁, N(R₂₁)N═R₄₁R₅₁, ON═C₄₁R₅₁, SO₂R₁₁, SOR₁₁, SR₁₁, and substituted or unsubstituted heterocyclic; R₂₁ and R₃₁ for each occurrence are independently hydrogen, acyl, unsubstituted or substituted aliphatic, aryl, heteroaryl, heterocyclic, OR₁₁, COR₁₁, CO₂R₁₁, or NR₁₁R₁₁′; or R₂₁ and R₃₁, taken together with the atoms to which they are attached, form a heterocyclic ring; R₄₁ and R₅₁ for each occurrence are independently hydrogen, acyl, unsubstituted or substituted aliphatic, aryl, heteroaryl, heterocyclic, OR₁₁, COR₁₁, or CO₂R₁₁, or NR₁₁R₁₁′; and R₁₁ and R₁₁′ are independently hydrogen, aliphatic, substituted aliphatic, aryl, heteroaryl, or heterocyclic. In some embodiments, the hydrogen attached to the C4′ of the 5′ terminal nucleotide is replaced.

[0415] In some embodiments, C4′ and C5′ together form an optionally substituted heterocyclic, preferably comprising at least one —PX(Y)—, wherein X is H, OH, OM, SH, optionally substituted alkyl, optionally substituted alkoxy, optionally substituted alkylthio, optionally substituted alkylamino or optionally substituted dialkylamino, where M is independently for each occurrence an alki metal or transition metal with an overall charge of +1; and Y is O, S, or NR′, where R′ is hydrogen, optionally substituted aliphatic. Preferably this modification is at the 5 terminal of the iRNA.

[0416] In certain embodiments, LNA's include bicycle nucleotide having the formula:

[chemical structure]

[0417] wherein:
   [0418] Bx is a heterocyclic base moiety;
   [0419] T₁ is H or a hydroxyl protecting group;
   [0420] T₂ is H, a hydroxyl protecting group or a reactive phosphorus group;
   [0421] Z is C₁-C₆ alkyl, C₂-C₆ alkenyl, C₂-C₆ alkynyl, substituted C₁-C₆ alkyl, substituted C₂-C₆ alkenyl, substituted C₂-C₆ alkynyl, acyl, substituted acyl, or substituted amide.

[0422] In some embodiments, each of the substituted groups, is, independently, mono or poly substituted with optionally protected substituent groups independently selected from halogen, oxo, hydroxyl, OJ1, NJ1J2, SJ1, N3, OC(═X)J1, OC(═X)NJ1J2, NJ3C(═X)NJ1J2 and CN, wherein each J1, J2 and J3 is, independently, H or C₁-C₆ alkyl, and X is O, S or NJ1.

[0423] In certain such embodiments, each of the substituted groups, is, independently, mono or poly substituted with substituent groups independently selected from halogen, oxo, hydroxyl, OJ1, NJ1J2, SJ1, N3, OC(═X)J1, and NJ3C(═X)NJ1J2, wherein each J1, J2 and J3 is, independently, H, C₁-C₆ alkyl, or substituted C₁-C₆ alkyl and X is O or NJ1.

[0424] In certain embodiments, the Z group is C₁-C₆ alkyl substituted with one or more Xx, wherein each Xx is independently OJ1, NJ1J2, SJ1, N3, OC(═X)J1, OC(═X)NJ1J2, NJ3C(═X)NJ1J2 or CN; wherein each J1, J2 and J3 is, independently, H or C₁-C₆ alkyl, and X is O, S or NJ1. In another embodiment, the Z group is C₁-C₆ alkyl substituted with one or more Xx, wherein each Xx is independently halo (e.g., fluoro), hydroxyl, alkoxy (e.g., CH₃O—), substituted alkoxy or azido.

[0425] In certain embodiments, the Z group is —CH₂Xx, wherein Xx is OJ1, NJ1J2, SJ1, N3, OC(═X)J1, OC(═X)NJ1J2, NJ3C(═X)NJ1J2 or CN; wherein each J1, J2 and J3 is, independently, H or C₁-C₆ alkyl, and X is O, S or NJ1. In another embodiment, the Z group is —CH₂Xx, wherein Xx is halo (e.g., fluoro), hydroxyl, alkoxy (e.g., CH₃O—) or azido.

[0426] In certain such embodiments, the Z group is in the (R)-configuration:

[chemical structure]

[0427] In certain such embodiments, the Z group is in the (S)-configuration:

[chemical structure]

[0428] In certain embodiments, each T₁ and T₂ is a hydroxyl protecting group. A preferred list of hydroxyl protecting groups includes benzyl, benzoyl, 2,6-dichlorobenzyl, t-butyldimethylsilyl, t-butyldiphenylsilyl, mesylate, tosylate, dimethoxytrityl (DMT), 9-phenylxanthine-9-yl (Pixyl) and 9 (p-methoxyphenyl)xanthine-9-yl (MOX). In certain embodiments, T₁ is a hydroxyl protecting group selected from acetyl, benzyl, t-butyldimethylsilyl, t-butyldiphenylsilyl and dimethoxytrityl wherein a more preferred hydroxyl protecting group is T₁ is 4,4′-dimethoxytrityl.

[0429] In certain embodiments, T₂ is a reactive phosphorus group wherein preferred reactive phosphorus groups include diisopropylcyanoethoxy phosphoramidite and H-phosphonate. In certain embodiments T₁ is 4,4′-dimethoxytrityl and T₂ is diisopropylcyanoethoxy phosphoramidite.

[0430] In certain embodiments, the compounds of the invention comprise at least one monomer of the formula:

[chemical structure]

or of the formula:

[chemical structure]

[0431] wherein

[chemical structure]

[0432] Bx is a heterocyclic base moiety;
[0433] T₃ is H, a hydroxyl protecting group, a linked conjugate group or an internucleoside linking group attached to a nucleoside, a nucleotide, an oligonucleoside, an oligonucleotide, a monomeric subunit or an oligomeric compound;
[0434] T₄ is H, a hydroxyl protecting group, a linked conjugate group or an internucleoside linking group attached to a nucleoside, a nucleotide, an oligonucleoside, an oligonucleotide, a monomeric subunit or an oligomeric compound;
[0435] wherein at least one of T₃ and T₄ is an internucleoside linking group attached to a nucleoside, a nucleotide, an oligonucleoside, an oligonucleotide, a monomeric subunit or an oligomeric compound; and
[0436] Z is C₁-C₆ alkyl, C₂-C₆ alkenyl, C₂-C₆ alkynyl, substituted C₁-C₆ alkyl, substituted C₂-C₆ alkenyl, substituted C₂-C₆ alkynyl, acyl, substituted acyl, or substituted amide.

[0437] In some embodiments, each of the substituted groups, is, independently, mono or poly substituted with optionally protected substituent groups independently selected from halogen, oxo, hydroxyl, OJ1, NJ1J2, SJ1, N3, OC(═X)J1, OC(═X)NJ1J2, NJ3C(═X)NJ1J2 and CN, wherein each J1, J2 and J3 is, independently, H or C1-C6 alkyl, and X is O, S or NJ1.

[0438] In some embodiments, each of the substituted groups, is, independently, mono or poly substituted with substituent groups independently selected from halogen, oxo, hydroxyl, OJ1, NJ1J2, SJ1, N3, OC(═X)J1, and NJ3C(═X)NJ1J2, wherein each J1, J2 and J3 is, independently, H or C₁-C₆ alkyl, and X is O or NJ1.

[0439] In certain such embodiments, at least one Z is C₁-C₆ alkyl or substituted C₁-C₆ alkyl. In certain embodiments, each Z is, independently, C₁-C₆ alkyl or substituted C₁-C₆ alkyl. In certain embodiments, at least one Z is C₁-C₆ alkyl. In certain embodiments, each Z is, independently, C₁-C₆ alkyl. In certain embodiments, at least one Z is methyl. In certain embodiments, each Z is methyl. In certain embodiments, at least one Z is ethyl. In certain embodiments, each Z is ethyl. In certain embodiments, at least one Z is substituted C₁-C₆ alkyl. In certain embodiments, each Z is, independently, substituted C₁-C₆ alkyl. In certain embodiments, at least one Z is substituted methyl. In certain embodiments, each Z is substituted methyl. In certain embodiments, at least one Z is substituted ethyl. In certain embodiments, each Z is substituted ethyl.

[0440] In certain embodiments, at least one substituent group is C₁-C₆ alkoxy (e.g., at least one Z is C₁-C₆ alkyl substituted with one or more C₁-C₆ alkoxy). In another embodiment, each substituent group is, independently, C₁-C₆ alkoxy (e.g., each Z is, independently, C₁-C₆ alkyl substituted with one or more C₁-C₆ alkoxy).

[0441] In certain embodiments, at least one C₁-C₆ alkoxy substituent group is CH₃O— (e.g., at least one Z is CH₃OCH₂—). In another embodiment, each C₁-C₆ alkoxy substituent group is CH₃O— (e.g., each Z is CH₃OCH₂—).

[0442] In certain embodiments, at least one substituent group is halogen (e.g., at least one Z is C₁-C₆ alkyl substituted with one or more halogen). In certain embodiments, each substituent group is, independently, halogen (e.g., each Z is, independently, C₁-C₆ alkyl substituted with one or more halogen). In certain embodiments, at least one halogen substituent group is fluoro (e.g., at least one Z is CH₂FCH₂—, CHF₂CH₂— or CF₃CH₂—). In certain embodiments, each halo substituent group is fluoro (e.g., each Z is, independently, CH₂FCH₂—, CHF₂CH₂— or CF₃CH₂—).

[0443] In certain embodiments, at least one substituent group is hydroxyl (e.g., at least one Z is C1-C6 alkyl substituted with one or more hydroxyl). In certain embodiments, each substituent group is, independently, hydroxyl (e.g., each Z is, independently, C₁-C₆ alkyl substituted with one or more hydroxyl). In certain embodiments, at least one Z is HOCH₂—. In another embodiment, each Z is HOCH₂—.

[0444] In certain embodiments, at least one Z is CH₃—, CH₃CH₂—, CH₂OCH₃—, CH₂F— or HOCH₂—. In certain embodiments, each Z is, independently, CH₃—, CH₃CH₂—, CH₂OCH₃—, CH₂F— or HOCH₂—.

[0445] In certain embodiments, at least one Z group is C₁-C₆ alkyl substituted with one or more Xx, wherein each Xx is, independently, OJ1, NJ1J2, SJ1, N3, OC(═X)J1, OC(═X)NJ1J2, NJ3C(═X)NJ1J2 or CN; wherein each J1, J2 and J3 is, independently, H or C₁-C₆ alkyl, and X is O, S or NJ1. In another embodiment, at least one Z group is C₁-C₆ alkyl substituted with one or more Xx, wherein each Xx is, independently, halo (e.g., fluoro), hydroxyl, alkoxy (e.g., CH₃O—) or azido.

[0446] In certain embodiments, each Z group is, independently, C₁-C₆ alkyl substituted with one or more Xx, wherein each Xx is independently OJ1, NJ1J2, SJ1, N3, OC(═X)J1, OC(═X)NJ1J2, NJ3C(═X)NJ1J2 or CN; wherein each J1, J2 and J3 is, independently, H or C₁-C₆ alkyl, and X is O, S or NJ1. In another embodiment, each Z group is, independently, C₁-C₆ alkyl substituted with one or more Xx, wherein each Xx is independently halo (e.g., fluoro), hydroxyl, alkoxy (e.g., CH₃O—) or azido.

[0447] In certain embodiments, at least one Z group is —CH₂Xx, wherein Xx is OJ1, NJ1J2, SJ1, N3, OC(═X)J1, OC(═X)NJ1J2, NJ3C(═X)NJ1J2 or CN; wherein each J1, J2 and J3 is, independently, H or C₁-C₆ alkyl, and X is O, S or NJ1 In certain embodiments, at least one Z group is —CH₂Xx, wherein Xx is halo (e.g., fluoro), hydroxyl, alkoxy (e.g., CH₃O—) or azido.

[0448] In certain embodiments, each Z group is, independently, —CH₂Xx, wherein each Xx is, independently, OJ1, NJ1J2, SJ1, N3, OC(═X)J1, OC(═X)NJ1J2, NJ3C(═X)NJ1J2 or CN; wherein each J1, J2 and J3 is, independently, H or C₁-C₆ alkyl, and X is O, S or NJ1. In another embodiment, each Z group is, independently, —CH₂Xx, wherein each Xx is, independently, halo (e.g., fluoro), hydroxyl, alkoxy (e.g., CH₃O—) or azido.

[0449] In certain embodiments, at least one Z is CH₃—. In another embodiment, each Z is, CH₃—.

[0450] In certain embodiments, the Z group of at least one monomer is in the (R)-configuration represented by the formula:

[chemical structure]

or the formula:

[chemical structure]

[0451] or the formula:

[chemical structure]

[0452] IN certain embodiments, the Z group of each monomer of the formula is in the (R)-configuration.

[0453] In certain embodiments, the Z group of at least one monomer is in the (S)-configuration represented by the formula:

[chemical structure]

[0454] or the formula:

[chemical structure]

[0455] or the formula:

[chemical structure]

[0456] In certain embodiments, the Z group of each monomer of the formula is in the (S)-configuration.

[0457] In certain embodiments, T₃ is H or a hydroxyl protecting group. In certain embodiments, T₄ is H or a hydroxyl protecting group. In a further embodiment T₃ is an internucleoside linking group attached to a nucleoside, a nucleotide or a monomeric subunit. In certain embodiments, T₄ is an internucleoside linking group attached to a nucleoside, a nucleotide or a monomeric subunit. In certain embodiments, T₃ is an internucleoside linking group attached to an oligonucleoside or an oligonucleotide. In certain embodiments, T₄ is an internucleoside linking group attached to an oligonucleoside or an oligonucleotide. In certain embodiments, T₃ is an internucleoside linking group attached to an oligomeric compound. In certain embodiments, T₄ is an internucleoside linking group attached to an oligomeric compound. In certain embodiments, at least one of T₃ and T₄ comprises an internucleoside linking group selected from phosphodiester or phosphorothioate.

[0458] In certain embodiments, dsRNA agent of the invention comprise at least one region of at least two contiguous monomers of the formula:

[chemical structure]

[0459] or of the formula:

[chemical structure]

[0460] or of the formula:

[chemical structure]

[0461] In certain such embodiments, LNAs include, but are not limited to, (A) α-L-Methyleneoxy (4′-CH₂—O-2′) LNA, (B) β-D-Methyleneoxy (4′-CH₂—O-2′) LNA, (C) Ethyleneoxy (4′-(CH₂)₂—O-2′) LNA, (D) Aminooxy (4′-CH₂—O—N(R)-2′) LNA and (E) Oxyamino (4′-CH₂—N(R)—O-2′) LNA, as depicted below:

[chemical structure]

[0462] In certain embodiments, the dsRNA agent of the invention comprises at least two regions of at least two contiguous monomers of the above formula. In certain embodiments, the dsRNA agent of the invention comprises a gapped motif. In certain embodiments, the dsRNA agent of the invention comprises at least one region of from about 8 to about 14 contiguous β-D-2′-deoxyribofuranosyl nucleosides. In certain embodiments, the dsRNA agent of the invention comprises at least one region of from about 9 to about 12 contiguous β-D-2′-deoxyribofuranosyl nucleosides.

[0463] In certain embodiments, the dsRNA agent of the invention comprises at least one (e.g., 1, 2, 3, 4, 5, 6, 7, 8, 9, 10, 11, 12, 13, 14, 15 or more) comprises at least one (S)-cEt monomer of the formula:

[chemical structure]

[0464] wherein Bx is heterocyclic base moiety.

[0465] In certain embodiments, monomers include sugar mimetics. In certain such embodiments, a mimetic is used in place of the sugar or sugar-internucleoside linkage combination, and the nucleobase is maintained for hybridization to a selected target. Representative examples of a sugar mimetics include, but are not limited to, cyclohexenyl or morpholino. Representative examples of a mimetic for a sugar-internucleoside linkage combination include, but are not limited to, peptide nucleic acids (PNA) and morpholino groups linked by uncharged achiral linkages. In some instances a mimetic is used in place of the nucleobase. Representative nucleobase mimetics are well known in the art and include, but are not limited to, tricyclic phenoxazine analogs and universal bases (Berger et al., Nuc Acid Res. 2000, 28:2911-14, incorporated herein by reference). Methods of synthesis of sugar, nucleoside and nucleobase mimetics are well known to those skilled in the art.

### C. Intersugar Linkage Modifications

[0466] Described herein are linking groups that link monomers (including, but not limited to, modified and unmodified nucleosides and nucleotides) together, thereby forming an oligomeric compound, e.g., an oligonucleotide. Such linking groups are also referred to as intersugar linkage. The two main classes of linking groups are defined by the presence or absence of a phosphorus atom. Representative phosphorus containing linkages include, but are not limited to, phosphodiesters (P═O), phosphotriesters, methylphosphonates, phosphoramidate, and phosphorothioates (P═S). Representative non-phosphorus containing linking groups include, but are not limited to, methylenemethylimino (—CH₂—N(CH₃)—O—CH2-), thiodiester (—O—C(O)—S—), thionocarbamate (—O—C(O)(NH)—S—); siloxane (—O—Si(H)₂—O—); and N,N′-dimethylhydrazine (—CH₂—N(CH₃)—N(CH₃)—). Modified linkages, compared to natural phosphodiester linkages, can be used to alter, typically increase, nuclease resistance of the oligonucleotides. In certain embodiments, linkages having a chiral atom can be prepared as racemic mixtures, as separate enantiomers. Representative chiral linkages include, but are not limited to, alkylphosphonates and phosphorothioates. Methods of preparation of phosphorous-containing and non-phosphorous-containing linkages are well known to those skilled in the art.

[0467] The phosphate group in the linking group can be modified by replacing one of the oxygens with a different substituent. One result of this modification can be increased resistance of the oligonucleotide to nucleolytic breakdown. Examples of modified phosphate groups include phosphorothioate, phosphoroselenates, borano phosphates, borano phosphate esters, hydrogen phosphonates, phosphoroamidates, alkyl or aryl phosphonates and phosphotriesters. In some embodiments, one of the non-bridging phosphate oxygen atoms in the linkage can be replaced by any of the following: S, Se, BR₃ (R is hydrogen, alkyl, aryl), C (i.e. an alkyl group, an aryl group, etc. . . . ), H, NR₂ (R is hydrogen, optionally substituted alkyl, aryl), or OR (R is optionally substituted alkyl or aryl). The phosphorous atom in an unmodified phosphate group is achiral. However, replacement of one of the non-bridging oxygens with one of the above atoms or groups of atoms renders the phosphorous atom chiral; in other words a phosphorous atom in a phosphate group modified in this way is a stereogenic center. The stereogenic phosphorous atom can possess either the “R” configuration (herein Rp) or the “S” configuration (herein Sp).

[0468] Phosphorodithioates have both non-bridging oxygens replaced by sulfur. The phosphorus center in the phosphorodithioates is achiral which precludes the formation of oligonucleotides diastereomers. Thus, while not wishing to be bound by theory, modifications to both non-bridging oxygens, which eliminate the chiral center, e.g. phosphorodithioate formation, can be desirable in that they cannot produce diastereomer mixtures. Thus, the non-bridging oxygens can be independently any one of O, S, Se, B, C, H, N, or OR (R is alkyl or aryl).

[0469] The phosphate linker can also be modified by replacement of bridging oxygen, (i.e. oxygen that links the phosphate to the sugar of the monomer), with nitrogen (bridged phosphoroamidates), sulfur (bridged phosphorothioates) and carbon (bridged methylenephosphonates). The replacement can occur at the either one of the linking oxygens or at both linking oxygens. When the bridging oxygen is the 3′-oxygen of a nucleoside, replacement with carbon is preferred. When the bridging oxygen is the 5′-oxygen of a nucleoside, replacement with nitrogen is preferred.

[0470] Modified phosphate linkages where at least one of the oxygen linked to the phosphate has been replaced or the phosphate group has been replaced by a non-phosphorous group, are also referred to as “iron-phosphodiester intersugar linkage” or “non-phosphodiester linker.”

[0471] In certain embodiments, the phosphate group can be replaced by non-phosphorus containing connectors, e.g. dephospho linkers. Dephospho linkers are also referred to as non-phosphodiester linkers herein. While not wishing to be bound by theory, it is believed that since the charged phosphodiester group is the reaction center in nucleolytic degradation, its replacement with neutral structural mimics should impart enhanced nuclease stability. Again, while not wishing to be bound by theory, it can be desirable, in some embodiment, to introduce alterations in which the charged phosphate group is replaced by a neutral moiety.

[0472] Examples of moieties which can replace the phosphate group include, but are not limited to, amides (for example amide-3 (3′-CH₂—C(O)—N(H)-5′) and amide-4 (3′-CH₂—N(H)—C(O)-5′)), hydroxylamino, siloxane (dialkylsiloxxane), carboxamide, carbonate, carboxymethyl, carbamate, carboxylate ester, thioether, ethylene oxide linker, sulfide, sulfonate, sulfonamide, sulfonate ester, thioformacetal (3′-S—CH₂—O-5′), formacetal (3′-O—CH₂—O-5), oxime, methyleneimino, methykenecarbonylamino, methylenemethylimino (MMI, 3′-CH₂—N(CH₃)—O-5′), methylenehydrazo, methylenedimethylhydrazo, methyleneoxymethylimino, ethers (C3′-O—C5′), thioethers (C3′-S—C5′), thioacetamido (C3′ N(H)—C(═O)—CH₂—S—C5′, C3′-O—P(O)—O—SS—C5′, C3′-CH₂—NH—NH—C5′, 3′-NHP(O)(OCH₃)—O-5′ and 3′-NHP(O)(OCH₃)—O-5′ and nonionic linkages containing mixed N, O, S and CH₂ component parts. See for example, Carbohydrate Modifications in Antisense Research; Y. S. Sanghvi and P. D. Cook Eds. ACS Symposium Series 580; Chapters 3 and 4, (pp. 40-65). Preferred embodiments include methylenemethylimino (MMI), methylenecarbonylamino, amides, carbamate and ethylene oxide linker.

[0473] One skilled in the art is well aware that in certain instances replacement of a non-bridging oxygen can lead to enhanced cleavage of the intersugar linkage by the neighboring 2′-OH, thus in many instances, a modification of a non-bridging oxygen can necessitate modification of 2′-OH, e.g., a modification that does not participate in cleavage of the neighboring intersugar linkage, e.g., arabinose sugar, 2′-O-alkyl, 2′-F, LNA and ENA.

[0474] Preferred non-phosphodiester intersugar linkages include phosphorothioates, phosphorothioates with an at least 1%, 5%, 10%, 20%, 30%, 40%, 50%, 60%, 70%, 80%, 90% 95% or more enantiomeric excess of Sp isomer, phosphorothioates with an at least 1%, 5%, 10%, 20%, 30%, 40%, 50%, 60%, 70%, 80%, 90% 95% or more enantiomeric excess of Rp isomer, phosphorodithioates, phsophotriesters, aminoalkylphosphotrioesters, alkyl-phosphonaters (e.g., methyl-phosphonate), selenophosphates, phosphoramidates (e.g., N-alkylphosphoramidate), and boranophosphonates.

[0475] In some embodiments, the dsRNA agent of the invention comprises at least one (e.g., 1, 2, 3, 4, 5, 6, 7, 8, 9, 10, 11, 12, 13, 14, 15 or more and upto including all) modified or nonphosphodiester linkages. In some embodiments, the dsRNA agent of the invention comprises at least one (e.g., 1, 2, 3, 4, 5, 6, 7, 8, 9, 10, 11, 12, 13, 14, 15 or more and upto including all) phosphorothioate linkages.

[0476] The dsRNA agent of the inventions can also be constructed wherein the phosphate linker and the sugar are replaced by nuclease resistant nucleoside or nucleotide surrogates. While not wishing to be bound by theory, it is believed that the absence of a repetitively charged backbone diminishes binding to proteins that recognize polyanions (e.g. nucleases). Again, while not wishing to be bound by theory, it can be desirable in some embodiment, to introduce alterations in which the bases are tethered by a neutral surrogate backbone. Examples include the morpholino, cyclobutyl, pyrrolidine, peptide nucleic acid (PNA), aminoethylglycyl PNA (aegPNA) and backnone-extended pyrrolidine PNA (bepPNA) nucleoside surrogates. A preferred surrogate is a PNA surrogate.

[0477] The dsRNA agent of the inventions described herein can contain one or more asymmetric centers and thus give rise to enantiomers, diastereomers, and other stereoisomeric configurations that may be defined, in terms of absolute stereochemistry, as (R) or (S), such as for sugar anomers, or as (D) or (L) such as for amino acids et al. Included in the dsRNA agent of the inventions provided herein are all such possible isomers, as well as their racemic and optically pure forms.

### D. Terminal Modifications

[0478] In some embodiments, the dsRNA agent further comprises a phosphate or phosphate mimic at the 5′-end of the antisense strand. In one embodiment, the phosphate mimic is a 5′-vinyl phosphonate (VP).

[0479] In some embodiments, the 5′-end of the antisense strand of the dsRNA agent does not contain a 5′-vinyl phosphonate (VP).

[0480] Ends of the iRNA agent of the invention can be modified. Such modifications can be at one end or both ends. For example, the 3′ and/or 5′ ends of an iRNA can be conjugated to other functional molecular entities such as labeling moieties, e.g., fluorophores (e.g., pyrene, TAMRA, fluorescein, Cy3 or Cy5 dyes) or protecting groups (based e.g., on sulfur, silicon, boron or ester). The functional molecular entities can be attached to the sugar through a phosphate group and/or a linker. The terminal atom of the linker can connect to or replace the linking atom of the phosphate group or the C-3′ or C-5′ O, N, S or C group of the sugar. Alternatively, the linker can connect to or replace the terminal atom of a nucleotide surrogate (e.g., PNAs).

[0481] When a linker/phosphate-functional molecular entity-linker/phosphate array is interposed between two strands of a double stranded oligomeric compound, this array can substitute for a hairpin loop in a hairpin-type oligomeric compound.

[0482] Terminal modifications useful for modulating activity include modification of the 5′ end of iRNAs with phosphate or phosphate analogs. In certain embodiments, the 5′end of an iRNA is phosphorylated or includes a phosphoryl analog. Exemplary 5′-phosphate modifications include those which are compatible with RISC mediated gene silencing. Modifications at the 5′-terminal end can also be useful in stimulating or inhibiting the immune system of a subject. In some embodiments, the 5′-end of the oligomeric compound comprises the modification

[chemical structure]

wherein W, X and Y are each independently selected from the group consisting of 0, OR (R is hydrogen, alkyl, aryl), S, Se, BR₃ (R is hydrogen, alkyl, aryl), BH₃⁻, C (i.e. an alkyl group, an aryl group, etc. . . . ), H, NR₂ (R is hydrogen, alkyl, aryl), or OR (R is hydrogen, alkyl or aryl); A and Z are each independently for each occurrence absent, O, S, CH₂, NR (R is hydrogen, alkyl, aryl), or optionally substituted alkylene, wherein backbone of the alkylene can comprise one or more of O, S, SS and NR (R is hydrogen, alkyl, aryl) internally and/or at the end; and n is 0-2. In some embodiments, n is 1 or 2. It is understood that A is replacing the oxygen linked to 5′ carbon of sugar. When n is 0, W and Y together with the P to which they are attached can form an optionally substituted 5-8 membered heterocyclic, wherein W an Y are each independently O, S, NR′ or alkylene. Preferably the heterocyclic is substituted with an aryl or heteroaryl. In some embodiments, one or both hydrogen on C5′ of the 5′-terminal nucleotides are replaced with a halogen, e.g., F.

[0483] Exemplary 5′-modifications include, but are not limited to, 5′-monophosphate ((HO)₂(O)P—O-5′); 5′-diphosphate ((HO)₂(O)P—O—P(HO)(O)—O-5′); 5′-triphosphate ((HO)₂(O)P—O—(HO)(O)P—O—P(HO)(O)—O-5′); 5′-monothiophosphate (phosphorothioate; (HO)₂(S)P—O-5′); 5′-monodithiophosphate (phosphorodithioate; (HO)(HS)(S)P—O-5′), 5′-phosphorothiolate ((HO)₂(O)P—S-5′); 5′-alpha-thiotriphosphate; 5′-beta-thiotriphosphate; 5′-gamma-thiotriphosphate; 5′-phosphoramidates ((HO)₂(O)P—NH-5′, (HO)(NH₂)(O)P—O-5′). Other 5′-modification include 5′-alkylphosphonates (R(OH)(O)P—O-5′, R=alkyl, e.g., methyl, ethyl, isopropyl, propyl, etc. . . . ), 5′-alkyletherphosphonates (R(OH)(O)P—O-5′, R=alkylether, e.g., methoxymethyl (CH₂OMe), ethoxymethyl, etc. . . . ). Other exemplary 5′-modifications include where Z is optionally substituted alkyl at least once, e.g., ((HO)₂(X)P—O[—(CH₂)ₙ—O—P(X)(OH)—O]_{b}-5′, ((HO)₂(X)P—O[—(CH₂)ₙ—P(X)(OH)—O]_{b}-5′, ((HO)2(X)P—[—(CH₂)ₙ—O—P(X)(OH)—O]_{b}-5′; dialkyl terminal phosphates and phosphate mimics: HO[—(CH₂)ₙ—O—P(X)(OH)—O]_{b}-5′, H₂N[—(CH₂)ₙ—O—P(X)(OH)—O]_{b}-5′, H[—(CH₂)ₙ—O—P(X)(OH)—O]_{b}-5′, Me₂N[—(CH₂), —O—P(X)(OH)—O]_{b}-5′, HO[—(CH₂)ₙ—P(X)(OH)—O]_{b}-5′, H₂N[—(CH₂)ₙ—P(X)(OH)—O]_{b}-5′, H[—(CH₂), —P(X)(OH)—O]_{b}-5′, Me₂N[—(CH₂)ₙ—P(X)(OH)—O]_{b}-5′, wherein a and b are each independently 1-10. Other embodiments, include replacement of oxygen and/or sulfur with BH₃, BH₃⁻ and/or Se.

[0484] Terminal modifications can also be useful for monitoring distribution, and in such cases the preferred groups to be added include fluorophores, e.g., fluorescein or an Alexa dye, e.g., Alexa 488. Terminal modifications can also be useful for enhancing uptake, useful modifications for this include targeting ligands. Terminal modifications can also be useful for cross-linking an oligonucleotide to another moiety; modifications useful for this include mitomycin C, psoralen, and derivatives thereof.

### E. Thermally Destabilizing Modifications

[0485] The compounds of the invention, such as iRNAs or dsRNA agents, can be optimized for RNA interference by increasing the propensity of the iRNA duplex to disassociate or melt (decreasing the free energy of duplex association) by introducing a thermally destabilizing modification in the sense strand at a site opposite to the seed region of the antisense strand (i.e., at positions 2-8 of the 5′-end of the antisense strand, or at positions 2-9 of the 5′-end of the antisense strand). This modification can increase the propensity of the duplex to disassociate or melt in the seed region of the antisense strand.

[0486] The thermally destabilizing modifications can include abasic modification; mismatch with the opposing nucleotide in the opposing strand; and sugar modification such as 2′-deoxy modification or acyclic nucleotide, e.g., unlocked nucleic acids (UNA) or glycerol nucleic acid (GNA).

[0487] Exemplified abasic modifications are:

[chemical structure]

[0488] Exemplified sugar modifications are:

[chemical structure]

[0489] The term “acyclic nucleotide” refers to any nucleotide having an acyclic ribose sugar, for example, where any of bonds between the ribose carbons (e.g., C1′-C2′, C2′-C3′, C3′-C4′, C4′-O4′, or C1′-O4′) is absent and/or at least one of ribose carbons or oxygen (e.g., C1′, C2′, C3′, C4′ or O4′) are independently or in combination absent from the nucleotide. In some embodiments, acyclic nucleotide is

[chemical structure]

wherein B is a modified or unmodified nucleobase, R¹ and R² independently are H, halogen, OR₃, or alkyl; and R₃ is H, alkyl, cycloalkyl, aryl, aralkyl, heteroaryl or sugar). The term “UNA” refers to unlocked acyclic nucleic acid, wherein any of the bonds of the sugar has been removed, forming an unlocked “sugar” residue. In one example, UNA also encompasses monomers with bonds between C1′-C4′ being removed (i.e. the covalent carbon-oxygen-carbon bond between the C1′ and C4′ carbons). In another example, the C2′-C3′ bond (i.e. the covalent carbon-carbon bond between the C2′ and C3′ carbons) of the sugar is removed (see Mikhailov et. al., Tetrahedron Letters, 26 (17): 2059 (1985); and Fluiter et al., Mol. Biosyst., 10: 1039 (2009), which are hereby incorporated by reference in their entirety). The acyclic derivative provides greater backbone flexibility without affecting the Watson-Crick pairings. The acyclic nucleotide can be linked via 2′-5′ or 3′-5′ linkage.

[0490] The term ‘GNA’ refers to glycol nucleic acid which is a polymer similar to DNA or RNA but differing in the composition of its “backbone” in that is composed of repeating glycerol units linked by phosphodiester bonds:

[chemical structure]

[0491] The thermally destabilizing modification can be mismatches (i.e., noncomplementary base pairs) between the thermally destabilizing nucleotide and the opposing nucleotide in the opposite strand within the dsRNA duplex. Exemplary mismatch basepairs include G:G, G:A, G:U, G:T, A:A, A:C, C:C, C:U, C:T, U:U, T:T, U:T, or a combination thereof. Other mismatch base pairings known in the art are also amenable to the present invention. A mismatch can occur between nucleotides that are either naturally occurring nucleotides or modified nucleotides, i.e., the mismatch base pairing can occur between the nucleobases from respective nucleotides independent of the modifications on the ribose sugars of the nucleotides. In certain embodiments, the compounds of the invention, such as siRNA or iRNA agent, contains at least one nucleobase in the mismatch pairing that is a 2′-deoxy nucleobase; e.g., the 2′-deoxy nucleobase is in the sense strand.

[0492] More examples of abasic nucleotide, acyclic nucleotide modifications (including UNA and GNA), and mismatch modifications have been described in detail in WO 2011/133876, which is herein incorporated by reference in its entirety.

[0493] The thermally destabilizing modifications may also include universal base with reduced or abolished capability to form hydrogen bonds with the opposing bases, and phosphate modifications.

[0494] Nucleobase modifications with impaired or completely abolished capability to form hydrogen bonds with bases in the opposite strand have been evaluated for destabilization of the central region of the dsRNA duplex as described in WO 2010/0011895, which is herein incorporated by reference in its entirety. Exemplary nucleobase modifications are:

[chemical structure]

[0495] Exemplary phosphate modifications known to decrease the thermal stability of dsRNA duplexes compared to natural phosphodiester linkages are:

[chemical structure]

[0496] In some embodiments, compounds of the invention can comprise 2′-5′ linkages (with 2′-H, 2′-OH and 2′-OMe and with P═O or P═S). For example, the 2′-5′ linkages modifications can be used to promote nuclease resistance or to inhibit binding of the sense to the antisense strand, or can be used at the 5′ end of the sense strand to avoid sense strand activation by RISC.

[0497] In another embodiment, compounds of the invention can comprise L sugars (e.g., L ribose, L-arabinose with 2′-H, 2′-OH and 2′-OMe). For example, these L sugar modifications can be used to promote nuclease resistance or to inhibit binding of the sense to the antisense strand, or can be used at the 5′ end of the sense strand to avoid sense strand activation by RISC.

[0498] In one embodiment the iRNA agent of the invention is conjugated to a ligand via a carrier, wherein the carrier can be cyclic group or acyclic group; preferably, the cyclic group is selected from pyrrolidinyl, pyrazolinyl, pyrazolidinyl, imidazolinyl, imidazolidinyl, piperidinyl, piperazinyl, [1,3]dioxolane, oxazolidinyl, isoxazolidinyl, morpholinyl, thiazolidinyl, isothiazolidinyl, quinoxalinyl, pyridazinonyl, tetrahydrofuryl and decalin; preferably, the acyclic group is selected from serinol backbone or diethanolamine backbone.

[0499] In some embodiments, at least one strand of the iRNA agent of the invention disclosed herein is 5′ phosphorylated or includes a phosphoryl analog at the 5′ prime terminus. 5′-phosphate modifications include those which are compatible with RISC mediated gene silencing. Suitable modifications include: 5′-monophosphate ((HO)₂(O)P—O-5′); 5′-diphosphate ((HO)₂(O)P—O—P(HO)(O)—O-5′); 5′-triphosphate ((HO)₂(O)P—O—(HO)(O)P—O—P(HO)(O)—O-5′); 5′-guanosine cap (7 methylated or non-methylated) (7m-G-O-5′-(HO)(O)P—O—(HO)(O)P—O—P(HO)(O)—O-5′); 5′-adenosine cap (Appp), and any modified or unmodified nucleotide cap structure (N—O-5′-(HO)(O)P—O—(HO)(O)P—O—P(HO)(O)—O-5′); 5′-monothiophosphate (phosphorothioate; (HO)₂(S)P—O-5′); 5′-monodithiophosphate (phosphorodithioate; (HO)(HS)(S)P—O-5′), 5′-phosphorothiolate ((HO)₂(O)P—S-5′); any additional combination of oxygen/sulfur replaced monophosphate, diphosphate and triphosphates (e.g. 5′-alpha-thiotriphosphate, 5′-gamma-thiotriphosphate, etc.), 5′-phosphoramidates ((HO)₂(O)P—NH-5′, (HO)(NH₂)(O)P—O-5′), 5′-alkylphosphonates (R=alkyl=methyl, ethyl, isopropyl, propyl, etc., e.g. RP(OH)(O)—O-5′-, 5′-alkenylphosphonates (i.e. vinyl, substituted vinyl), (OH)₂(O)P-5′-CH₂—), 5′-alkyletherphosphonates (R=alkylether=nethoxymethyl (MeOCH₂—), ethoxymethyl, etc., e.g. RP(OH)(O)—O-5′-).

### IV. Modified RNAi Agents of the Invention Comprising Motifs

[0500] In certain aspects of the disclosure, the double-stranded RNAi agents of the disclosure include agents with chemical modifications as disclosed, for example, in U.S. Pat. Nos. 9,796,974 and 10,668,170, and U.S. Patent Publication Nos. 2014/288158, 2018/008724, 2019/038768, and 2020/353097, the entire contents of each of which are incorporated herein by reference. As shown therein and in PCT Publication No. WO 2013/074974 (the entire contents of which are incorporated by reference), one or more motifs of three identical modifications on three consecutive nucleotides may be introduced into a sense strand or antisense strand of an RNAi agent, particularly at or near the cleavage site. In some embodiments, the sense strand and antisense strand of the RNAi agent may otherwise be completely modified. The introduction of these motifs interrupts the modification pattern, if present, of the sense or antisense strand. The RNAi agent may be optionally modified with a (5)-glycol nucleic acid (GNA) modification, for instance on one or more residues of the antisense strand.

[0501] In one embodiment, the iRNA agent of the invention is a double ended bluntmer of 19 nt in length, wherein the sense strand contains at least one motif of three 2′-F modifications on three consecutive nucleotides at positions 7, 8, 9 from the 5′end. The antisense strand contains at least one motif of three 2′-O-methyl modifications on three consecutive nucleotides at positions 11, 12, 13 from the 5′end.

[0502] In one embodiment, the iRNA agent of the invention is a double ended bluntmer of 20 nt in length, wherein the sense strand contains at least one motif of three 2′-F modifications on three consecutive nucleotides at positions 8, 9, 10 from the 5′end. The antisense strand contains at least one motif of three 2′-O-methyl modifications on three consecutive nucleotides at positions 11, 12, 13 from the 5′end.

[0503] In one embodiment, the iRNA agent of the invention is a double ended bluntmer of 21 nt in length, wherein the sense strand contains at least one motif of three 2′-F modifications on three consecutive nucleotides at positions 9, 10, 11 from the 5′end. The antisense strand contains at least one motif of three 2′-O-methyl modifications on three consecutive nucleotides at positions 11, 12, 13 from the 5′end.

[0504] In one embodiment, the iRNA agent of the invention comprises a 21 nucleotides (nt) sense strand and a 23 nucleotides (nt) antisense, wherein the sense strand contains at least one motif of three 2′-F modifications on three consecutive nucleotides at positions 9, 10, 11 from the 5′end; the antisense strand contains at least one motif of three 2′-O-methyl modifications on three consecutive nucleotides at positions 11, 12, 13 from the 5′end, wherein one end of the iRNA is blunt, while the other end is comprises a 2 nt overhang. Preferably, the 2 nt overhang is at the 3′-end of the antisense. Optionally, the iRNA agent further comprises a ligand (e.g., GalNAc₃).

[0505] In one embodiment, the iRNA agent of the invention comprises a sense and antisense strands, wherein: the sense strand is 25-30 nucleotide residues in length, wherein starting from the 5′ terminal nucleotide (position 1) positions 1 to 23 of said first strand comprise at least 8 ribonucleotides; antisense strand is 36-66 nucleotide residues in length and, starting from the 3′ terminal nucleotide, comprises at least 8 ribonucleotides in the positions paired with positions 1-23 of sense strand to form a duplex; wherein at least the 3′ terminal nucleotide of antisense strand is unpaired with sense strand, and up to 6 consecutive 3′ terminal nucleotides are unpaired with sense strand, thereby forming a 3′ single stranded overhang of 1-6 nucleotides; wherein the 5′ terminus of antisense strand comprises from 10-30 consecutive nucleotides which are unpaired with sense strand, thereby forming a 10-30 nucleotide single stranded 5′ overhang; wherein at least the sense strand 5′ terminal and 3′ terminal nucleotides are base paired with nucleotides of antisense strand when sense and antisense strands are aligned for maximum complementarity, thereby forming a substantially duplexed region between sense and antisense strands; and antisense strand is sufficiently complementary to a target RNA along at least 19 ribonucleotides of antisense strand length to reduce target gene expression when said double stranded nucleic acid is introduced into a mammalian cell; and wherein the sense strand contains at least one motif of three 2′-F modifications on three consecutive nucleotides, where at least one of the motifs occurs at or near the cleavage site. The antisense strand contains at least one motif of three 2′-O-methyl modifications on three consecutive nucleotides at or near the cleavage site.

[0506] In one embodiment, the iRNA agent of the invention comprises a sense and antisense strands, wherein said iRNA agent comprises a first strand having a length which is at least 25 and at most 29 nucleotides and a second strand having a length which is at most 30 nucleotides with at least one motif of three 2′-O-methyl modifications on three consecutive nucleotides at position 11, 12, 13 from the 5′ end; wherein said 3′ end of said first strand and said 5′ end of said second strand form a blunt end and said second strand is 1-4 nucleotides longer at its 3′ end than the first strand, wherein the duplex region which is at least 25 nucleotides in length, and said second strand is sufficiently complementary to a target mRNA along at least 19 nt of said second strand length to reduce target gene expression when said iRNA agent is introduced into a mammalian cell, and wherein dicer cleavage of said iRNA preferentially results in an siRNA comprising said 3′ end of said second strand, thereby reducing expression of the target gene in the mammal. Optionally, the iRNA agent further comprises a ligand (e.g., GalNAc₃).

[0507] In one embodiment, the sense strand of the iRNA agent contains at least one motif of three identical modifications on three consecutive nucleotides, where one of the motifs occurs at the cleavage site in the sense strand. For instance, the sense strand can contain at least one motif of three 2′-F modifications on three consecutive nucleotides within 7-15 positions from the 5′end.

[0508] In one embodiment, the antisense strand of the iRNA agent can also contain at least one motif of three identical modifications on three consecutive nucleotides, where one of the motifs occurs at or near the cleavage site in the antisense strand. For instance, the antisense strand can contain at least one motif of three 2′-O-methyl modifications on three consecutive nucleotides within 9-15 positions from the 5′end.

[0509] For iRNA agent having a duplex region of 17-23 nt in length, the cleavage site of the antisense strand is typically around the 10, 11 and 12 positions from the 5′-end. Thus the motifs of three identical modifications may occur at the 9, 10, 11 positions; 10, 11, 12 positions; 11, 12, 13 positions; 12, 13, 14 positions; or 13, 14, 15 positions of the antisense strand, the count starting from the 1^{st} nucleotide from the 5′-end of the antisense strand, or, the count starting from the 1^{st} paired nucleotide within the duplex region from the 5′-end of the antisense strand. The cleavage site in the antisense strand may also change according to the length of the duplex region of the iRNA from the 5′-end.

[0510] In some embodiments, the iRNA agent comprises a sense strand and antisense strand each having 14 to 30 nucleotides, wherein the sense strand contains at least two motifs of three identical modifications on three consecutive nucleotides, where at least one of the motifs occurs at or near the cleavage site within the strand and at least one of the motifs occurs at another portion of the strand that is separated from the motif at the cleavage site by at least one nucleotide. In one embodiment, the antisense strand also contains at least one motif of three identical modifications on three consecutive nucleotides, where at least one of the motifs occurs at or near the cleavage site within the strand. The modification in the motif occurring at or near the cleavage site in the sense strand is different than the modification in the motif occurring at or near the cleavage site in the antisense strand.

[0511] In some embodiments, the iRNA agent comprises a sense strand and antisense strand each having 14 to 30 nucleotides, wherein the sense strand contains at least one motif of three 2′-F modifications on three consecutive nucleotides, where at least one of the motifs occurs at or near the cleavage site in the strand. In one embodiment, the antisense strand also contains at least one motif of three 2′-O-methyl modifications on three consecutive nucleotides at or near the cleavage site.

[0512] In some embodiments, the iRNA agent comprises a sense strand and antisense strand each having 14 to 30 nucleotides, wherein the sense strand contains at least one motif of three 2′-F modifications on three consecutive nucleotides at positions 9, 10, 11 from the 5′end, and wherein the antisense strand contains at least one motif of three 2′-O-methyl modifications on three consecutive nucleotides at positions 11, 12, 13 from the 5′end.

[0513] In one embodiment, the iRNA agent of the invention comprises mismatch(es) with the target, within the duplex, or combinations thereof. The mismatch can occur in the overhang region or the duplex region. The base pair can be ranked on the basis of their propensity to promote dissociation or melting (e.g., on the free energy of association or dissociation of a particular pairing, the simplest approach is to examine the pairs on an individual pair basis, though next neighbor or similar analysis can also be used). In terms of promoting dissociation: A:U is preferred over G:C; G:U is preferred over G:C; and I:C is preferred over G:C (I=inosine). Mismatches, e.g., non-canonical or other than canonical pairings (as described elsewhere herein) are preferred over canonical (A:T, A:U, G:C) pairings; and pairings which include a universal base are preferred over canonical pairings.

[0514] In one embodiment, the iRNA agent of the invention comprises at least one of the first 1, 2, 3, 4, or 5 base pairs within the duplex regions from the 5′-end of the antisense strand can be chosen independently from the group of: A:U, G:U, I:C, and mismatched pairs, e.g., non-canonical or other than canonical pairings or pairings which include a universal base, to promote the dissociation of the antisense strand at the 5′-end of the duplex.

[0515] In one embodiment, the nucleotide at the 1 position within the duplex region from the 5′-end in the antisense strand is selected from the group consisting of A, dA, dU, U, and dT. Alternatively, at least one of the first 1, 2 or 3 base pair within the duplex region from the 5′-end of the antisense strand is an AU base pair. For example, the first base pair within the duplex region from the 5′-end of the antisense strand is an AU base pair.

[0516] In another embodiment, the nucleotide at the 3′-end of the sense strand is deoxythimidine (dT). In another embodiment, the nucleotide at the 3′-end of the antisense strand is deoxythimidine (dT). In one embodiment, there is a short sequence of deoxythimidine nucleotides, for example, two dT nucleotides on the 3′-end of the sense or antisense strand.

[0517] In certain embodiments, the compositions and methods of the disclosure include a vinyl phosphonate (VP) modification of an RNAi agent as described herein. In exemplary embodiments, a 5′-vinyl phosphonate modified nucleotide of the disclosure has the structure:

[chemical structure]

[0518] wherein X is O or S;
[0519] R is hydrogen, hydroxy, fluoro, or C₁₋₂₀alkoxy (e.g., methoxy or n-hexadecyloxy);
[0520] R^{5′} is (H)—P(O)(OH)₂ and the double bond between the C5′ carbon and R^{5′} is in the E or Z orientation (e.g., E orientation); and
[0521] B is a nucleobase or a modified nucleobase, optionally where B is adenine, guanine, cytosine, thymine, or uracil.

[0522] A vinyl phosphonate of the instant disclosure may be attached to either the antisense or the sense strand of a dsRNA of the disclosure. In certain embodiments, a vinyl phosphonate of the instant disclosure is attached to the antisense strand of a dsRNA, optionally at the 5′ end of the antisense strand of the dsRNA.

[0523] Vinyl phosphate modifications are also contemplated for the compositions and methods of the instant disclosure. An exemplary vinyl phosphate structure includes the preceding structure, where R5′ is (H)—OP(O)(OH)₂ and the double bond between the C5′ carbon and R5′ is in the E or Z orientation (e.g., E orientation).

[0524] In one aspect, the invention relates to a double-stranded RNA (dsRNA) agent for inhibiting the expression of a target gene having reduced off-target effects as described in U.S. Pat. Nos. 10,233,448, 10,612,024, and 10,612,027, and U.S. Patent Publication Nos. 2017/275626, 2019/241891, 2019/241893, and 2021/017519, the entire contents of each of which are incorporated herein by reference. As exemplified therein, a motif comprising, e.g., a thermally destabilizing nucleotide, e.g., i) a nucleotide that forms a mismatch pair with the opposing nucleotide in the antisense strand, ii) a nucleotide having an abasic modification, and/or iii) a nucleotide having a sugar modification, and placed at a site opposite to the seed region (positions 2-8) may be introduced into the sense strand.

[0525] In one embodiment, the dsRNA agent of the invention does not contain any 2′-F modification.

[0526] In one embodiment, the sense strand and/or antisense strand of the dsRNA agent comprises one or more blocks of phosphorothioate or methylphosphonate internucleotide linkages. In one example, the sense strand comprises one block of two phosphorothioate or methylphosphonate internucleotide linkages. In one example, the antisense strand comprises two blocks of two phosphorothioate or methylphosphonate internucleotide linkages. For example, the two blocks of phosphorothioate or methylphosphonate internucleotide linkages are separated by 16-18 phosphate internucleotide linkages.

[0527] In one embodiment, each of the sense and antisense strands of the dsRNA agent has 15-30 nucleotides. In one example, the sense strand has 19-22 nucleotides, and the antisense strand has 19-25 nucleotides. In another example, the sense strand has 21 nucleotides, and the antisense strand has 23 nucleotides.

[0528] In one embodiment, the nucleotide at position 1 of the 5′-end of the antisense strand in the duplex is selected from the group consisting of A, dA, dU, U, and dT. In one embodiment, at least one of the first, second, and third base pair from the 5′-end of the antisense strand is an AU base pair.

[0529] In one embodiment, the antisense strand of the dsRNA agent of the invention is 100% complementary to a target RNA to hybridize thereto and inhibits its expression through RNA interference. In another embodiment, the antisense strand of the dsRNA agent of the invention is at least 95%, at least 90%, at least 85%, at least 80%, at least 75%, at least 70%, at least 65%, at least 60%, at least 55%, or at least 50% complementary to a target RNA.

[0530] In one aspect, the invention relates to a dsRNA agent as defined herein capable of inhibiting the expression of a target gene. The dsRNA agent comprises a sense strand and an antisense strand, each strand having 14 to 40 nucleotides. The sense strand contains at least one thermally destabilizing nucleotide, wherein at least one of said thermally destabilizing nucleotide occurs at or near the site that is opposite to the seed region of the antisense strand (i.e. at position 2-8 of the 5′-end of the antisense strand, or at positions 2-9 of the 5′-end of the antisense strand). Each of the embodiments and aspects described in this specification relating to the dsRNA represented by formula (I) can also apply to the dsRNA containing the thermally destabilizing nucleotide.

[0531] The thermally destabilizing nucleotide can occur, for example, between positions 14-17 of the 5′-end of the sense strand when the sense strand is 21 nucleotides in length. The antisense strand contains at least two modified nucleic acids that are smaller than a sterically demanding 2′-OMe modification. Preferably, the two modified nucleic acids that are smaller than a sterically demanding 2′-OMe are separated by 11 nucleotides in length. For example, the two modified nucleic acids are at positions 2 and 14 of the 5′end of the antisense strand.

[0532] In one embodiment, the dsRNA agent further comprises at least one ASGPR ligand. For example, the ASGPR ligand is one or more GalNAc derivatives attached through a bivalent or trivalent branched linker, such as:

[chemical structure]

In one example, the ASGPR ligand is attached to the 3′ end of the sense strand.

[0533] For example, the dsRNA agent as defined herein can comprise i) a phosphorus-containing group at the 5′-end of the sense strand or antisense strand; ii) with two phosphorothioate internucleotide linkage modifications within position 1-5 of the sense strand (counting from the 5′ end of the sense strand), and two phosphorothioate internucleotide linkage modifications at positions 1 and 2 and two phosphorothioate internucleotide linkage modifications within positions 18-23 of the antisense strand (counting from the 5′-end of the antisense strand); and iii) a ligand, such as a ASGPR ligand (e.g., one or more GalNAc derivatives) at 5′-end or 3′-end of the sense strand or antisense strand. For instance, the ligand may be at the 3′-end of the sense strand.

[0534] In a particular embodiment, the dsRNA agents of the present invention comprise:
[0535] (a) a sense strand having:
   [0536] (i) a length of 21 nucleotides;
   [0537] (ii) optionally an ASGPR ligand attached to the 3′-end, wherein said ASGPR ligand comprises three GalNAc derivatives attached through a trivalent branched linker; and
   [0538] (iii) 2′-F modifications at positions 1, 3, 5, 7, 9 to 11, 13, 17, 19, and 21, and 2′-OMe modifications at positions 2, 4, 6, 8, 12, 14 to 16, 18, and 20 (counting from the 5′ end);
   [0539] and
[0540] (b) an antisense strand having:
   [0541] (i) a length of 23 nucleotides;
   [0542] (ii) 2′-OMe modifications at positions 1, 3, 5, 9, 11 to 13, 15, 17, 19, 21, and 23, and 2′F modifications at positions 2, 4, 6 to 8, 10, 14, 16, 18, 20, and 22 (counting from the 5′ end); and
   [0543] (iii) phosphorothioate internucleotide linkages between nucleotide positions 21 and 22, and between nucleotide positions 22 and 23 (counting from the 5′ end);
      [0544] wherein the dsRNA agents have a two nucleotide overhang at the 3′-end of the antisense strand, and a blunt end at the 5′-end of the antisense strand.

[0545] In another particular embodiment, the dsRNA agents of the present invention comprise:
[0546] (a) a sense strand having:
   [0547] (i) a length of 21 nucleotides;
   [0548] (ii) optionally an ASGPR ligand attached to the 3′-end, wherein said ASGPR ligand comprises three GalNAc derivatives attached through a trivalent branched linker;
   [0549] (iii) 2′-F modifications at positions 1, 3, 5, 7, 9 to 11, 13, 15, 17, 19, and 21, and 2′-OMe modifications at positions 2, 4, 6, 8, 12, 14, 16, 18, and 20 (counting from the 5′ end); and
   [0550] (iv) phosphorothioate internucleotide linkages between nucleotide positions 1 and 2, and between nucleotide positions 2 and 3 (counting from the 5′ end);
   [0551] and
[0552] (b) an antisense strand having:
   [0553] (i) a length of 23 nucleotides;
   [0554] (ii) 2′-OMe modifications at positions 1, 3, 5, 7, 9, 11 to 13, 15, 17, 19, and 21 to 23, and 2′F modifications at positions 2, 4, 6, 8, 10, 14, 16, 18, and 20 (counting from the 5′ end); and
   [0555] (iii) phosphorothioate internucleotide linkages between nucleotide positions 1 and 2, between nucleotide positions 2 and 3, between nucleotide positions 21 and 22, and between nucleotide positions 22 and 23 (counting from the 5′ end);
[0556] wherein the dsRNA agents have a two nucleotide overhang at the 3′-end of the antisense strand, and a blunt end at the 5′-end of the antisense strand.

[0557] In another particular embodiment, the dsRNA agents of the present invention comprise:
[0558] (a) a sense strand having:
   [0559] (i) a length of 21 nucleotides;
   [0560] (ii) optionally an ASGPR ligand attached to the 3′-end, wherein said ASGPR ligand comprises three GalNAc derivatives attached through a trivalent branched linker;
   [0561] (iii) 2′-OMe modifications at positions 1 to 6, 8, 10, and 12 to 21, 2′-F modifications at positions 7, and 9, and a desoxy-nucleotide (e.g. dT) at position 11 (counting from the 5′ end); and
   [0562] (iv) phosphorothioate internucleotide linkages between nucleotide positions 1 and 2, and between nucleotide positions 2 and 3 (counting from the 5′ end);
   [0563] and
[0564] (b) an antisense strand having:
   [0565] (i) a length of 23 nucleotides;
   [0566] (ii) 2′-OMe modifications at positions 1, 3, 7, 9, 11, 13, 15, 17, and 19 to 23, and 2′-F modifications at positions 2, 4 to 6, 8, 10, 12, 14, 16, and 18 (counting from the 5′ end); and
   [0567] (iii) phosphorothioate internucleotide linkages between nucleotide positions 1 and 2, between nucleotide positions 2 and 3, between nucleotide positions 21 and 22, and between nucleotide positions 22 and 23 (counting from the 5′ end);
[0568] wherein the dsRNA agents have a two nucleotide overhang at the 3′-end of the antisense strand, and a blunt end at the 5′-end of the antisense strand.

[0569] In another particular embodiment, the dsRNA agents of the present invention comprise:
[0570] (a) a sense strand having:
   [0571] (i) a length of 21 nucleotides;
   [0572] (ii) optionally an ASGPR ligand attached to the 3′-end, wherein said ASGPR ligand comprises three GalNAc derivatives attached through a trivalent branched linker;
   [0573] (iii) 2′-OMe modifications at positions 1 to 6, 8, 10, 12, 14, and 16 to 21, and 2′-F modifications at positions 7, 9, 11, 13, and 15; and
   [0574] (iv) phosphorothioate internucleotide linkages between nucleotide positions 1 and 2, and between nucleotide positions 2 and 3 (counting from the 5′ end);
   [0575] and
[0576] (b) an antisense strand having:
   [0577] (i) a length of 23 nucleotides;
   [0578] (ii) 2′-OMe modifications at positions 1, 5, 7, 9, 11, 13, 15, 17, 19, and 21 to 23, and 2′-F modifications at positions 2 to 4, 6, 8, 10, 12, 14, 16, 18, and 20 (counting from the 5′ end); and
   [0579] (iii) phosphorothioate internucleotide linkages between nucleotide positions 1 and 2, between nucleotide positions 2 and 3, between nucleotide positions 21 and 22, and between nucleotide positions 22 and 23 (counting from the 5′ end);
[0580] wherein the dsRNA agents have a two nucleotide overhang at the 3′-end of the antisense strand, and a blunt end at the 5′-end of the antisense strand.

[0581] In another particular embodiment, the dsRNA agents of the present invention comprise:
[0582] (a) a sense strand having:
   [0583] (i) a length of 21 nucleotides;
   [0584] (ii) optionally an ASGPR ligand attached to the 3′-end, wherein said ASGPR ligand comprises three GalNAc derivatives attached through a trivalent branched linker;
   [0585] (iii) 2′-OMe modifications at positions 1 to 9, and 12 to 21, and 2′-F modifications at positions 10, and 11; and
   [0586] (iv) phosphorothioate internucleotide linkages between nucleotide positions 1 and 2, and between nucleotide positions 2 and 3 (counting from the 5′ end);
   [0587] and
[0588] (b) an antisense strand having:
   [0589] (i) a length of 23 nucleotides;
   [0590] (ii) 2′-OMe modifications at positions 1, 3, 5, 7, 9, 11 to 13, 15, 17, 19, and 21 to 23, and 2′-F modifications at positions 2, 4, 6, 8, 10, 14, 16, 18, and 20 (counting from the 5′ end); and
   [0591] (iii) phosphorothioate internucleotide linkages between nucleotide positions 1 and 2, between nucleotide positions 2 and 3, between nucleotide positions 21 and 22, and between nucleotide positions 22 and 23 (counting from the 5′ end);
[0592] wherein the dsRNA agents have a two nucleotide overhang at the 3′-end of the antisense strand, and a blunt end at the 5′-end of the antisense strand.

[0593] In another particular embodiment, the dsRNA agents of the present invention comprise:
[0594] (a) a sense strand having:
   [0595] (i) a length of 21 nucleotides;
   [0596] (ii) optionally an ASGPR ligand attached to the 3′-end, wherein said ASGPR ligand comprises three GalNAc derivatives attached through a trivalent branched linker;
   [0597] (iii) 2′-F modifications at positions 1, 3, 5, 7, 9 to 11, and 13, and 2′-OMe modifications at positions 2, 4, 6, 8, 12, and 14 to 21; and
   [0598] (iv) phosphorothioate internucleotide linkages between nucleotide positions 1 and 2, and between nucleotide positions 2 and 3 (counting from the 5′ end);
   [0599] and
[0600] (b) an antisense strand having:
   [0601] (i) a length of 23 nucleotides;
   [0602] (ii) 2′-OMe modifications at positions 1, 3, 5 to 7, 9, 11 to 13, 15, 17 to 19, and 21 to 23, and 2′-F modifications at positions 2, 4, 8, 10, 14, 16, and 20 (counting from the 5′ end); and
   [0603] (iii) phosphorothioate internucleotide linkages between nucleotide positions 1 and 2, between nucleotide positions 2 and 3, between nucleotide positions 21 and 22, and between nucleotide positions 22 and 23 (counting from the 5′ end);
[0604] wherein the dsRNA agents have a two nucleotide overhang at the 3′-end of the antisense strand, and a blunt end at the 5′-end of the antisense strand.

[0605] In another particular embodiment, the dsRNA agents of the present invention comprise:
[0606] (a) a sense strand having:
   [0607] (i) a length of 21 nucleotides;
   [0608] (ii) optionally an ASGPR ligand attached to the 3′-end, wherein said ASGPR ligand comprises three GalNAc derivatives attached through a trivalent branched linker;
   [0609] (iii) 2′-OMe modifications at positions 1, 2, 4, 6, 8, 12, 14, 15, 17, and 19 to 21, and 2′-F modifications at positions 3, 5, 7, 9 to 11, 13, 16, and 18; and
   [0610] (iv) phosphorothioate internucleotide linkages between nucleotide positions 1 and 2, and between nucleotide positions 2 and 3 (counting from the 5′ end);
   [0611] and
[0612] (b) an antisense strand having:
   [0613] (i) a length of 25 nucleotides;
   [0614] (ii) 2′-OMe modifications at positions 1, 4, 6, 7, 9, 11 to 13, 15, 17, and 19 to 23, 2′-F modifications at positions 2, 3, 5, 8, 10, 14, 16, and 18, and desoxy-nucleotides (e.g. dT) at positions 24 and 25 (counting from the 5′ end); and
   [0615] (iii) phosphorothioate internucleotide linkages between nucleotide positions 1 and 2, between nucleotide positions 2 and 3, between nucleotide positions 21 and 22, and between nucleotide positions 22 and 23 (counting from the 5′ end);
[0616] wherein the dsRNA agents have a four nucleotide overhang at the 3′-end of the antisense strand, and a blunt end at the 5′-end of the antisense strand.

[0617] In another particular embodiment, the dsRNA agents of the present invention comprise:
[0618] (a) a sense strand having:
   [0619] (i) a length of 21 nucleotides;
   [0620] (ii) optionally an ASGPR ligand attached to the 3′-end, wherein said ASGPR ligand comprises three GalNAc derivatives attached through a trivalent branched linker;
   [0621] (iii) 2′-OMe modifications at positions 1 to 6, 8, and 12 to 21, and 2′-F modifications at positions 7, and 9 to 11; and
   [0622] (iv) phosphorothioate internucleotide linkages between nucleotide positions 1 and 2, and between nucleotide positions 2 and 3 (counting from the 5′ end); and
[0623] (b) an antisense strand having:
   [0624] (i) a length of 23 nucleotides;
   [0625] (ii) 2′-OMe modifications at positions 1, 3 to 5, 7, 8, 10 to 13, 15, and 17 to 23, and 2′-F modifications at positions 2, 6, 9, 14, and 16 (counting from the 5′ end); and
   [0626] (iii) phosphorothioate internucleotide linkages between nucleotide positions 1 and 2, between nucleotide positions 2 and 3, between nucleotide positions 21 and 22, and between nucleotide positions 22 and 23 (counting from the 5′ end);
[0627] wherein the dsRNA agents have a two nucleotide overhang at the 3′-end of the antisense strand, and a blunt end at the 5′-end of the antisense strand.

[0628] In another particular embodiment, the dsRNA agents of the present invention comprise:
[0629] (a) a sense strand having:
   [0630] (i) a length of 21 nucleotides;
   [0631] (ii) optionally an ASGPR ligand attached to the 3′-end, wherein said ASGPR ligand comprises three GalNAc derivatives attached through a trivalent branched linker;
   [0632] (iii) 2′-OMe modifications at positions 1 to 6, 8, and 12 to 21, and 2′-F modifications at positions 7, and 9 to 11; and
   [0633] (iv) phosphorothioate internucleotide linkages between nucleotide positions 1 and 2, and between nucleotide positions 2 and 3 (counting from the 5′ end);
   [0634] and
[0635] (b) an antisense strand having:
   [0636] (i) a length of 23 nucleotides;
   [0637] (ii) 2′-OMe modifications at positions 1, 3 to 5, 7, 10 to 13, 15, and 17 to 23, and 2′-F modifications at positions 2, 6, 8, 9, 14, and 16 (counting from the 5′ end); and
   [0638] (iii) phosphorothioate internucleotide linkages between nucleotide positions 1 and 2, between nucleotide positions 2 and 3, between nucleotide positions 21 and 22, and between nucleotide positions 22 and 23 (counting from the 5′ end);
[0639] wherein the dsRNA agents have a two nucleotide overhang at the 3′-end of the antisense strand, and a blunt end at the 5′-end of the antisense strand.

[0640] In another particular embodiment, the dsRNA agents of the present invention comprise:
[0641] (a) a sense strand having:
   [0642] (i) a length of 19 nucleotides;
   [0643] (ii) optionally an ASGPR ligand attached to the 3′-end, wherein said ASGPR ligand comprises three GalNAc derivatives attached through a trivalent branched linker;
   [0644] (iii) 2′-OMe modifications at positions 1 to 4, 6, and 10 to 19, and 2′-F modifications at positions 5, and 7 to 9; and
   [0645] (iv) phosphorothioate internucleotide linkages between nucleotide positions 1 and 2, and between nucleotide positions 2 and 3 (counting from the 5′ end);
   [0646] and
[0647] (b) an antisense strand having:
   [0648] (i) a length of 21 nucleotides;
   [0649] (ii) 2′-OMe modifications at positions 1, 3 to 5, 7, 10 to 13, 15, and 17 to 21, and 2′-F modifications at positions 2, 6, 8, 9, 14, and 16 (counting from the 5′ end); and
   [0650] (iii) phosphorothioate internucleotide linkages between nucleotide positions 1 and 2, between nucleotide positions 2 and 3, between nucleotide positions 19 and 20, and between nucleotide positions 20 and 21 (counting from the 5′ end);
[0651] wherein the dsRNA agents have a two nucleotide overhang at the 3′-end of the antisense strand, and a blunt end at the 5′-end of the antisense strand.

[0652] In one embodiment, the dsRNA agents of the present invention comprise:
[0653] (a) a sense strand having:
   [0654] (i) a length of 18-23 nucleotides;
   [0655] (ii) three consecutive 2′-F modifications at positions 7-15; and
[0656] (b) an antisense strand having:
   [0657] (i) a length of 18-23 nucleotides;
   [0658] (ii) at least 2′-F modifications anywhere on the strand; and
   [0659] (iii) at least two phosphorothioate internucleotide linkages at the first five nucleotides (counting from the 5′ end);
[0660] wherein the dsRNA agents have one or more lipophilic moieties conjugated to one or more positions on at least one strand; and either have two nucleotides overhang at the 3′-end of the antisense strand, and a blunt end at the 5′-end of the antisense strand; or blunt end both ends of the duplex.

[0661] In one embodiment, the dsRNA agents of the present invention comprise:
[0662] (a) a sense strand having:
   [0663] (i) a length of 18-23 nucleotides;
   [0664] (ii) less than four 2′-F modifications;
[0665] (b) an antisense strand having:
   [0666] (i) a length of 18-23 nucleotides;
   [0667] (ii) at less than twelve 2′-F modification; and
   [0668] (iii) at least two phosphorothioate internucleotide linkages at the first five nucleotides (counting from the 5′ end);
[0669] wherein the dsRNA agents have one or more lipophilic moieties conjugated to one or more positions on at least one strand; and either have two nucleotides overhang at the 3′-end of the antisense strand, and a blunt end at the 5′-end of the antisense strand; or blunt end both ends of the duplex.

[0670] In one embodiment, the dsRNA agents of the present invention comprise:
[0671] (a) a sense strand having:
   [0672] (i) a length of 19-35 nucleotides;
   [0673] (ii) less than four 2′-F modifications;
[0674] (b) an antisense strand having:
   [0675] (i) a length of 19-35 nucleotides;
   [0676] (ii) at less than twelve 2′-F modification; and
   [0677] (iii) at least two phosphorothioate internucleotide linkages at the first five nucleotides (counting from the 5′ end);
[0678] wherein the duplex region is between 19 to 25 base pairs (preferably 19, 20, 21 or 22); and wherein the dsRNA agents have one or more lipophilic moieties conjugated to one or more positions on at least one strand; and either have two nucleotides overhang at the 3′-end of the antisense strand, and a blunt end at the 5′-end of the antisense strand; or blunt end both ends of the duplex.

[0679] In one embodiment, the dsRNA agents of the present invention comprise a sense strand and antisense strands having a length of 15-30 nucleotides; at least two phosphorothioate internucleotide linkages at the first five nucleotides on the antisense strand (counting from the 5′ end); wherein the duplex region is between 19 to 25 base pairs (preferably 19, 20, 21 or 22); wherein the dsRNA agents have one or more lipophilic moieties conjugated to one or more positions on at least one strand; and wherein the dsRNA agents have less than 20%, less than 15% and less than 10% non-natural nucleotide.

[0680] Examples of non-natural nucleotide includes acyclic nucleotides, LNA, HNA, CeNA, 2′-methoxyethyl, 2′-O-allyl, 2′-C-allyl, 2′-deoxy, 2′-fluoro, 2′-O—N-methylacetamido (2′-O-NMA), a 2′-O-dimethylaminoethoxyethyl (2′-O-DMAEOE), 2′-O-aminopropyl (2′-O-AP), or 2′-ara-F, and others.

[0681] In one embodiment, the dsRNA agents of the present invention comprise a sense strand and antisense strands having a length of 15-30 nucleotides; at least two phosphorothioate internucleotide linkages at the first five nucleotides on the antisense strand (counting from the 5′ end); wherein the duplex region is between 19 to 25 base pairs (preferably 19, 20, 21 or 22); wherein the dsRNA agents have one or more lipophilic moieties conjugated to one or more positions on at least one strand; and wherein the dsRNA agents have greater than 80%, greater than 85% and greater than 90% natural nucleotide, such as 2′-OH, 2′-deoxy and 2′-OMe are natural nucleotides.

[0682] In one embodiment, the dsRNA agents of the present invention comprise a sense strand and antisense strands having a length of 15-30 nucleotides; at least two phosphorothioate internucleotide linkages at the first five nucleotides on the antisense strand (counting from the 5′ end); wherein the duplex region is between 19 to 25 base pairs (preferably 19, 20, 21 or 22); wherein the dsRNA agents have one or more lipophilic moieties conjugated to one or more positions on at least one strand; and wherein the dsRNA agents have 100% natural nucleotide, such as 2′-OH, 2′-deoxy and 2′-OMe are natural nucleotides.

[0683] Various publications described multimeric siRNA and can all be used with the iRNA of the invention. Such publications include WO2007/091269, U.S. Pat. No. 7,858,769, WO2010/141511, WO2007/117686, WO2009/014887 and WO2011/031520, which are hereby incorporated by reference in their entirety.

[0684] In some embodiments, 100%, 95%, 90%, 85%, 80%, 75%, 70%, 65%, 60%, 55%, 50%, 45%, 40%, 35% or 30% of the iRNA agent of the invention is modified.

[0685] In some embodiments, each of the sense and antisense strands of the iRNA agent is independently modified with acyclic nucleotides, LNA, HNA, CeNA, 2′-methoxyethyl, 2′-O-methyl, 2′-O-allyl, 2′-C-allyl, 2′-deoxy, 2′-fluoro, 2′-O—N-methylacetamido (2′-O-NMA), a 2′-O-dimethylaminoethoxyethyl (2′-O-DMAEOE), 2′-O-aminopropyl (2′-O-AP), or 2′-ara-F.

[0686] In some embodiments, each of the sense and antisense strands of the iRNA agent contains at least two different modifications.

[0687] In some embodiments, the dsRNA agent of the invention of the invention does not contain any 2′-F modification.

[0688] In some embodiments, the dsRNA agent of the invention contains one, two, three, four, five, six, seven, eight, nine, ten, eleven or twelve 2′-F modification(s). In one example, dsRNA agent of the invention contains nine or ten 2′-F modifications.

[0689] The iRNA agent of the invention may further comprise at least one phosphorothioate or methylphosphonate internucleotide linkage. The phosphorothioate or methylphosphonate internucleotide linkage modification may occur on any nucleotide of the sense strand or antisense strand or both in any position of the strand. For instance, the internucleotide linkage modification may occur on every nucleotide on the sense strand or antisense strand; each internucleotide linkage modification may occur in an alternating pattern on the sense strand or antisense strand; or the sense strand or antisense strand may contain both internucleotide linkage modifications in an alternating pattern. The alternating pattern of the internucleotide linkage modification on the sense strand may be the same or different from the antisense strand, and the alternating pattern of the internucleotide linkage modification on the sense strand may have a shift relative to the alternating pattern of the internucleotide linkage modification on the antisense strand.

[0690] In one embodiment, the iRNA comprises the phosphorothioate or methylphosphonate internucleotide linkage modification in the overhang region. For example, the overhang region may contain two nucleotides having a phosphorothioate or methylphosphonate internucleotide linkage between the two nucleotides. Internucleotide linkage modifications also may be made to link the overhang nucleotides with the terminal paired nucleotides within duplex region. For example, at least 2, 3, 4, or all the overhang nucleotides may be linked through phosphorothioate or methylphosphonate internucleotide linkage, and optionally, there may be additional phosphorothioate or methylphosphonate internucleotide linkages linking the overhang nucleotide with a paired nucleotide that is next to the overhang nucleotide. For instance, there may be at least two phosphorothioate internucleotide linkages between the terminal three nucleotides, in which two of the three nucleotides are overhang nucleotides, and the third is a paired nucleotide next to the overhang nucleotide. Preferably, these terminal three nucleotides may be at the 3′-end of the antisense strand.

[0691] In some embodiments, the sense strand and/or antisense strand of the iRNA agent comprises one or more blocks of phosphorothioate or methylphosphonate internucleotide linkages. In one example, the sense strand comprises one block of two phosphorothioate or methylphosphonate internucleotide linkages. In one example, the antisense strand comprises two blocks of two phosphorothioate or methylphosphonate internucleotide linkages. For example, the two blocks of phosphorothioate or methylphosphonate internucleotide linkages are separated by 16-18 phosphate internucleotide linkages.

[0692] In some embodiments, the antisense strand of the iRNA agent of the invention is 100% complementary to a target RNA to hybridize thereto and inhibits its expression through RNA interference. In another embodiment, the antisense strand of the iRNA agent of the invention is at least 95%, at least 90%, at least 85%, at least 80%, at least 75%, at least 70%, at least 65%, at least 60%, at least 55%, or at least 50% complementary to a target RNA.

[0693] In one aspect, the invention relates to a iRNA agent capable of inhibiting the expression of a target gene. The iRNA agent comprises a sense strand and an antisense strand, each strand having 14 to 40 nucleotides. The sense strand contains at least one thermally destabilizing nucleotide, wherein at at least one said thermally destabilizing nucleotide occurs at or near the site that is opposite to the seed region of the antisense strand (i.e. at position 2-8 of the 5′-end of the antisense strand, or at positions 2-9 of the 5′-end of the antisense strand). For example, the thermally destabilizing nucleotide occurs between positions 14-17 of the 5′-end of the sense strand when the sense strand is 21 nucleotides in length. The antisense strand contains at least two modified nucleic acids that are smaller than a sterically demanding 2′-OMe modification. Preferably, the two modified nucleic acids that is smaller than a sterically demanding 2′-OMe are separated by 11 nucleotides in length. For example, the two modified nucleic acids are at positions 2 and 14 of the 5′end of the antisense strand.

[0694] In some embodiments, the compound of the invention disclosed herein is a miRNA mimic. In one design, miRNA mimics are double stranded molecules (e.g., with a duplex region of between about 16 and about 31 nucleotides in length) and contain one or more sequences that have identity with the mature strand of a given miRNA. Double-stranded miRNA mimics have designs similar to as described above for double-stranded iRNAs. In some embodiments, a miRNA mimic comprises a duplex region of between 16 and 31 nucleotides and one or more of the following chemical modification patterns: the sense strand contains 2′-O-methyl modifications of nucleotides 1 and 2 (counting from the 5′ end of the sense oligonucleotide), and all of the Cs and Us; the antisense strand modifications can comprise 2′ F modification of all of the Cs and Us, phosphorylation of the 5′ end of the oligonucleotide, and stabilized internucleotide linkages associated with a 2 nucleotide 3′ overhang.

### V. C₂₂ Hydrocarbon Chains

[0695] As described In U.S. Provisional Application No. 63/255,984, filed on Oct. 15, 2021 (the entire contents of which are incorporated herein by reference), including a C₂₂ hydrocarbon chain, e.g., saturated or unsaturated, on one or more internal position(s) of the dsRNA agent increases lipophilicity of the dsRNA agent and provides optimal hydrophobicity for the enhanced in vivo delivery of dsRNA to, e.g., muscle tissue and/or adipose tissue.

[0696] One way to characterize lipophilicity is by the octanol-water partition coefficient, log K_{ow}, where K_{ow} is the ratio of a chemical's concentration in the octanol-phase to its concentration in the aqueous phase of a two-phase system at equilibrium. The octanol-water partition coefficient is a laboratory-measured property of a substance. However, it may also be predicted by using coefficients attributed to the structural components of a chemical which are calculated using first-principle or empirical methods (see, for example, Tetko et al., J. Chem. Inf. Comput. Sci. 41:1407-21 (2001), which is incorporated herein by reference in its entirety). It provides a thermodynamic measure of the tendency of the substance to prefer a non-aqueous or oily milieu rather than water (i.e. its hydrophilic/lipophilic balance). In principle, a chemical substance is lipophilic in character when its log K_{ow} exceeds 0. Typically, the lipophilic moiety possesses a log K_{ow} exceeding 1, exceeding 1.5, exceeding 2, exceeding 3, exceeding 4, exceeding 5, or exceeding 10. For instance, the log K_{ow} of 6-amino hexanol, for instance, is predicted to be approximately 0.7. Using the same method, the log K_{ow} of cholesteryl N-(hexan-6-ol) carbamate is predicted to be 10.7.

[0697] The lipophilicity of a molecule can change with respect to the functional group it carries. For instance, adding a hydroxyl group or amine group to the end of a C₂₂ hydrocarbon chain can increase or decrease the partition coefficient (e.g., log K_{ow}) value of the C₂₂ hydrocarbon chain.

[0698] Alternatively, the hydrophobicity of the dsRNA agent, conjugated to one or more C₂₂ hydrocarbon chains, can be measured by its protein binding characteristics. For instance, the unbound fraction in the plasma protein binding assay of the dsRNA agent can be determined to positively correlate to the relative hydrophobicity of the dsRNA agent, which can positively correlate to the silencing activity of the dsRNA agent.

[0699] In one embodiment, the plasma protein binding assay determined is an electrophoretic mobility shift assay (EMSA) using human serum albumin protein. The hydrophobicity of the dsRNA agent, measured by fraction of unbound dsRNA in the binding assay, exceeds 0.15, exceeds 0.2, exceeds 0.25, exceeds 0.3, exceeds 0.35, exceeds 0.4, exceeds 0.45, or exceeds 0.5 for an enhanced in vivo delivery of siRNA.

[0700] In certain embodiments, the one or more C₂₂ hydrocarbon chains is an aliphatic, alicyclic, or polyalicyclic compound is an aliphatic, cyclic such as alicyclic, or polycyclic such as polyalicyclic compound. The hydrocarbon chain may comprise various substituents and/or one or more heteroatoms, such as an oxygen or nitrogen atom.

[0701] The one or more C₂₂ hydrocarbon chains may be attached to the iRNA agent by any method known in the art, including via a functional grouping already present in the lipophilic moiety or introduced into the iRNA agent, such as a hydroxy group (e.g., —CO—CH₂—OH). The functional groups already present in the C₂₂ hydrocarbon chain or introduced into the dsRNA agent include, but are not limited to, hydroxyl, amine, carboxylic acid, sulfonate, phosphate, thiol, azide, and alkyne.

[0702] Conjugation of the dsRNA agent and the C₂₂ hydrocarbon chain may occur, for example, through formation of an ether or a carboxylic or carbamoyl ester linkage between the hydroxy and an alkyl group R—, an alkanoyl group RCO— or a substituted carbamoyl group RNHCO—. The alkyl group R may be cyclic (e.g., cyclohexyl) or acyclic (e.g., straight-chained or branched; and saturated or unsaturated). Alkyl group R may be a butyl, pentyl, hexyl, heptyl, octyl, nonyl, decyl, undecyl, dodecyl, tridecyl, tetradecyl, pentadecyl, hexadecyl, heptadecyl or octadecyl group, or the like.

[0703] In some embodiments, the C₂₂ hydrocarbon chain is conjugated to the dsRNA agent via a linker a linker containing an ether, thioether, urea, carbonate, amine, amide, maleimide-thioether, disulfide, phosphodiester, sulfonamide linkage, a product of a click reaction (e.g., a triazole from the azide-alkyne cycloaddition), or carbamate.

[0704] In one embodiment, the one or more C₂₂ hydrocarbon chains is a C₂₂ acid, e.g., the C₂₂ acid is selected from the group consisting of docosanoic acid, 6-octyltetradecanoic acid, 10 hexylhexadecanoic acid, all-cis-7,10,13,16,19-docosapentaenoic acid, all-cis-4,7,10,13,16,19-docosahexaenoic acid, all-cis-13,16-docosadienoic acid, all-cis-7,10,13,16-docosatetraenoic acid, all-cis-4,7,10,13,16-docosapentaenoic acid, and cis-13-docosenoic acid.

[chemical structure]

[0705] In one embodiment, the one or more C₂₂ hydrocarbon chains is a C₂₂ alcohol, e.g. the C₂₂ alcohol is selected from the group consisting of 1-docosanol, 6-octyltetradecan-1-ol, 10-hexylhexadecan-1-ol, cis-13-docosen-1-ol, docosan-9-ol, docosan-2-ol, docosan-10-ol, docosan-11-ol, and cis-4,7,10,13,16,19-docosahexanol.

[chemical structure]

[0706] In one embodiment, the one or more C₂₂ hydrocarbon chains is not cis-4,7,10,13,16,19-docosahexanoic acid. In one embodiment, the one or more C₂₂ hydrocarbon chains is not cis-4,7,10,13,16,19-docosahexanol. In one embodiment, the one or more C₂₂ hydrocarbon chains is not cis-4,7,10,13,16,19-docosahexanoic acid and is not cis-4,7,10,13,16,19-docosahexanol.

[0707] In one embodiment, the one or more C₂₂ hydrocarbon chains is a C₂₂ amide, e.g., the C₂₂ amide is selected from the group consisting of (E)-Docos-4-enamide, (E)-Docos-5-enamide, (Z)-Docos-9-enamide, (E)-Docos-11-enamide, 12-Docosenamide, (Z)-Docos-13-enamide, (Z)—N-Hydroxy-13-docoseneamide, (E)-Docos-14-enamide, 6-cis-Docosenamide, 14-Docosenamide Docos-11-enamide, (4E,13E)-Docosa-4,13-dienamide, and (5E,13E)-Docosa-5,13-dienamide.

[0708] In certain embodiments, more than one C₂₂ hydrocarbon chains can be incorporated into the double-strand iRNA agent, particularly when the C₂₂ hydrocarbon chains has a low lipophilicity or hydrophobicity. In one embodiment, two or more C₂₂ hydrocarbon chains are incorporated into the same strand of the double-strand iRNA agent. In one embodiment, each strand of the double-strand iRNA agent has one or more C₂₂ hydrocarbon chains incorporated. In one embodiment, two or more C₂₂ hydrocarbon chains are incorporated into the same position (i.e., the same nucleobase, same sugar moiety, or same internucleosidic linkage) of the double-stranded iRNA agent. This can be achieved by, e.g., conjugating the two or more saturated or unsaturated C₂₂ hydrocarbon chains via a carrier, and/or conjugating the two or more C₂₂ hydrocarbon chains via a branched linker, and/or conjugating the two or more C₂₂ hydrocarbon chains via one or more linkers, with one or more linkers linking the C₂₂ hydrocarbon chains consecutively.

[0709] The one or more C₂₂ hydrocarbon chains may be conjugated to the iRNA agent via a direct attachment to the ribosugar of the iRNA agent. Alternatively, the one or more C₂₂ hydrocarbon chains may be conjugated to the double-strand iRNA agent via a linker or a carrier.

[0710] In certain embodiments, the one or more C₂₂ hydrocarbon chains may be conjugated to the iRNA agent via one or more linkers (tethers).

[0711] In one embodiment, the one or more C₂₂ hydrocarbon chains is conjugated to the dsRNA agent via a linker containing an ether, thioether, urea, carbonate, amine, amide, maleimide-thioether, disulfide, phosphodiester, sulfonamide linkage, a product of a click reaction (e.g., a triazole from the azide-alkyne cycloaddition), or carbamate.

### A. Linkers/Tethers

[0712] Linkers/Tethers are connected to the one or more C₂₂ hydrocarbon chains at a “tethering attachment point (TAP).” Linkers/Tethers may include any C₁-C₁₀₀ carbon-containing moiety, (e.g. C₁-C₇₅, C₁-C₅₀, C₁-C₂₀, C₁-C₁₀; C₁, C₂, C₃, C₄, C₅, C₆, C₇, C₈, C₉, or C₁₀), and may have at least one nitrogen atom. In certain embodiments, the nitrogen atom forms part of a terminal amino or amido (NHC(O)—) group on the linker/tether, which may serve as a connection point for the lipophilic moiety. Non-limited examples of linkers/tethers (underlined) include TAP-(CH₂)₂NH—; TAP-C(O)(CH₂)ₙNH—; TAP-NR″″(CH₂)ₙNH—, TAP-C(O)—(CH₂)ₙ—C(O)—; TAP-C(O)—(CH₂)ₙ—C(O)O—; TAP-C(O)—O—; TAP-C(O)—(CH₂)ₙ—NH—C(O)—; TAP-C(O)—(CH₂)ₙ—; TAP-C(O)—NH—; TAP-C(O)—; TAP-(CH₂)ₙ—C(O)—; TAP-(CH₂)ₙ—C(O)O—; TAP-(CH₂)ₙ—, or TAP-(CH₂)ₙ—NH—C(O)—; in which n is 1-20 (e.g., 1, 2, 3, 4, 5, 6, 7, 8, 9, 10, 11, 12, 13, 14, 15, 16, 17, 18, 19, or 20) and R″″ is C₁-C₆ alkyl. Preferably, n is 5, 6, or 11. In other embodiments, the nitrogen may form part of a terminal oxyamino group, e.g., —ONH₂, or hydrazino group, —NHNH₂. The linker/tether may optionally be substituted, e.g., with hydroxy, alkoxy, perhaloalkyl, and/or optionally inserted with one or more additional heteroatoms, e.g., N, O, or S. Preferred tethered ligands may include, e.g., TAP-(CH₂)ₙNH(LIGAND); TAP-C(O)(CH₂)ₙNH(LIGAND); TAP-NR″″(CH₂)ₙNH(LIGAND); TAP-(CH₂)ₙNH(LIGAND); TAP-C(O)(CH₂)ₙNH(LIGAND); TAP-NR″″(CH₂)ₙONH(LIGAND); TAP-(CH₂)ₙNHNH₂(LIGAND), TAP-C(O)(CH₂)ₙNHNH₂(LIGAND); TAP-NR″″(CH₂)ₙNHNH₂(LIGAND); TAP-C(O)—(CH₂)ₙ—C(O)(LIGAND); TAP-C(O)—(CH₂)ₙ—C(O)O(LIGAND); TAP-C(O)—O(LIGAND); TAP-C(O)—(CH₂)ₙ—NH—C(O)(LIGAND); TAP-C(O)—(CH₂)ₙ(LIGAND); TAP-C(O)—NH(LIGAND); TAP-C(O)(LIGAND); TAP-(CH₂)ₙ—C(O) (LIGAND); TAP-(CH₂)ₙ—C(O)O(LIGAND); TAP-(CH₂)ₙ(LIGAND); or TAP-(CH₂)ₙ—NH—C(O)(LIGAND). In some embodiments, amino terminated linkers/tethers (e.g., NH₂, ONH₂, NH₂NH₂) can form an imino bond (i.e., C═N) with the ligand. In some embodiments, amino terminated linkers/tethers (e.g., NH₂, ONH₂, NH₂NH₂) can acylated, e.g., with C(O)CF₃.

[0713] In some embodiments, the linker/tether can terminate with a mercapto group (i.e., SH) or an olefin (e.g., CH═CH₂). For example, the tether can be TAP-(CH₂)ₙ—SH, TAP-C(O)(CH₂)ₙSH, TAP-(CH₂)ₙ—(CH═CH₂), or TAP-C(O)(CH₂)ₙ(CH═CH₂), in which n can be as described elsewhere. The tether may optionally be substituted, e.g., with hydroxy, alkoxy, perhaloalkyl, and/or optionally inserted with one or more additional heteroatoms, e.g., N, O, or S. The double bond can be cis or trans or E or Z.

[0714] In other embodiments, the linker/tether may include an electrophilic moiety, preferably at the terminal position of the linker/tether. Exemplary electrophilic moieties include, e.g., an aldehyde, alkyl halide, mesylate, tosylate, nosylate, or brosylate, or an activated carboxylic acid ester, e.g. an NHS ester, or a pentafluorophenyl ester. Preferred linkers/tethers (underlined) include TAP-(CH₂)ₙCHO; TAP-C(O)(CH₂)ₙCHO; or TAP-NR″″(CH₂)ₙCHO, in which n is 1-6 and R″″ is C₁-C₆ alkyl; or TAP-(CH₂)ₙC(O)ONHS; TAP-C(O)(CH₂)ₙC(O)ONHS; or TAP-NR″″(CH₂)ₙC(O)ONHS, in which n is 1-6 and R″″ is C₁-C₆ alkyl; TAP-(CH₂)ₙC(O)OC₆F₅; TAP-C(O)(CH₂)ₙC(O) OC₆F₅; or TAP-NR″″(CH₂)ₙC(O) OC₆F₅, in which n is 1-11 and R″″ is C₁-C₆ alkyl; or —(CH₂)ₙCH₂LG; TAP-C(O)(CH₂)ₙCH₂LG; or TAP-NR″″(CH₂)ₙCH₂LG, in which n can be as described elsewhere and R″″ is C₁-C₆ alkyl (LG can be a leaving group, e.g., halide, mesylate, tosylate, nosylate, brosylate). Tethering can be carried out by coupling a nucleophilic group of a ligand, e.g., a thiol or amino group with an electrophilic group on the tether.

[0715] In other embodiments, it can be desirable for the monomer to include a phthalimido group (K) at the terminal position of the linker/tether

[chemical structure]

[0716] In other embodiments, other protected amino groups can be at the terminal position of the linker/tether, e.g., alloc, monomethoxy trityl (MMT), trifluoroacetyl, Fmoc, or aryl sulfonyl (e.g., the aryl portion can be ortho-nitrophenyl or ortho, para-dinitrophenyl).

[0717] Any of the linkers/tethers described herein may further include one or more additional linking groups, e.g., —O—(CH₂)ₙ—, —(CH₂)ₙ—SS—, —(CH₂)ₙ—, or —(CH═CH)—.

### B. Cleavable Linkers/Tethers

[0718] In some embodiments, at least one of the linkers/tethers can be a redox cleavable linker, an acid cleavable linker, an esterase cleavable linker, a phosphatase cleavable linker, or a peptidase cleavable linker.

[0719] In one embodiment, at least one of the linkers/tethers can be a reductively cleavable linker (e.g., a disulfide group).

[0720] In one embodiment, at least one of the linkers/tethers can be an acid cleavable linker (e.g., a hydrazone group, an ester group, an acetal group, or a ketal group).

[0721] In one embodiment, at least one of the linkers/tethers can be an esterase cleavable linker (e.g., an ester group).

[0722] In one embodiment, at least one of the linkers/tethers can be a phosphatase cleavable linker (e.g., a phosphate group).

[0723] In one embodiment, at least one of the linkers/tethers can be a peptidase cleavable linker (e.g., a peptide bond).

[0724] Cleavable linking groups are susceptible to cleavage agents, e.g., pH, redox potential or the presence of degradative molecules. Generally, cleavage agents are more prevalent or found at higher levels or activities inside cells than in serum or blood. Examples of such degradative agents include: redox agents which are selected for particular substrates or which have no substrate specificity, including, e.g., oxidative or reductive enzymes or reductive agents such as mercaptans, present in cells, that can degrade a redox cleavable linking group by reduction; esterases; endosomes or agents that can create an acidic environment, e.g., those that result in a pH of five or lower; enzymes that can hydrolyze or degrade an acid cleavable linking group by acting as a general acid, peptidases (which can be substrate specific), and phosphatases.

[0725] A cleavable linkage group, such as a disulfide bond can be susceptible to pH. The pH of human serum is 7.4, while the average intracellular pH is slightly lower, ranging from about 7.1-7.3. Endosomes have a more acidic pH, in the range of 5.5-6.0, and lysosomes have an even more acidic pH at around 5.0. Some tethers will have a linkage group that is cleaved at a preferred pH, thereby releasing the iRNA agent from a ligand (e.g., a targeting or cell-permeable ligand, such as cholesterol) inside the cell, or into the desired compartment of the cell.

[0726] A chemical junction (e.g., a linking group) that links a ligand to an iRNA agent can include a disulfide bond. When the iRNA agent/ligand complex is taken up into the cell by endocytosis, the acidic environment of the endosome will cause the disulfide bond to be cleaved, thereby releasing the iRNA agent from the ligand (Quintana et al., Pharm Res. 19:1310-1316, 2002; Patri et al., Curr. Opin. Curr. Biol. 6:466-471, 2002). The ligand can be a targeting ligand or a second therapeutic agent that may complement the therapeutic effects of the iRNA agent.

[0727] A tether can include a linking group that is cleavable by a particular enzyme. The type of linking group incorporated into a tether can depend on the cell to be targeted by the iRNA agent. For example, an iRNA agent that targets an mRNA in liver cells can be conjugated to a tether that includes an ester group. Liver cells are rich in esterases, and therefore the tether will be cleaved more efficiently in liver cells than in cell types that are not esterase-rich. Cleavage of the tether releases the iRNA agent from a ligand that is attached to the distal end of the tether, thereby potentially enhancing silencing activity of the iRNA agent. Other cell-types rich in esterases include cells of the lung, renal cortex, and testis.

[0728] Tethers that contain peptide bonds can be conjugated to iRNA agents target to cell types rich in peptidases, such as liver cells and synoviocytes. For example, an iRNA agent targeted to synoviocytes, such as for the treatment of an inflammatory disease (e.g., rheumatoid arthritis), can be conjugated to a tether containing a peptide bond.

[0729] In general, the suitability of a candidate cleavable linking group can be evaluated by testing the ability of a degradative agent (or condition) to cleave the candidate linking group. It will also be desirable to also test the candidate cleavable linking group for the ability to resist cleavage in the blood or when in contact with other non-target tissue, e.g., tissue the iRNA agent would be exposed to when administered to a subject. Thus one can determine the relative susceptibility to cleavage between a first and a second condition, where the first is selected to be indicative of cleavage in a target cell and the second is selected to be indicative of cleavage in other tissues or biological fluids, e.g., blood or serum. The evaluations can be carried out in cell free systems, in cells, in cell culture, in organ or tissue culture, or in whole animals. It may be useful to make initial evaluations in cell-free or culture conditions and to confirm by further evaluations in whole animals. In preferred embodiments, useful candidate compounds are cleaved at least 2, 4, 10 or 100 times faster in the cell (or under in vitro conditions selected to mimic intracellular conditions) as compared to blood or serum (or under in vitro conditions selected to mimic extracellular conditions).

### C. Redox Cleavable Linking Groups

[0730] One class of cleavable linking groups are redox cleavable linking groups that are cleaved upon reduction or oxidation. An example of reductively cleavable linking group is a disulphide linking group (—S—S—). To determine if a candidate cleavable linking group is a suitable “reductively cleavable linking group,” or for example is suitable for use with a particular iRNA moiety and particular targeting agent one can look to methods described herein. For example, a candidate can be evaluated by incubation with dithiothreitol (DTI), or other reducing agent using reagents know in the art, which mimic the rate of cleavage which would be observed in a cell, e.g., a target cell. The candidates can also be evaluated under conditions which are selected to mimic blood or serum conditions. In a preferred embodiment, candidate compounds are cleaved by at most 10% in the blood. In preferred embodiments, useful candidate compounds are degraded at least 2, 4, 10 or 100 times faster in the cell (or under in vitro conditions selected to mimic intracellular conditions) as compared to blood (or under in vitro conditions selected to mimic extracellular conditions). The rate of cleavage of candidate compounds can be determined using standard enzyme kinetics assays under conditions chosen to mimic intracellular media and compared to conditions chosen to mimic extracellular media.

### D. Phosphate-Based Cleavable Linking Groups

[0731] Phosphate-based linking groups are cleaved by agents that degrade or hydrolyze the phosphate group. An example of an agent that cleaves phosphate groups in cells are enzymes such as phosphatases in cells. Examples of phosphate-based linking groups are —O—P(O)(ORk)-O—, —O—P(S)(ORk)-O—, —O—P(S)(SRk)-O—, —S—P(O)(ORk)-O—, —O—P(O)(ORk)-S—, —S P(O)(ORk)-S—, —O—P(S)(ORk)-S—, —S—P(S)(ORk)-O—, —O—P(O)(Rk)-O—, —O—P(S)(Rk)-O—, —S—P(O)(Rk)-O—, —S—P(S)(Rk)-O—, —S—P(O)(Rk)-S—, —O—P(S)(Rk)-S—. Preferred embodiments are —O—P(O)(OH)—O—, —O—P(S)(OH)—O—, —O—P(S)(SH)—O—, —S—P(O)(OH)—O—, —O—P(O)(OH)—S—, —S—P(O)(OH)—S—, —O—P(S)(OH)—S—, —S—P(S)(OH)—O—, —O—P(O)(H)—O—, —O—P(S)(H)—O—, —S—P(O)(H)—O—, —S—P(S)(H)—O—, —S—P(O)(H)—S—, —O—P(S)(H)—S—. A preferred embodiment is —O—P(O)(OH)—O—. These candidates can be evaluated using methods analogous to those described above.

### E. Acid Cleavable Linking Groups

[0732] Acid cleavable linking groups are linking groups that are cleaved under acidic conditions. In preferred embodiments acid cleavable linking groups are cleaved in an acidic environment with a pH of about 6.5 or lower (e.g., about 6.0, 5.5, 5.0, or lower), or by agents such as enzymes that can act as a general acid. In a cell, specific low pH organelles, such as endosomes and lysosomes can provide a cleaving environment for acid cleavable linking groups. Examples of acid cleavable linking groups include but are not limited to hydrazones, ketals, acetals, esters, and esters of amino acids. Acid cleavable groups can have the general formula —C═NN—, C(O)O, or —OC(O). A preferred embodiment is when the carbon attached to the oxygen of the ester (the alkoxy group) is an aryl group, substituted alkyl group, or tertiary alkyl group such as dimethyl pentyl or t-butyl. These candidates can be evaluated using methods analogous to those described above.

### F. Ester-Based Linking Groups

[0733] Ester-based linking groups are cleaved by enzymes such as esterases and amidases in cells. Examples of ester-based cleavable linking groups include but are not limited to esters of alkylene, alkenylene and alkynylene groups. Ester cleavable linking groups have the general formula —C(O)O—, or —OC(O)—. These candidates can be evaluated using methods analogous to those described above.

### G. Peptide-Based Cleaving Groups

[0734] Peptide-based linking groups are cleaved by enzymes such as peptidases and proteases in cells. Peptide-based cleavable linking groups are peptide bonds formed between amino acids to yield oligopeptides (e.g., dipeptides, tripeptides etc.) and polypeptides. Peptide-based cleavable groups do not include the amide group (—C(O)NH—). The amide group can be formed between any alkylene, alkenylene or alkynelene. A peptide bond is a special type of amide bond formed between amino acids to yield peptides and proteins. The peptide based cleavage group is generally limited to the peptide bond (i.e., the amide bond) formed between amino acids yielding peptides and proteins and does not include the entire amide functional group. Peptide cleavable linking groups have the general formula —NHCHR¹C(O)NHCHR²C(O)—, where R¹ and R² are the R groups of the two adjacent amino acids. These candidates can be evaluated using methods analogous to those described above.

### H. Biocleavable Linkers/Tethers

[0735] The linkers can also includes biocleavable linkers that are nucleotide and non-nucleotide linkers or combinations thereof that connect two parts of a molecule, for example, one or both strands of two individual siRNA molecules to generate a bis(siRNA). In some embodiments, mere electrostatic or stacking interaction between two individual siRNAs can represent a linker. The non-nucleotide linkers include tethers or linkers derived from monosaccharides, disaccharides, oligosaccharides, and derivatives thereof, aliphatic, alicyclic, hetercyclic, and combinations thereof.

[0736] In some embodiments, at least one of the linkers (tethers) is a bio-cleavable linker selected from the group consisting of DNA, RNA, disulfide, amide, functionalized monosaccharides or oligosaccharides of galactosamine, glucosamine, glucose, galactose, and mannose, and combinations thereof.

[0737] In one embodiment, the bio-cleavable carbohydrate linker may have 1 to 10 saccharide units, which have at least one anomeric linkage capable of connecting two siRNA units. When two or more saccharides are present, these units can be linked via 1-3, 1-4, or 1-6 sugar linkages, or via alkyl chains.

[0738] Exemplary bio-cleavable linkers include:

[chemical structure]

[chemical structure]

[chemical structure]

[chemical structure]

[chemical structure]

[chemical structure]

[chemical structure]

[chemical structure]

[chemical structure]

[chemical structure]

[chemical structure]

[chemical structure]

[0739] More discussion about the biocleavable linkers may be found in PCT application No. PCT/US18/14213, entitled “Endosomal Cleavable Linkers,” filed on Jan. 18, 2018, the entire contents of which are incorporated herein by reference.

### I. Carriers

[0740] In certain embodiments, the one or more C₂₂ hydrocarbon chains is conjugated to the iRNA agent via a carrier that replaces one or more nucleotide(s).

[0741] The carrier can be a cyclic group or an acyclic group. In one embodiment, the cyclic group is selected from the group consisting of pyrrolidinyl, pyrazolinyl, pyrazolidinyl, imidazolinyl, imidazolidinyl, piperidinyl, piperazinyl, [1,3]dioxolane, oxazolidinyl, isoxazolidinyl, morpholinyl, thiazolidinyl, isothiazolidinyl, quinoxalinyl, pyridazinonyl, tetrahydrofuryl, and decalin. In one embodiment, the acyclic group is a moiety based on a serinol backbone or a diethanolamine backbone.

[0742] In some embodiments, the carrier replaces one or more nucleotide(s) in the internal position(s) of the dsRNA agent.

[0743] In other embodiments, the carrier replaces the nucleotides at the terminal end of the sense strand or antisense strand. In one embodiment, the carrier replaces the terminal nucleotide on the 3′ end of the sense strand, thereby functioning as an end cap protecting the 3′ end of the sense strand. In one embodiment, the carrier is a cyclic group having an amine, for instance, the carrier may be pyrrolidinyl, pyrazolinyl, pyrazolidinyl, imidazolinyl, imidazolidinyl, piperidinyl, piperazinyl, [1,3]dioxolanyl, oxazolidinyl, isoxazolidinyl, morpholinyl, thiazolidinyl, isothiazolidinyl, quinoxalinyl, pyridazinonyl, tetrahydrofuranyl, or decalinyl.

[0744] A ribonucleotide subunit in which the ribose sugar of the subunit has been so replaced is referred to herein as a ribose replacement modification subunit (RRMS). The carrier can be a cyclic or acyclic moiety and include two “backbone attachment points” (e.g., hydroxyl groups) and a ligand (e.g., the lipophilic moiety). The one or more C₂₂ hydrocarbon chains can be directly attached to the carrier or indirectly attached to the carrier by an intervening linker/tether, as described above.

[chemical structure]

[0745] The ligand-conjugated monomer subunit may be the 5′ or 3′ terminal subunit of the iRNA molecule, i.e., one of the two “W” groups may be a hydroxyl group, and the other “W” group may be a chain of two or more unmodified or modified ribonucleotides. Alternatively, the ligand-conjugated monomer subunit may occupy an internal position, and both “W” groups may be one or more unmodified or modified ribonucleotides. More than one ligand-conjugated monomer subunit may be present in an iRNA agent.

a. Sugar Replacement-Based Monomers. e.g., Ligand-Conjugated Monomers (Cyclic)

[0746] Cyclic sugar replacement-based monomers, e.g., sugar replacement-based ligand-conjugated monomers, are also referred to herein as RRMS monomer compounds. The carriers may have the general formula (LCM-2) provided below (in that structure preferred backbone attachment points can be chosen from R¹ or R²; R³ or R⁴; or R⁹ and R¹⁰ if Y is CR⁹R¹⁰ (two positions are chosen to give two backbone attachment points, e.g., R¹ and R⁴, or R⁴ and R⁹)). Preferred tethering attachment points include R⁷; R⁵ or R⁶ when X is CH₂. The carriers are described below as an entity, which can be incorporated into a strand. Thus, it is understood that the structures also encompass the situations wherein one (in the case of a terminal position) or two (in the case of an internal position) of the attachment points, e.g., R¹ or R²; R³ or R⁴; or R⁹ or R¹⁰ (when Y is CR⁹R¹⁰), is connected to the phosphate, or modified phosphate, e.g., sulfur containing, backbone. E.g., one of the above-named R groups can be —CH₂—, wherein one bond is connected to the carrier and one to a backbone atom, e.g., a linking oxygen or a central phosphorus atom.

[chemical structure]

[0747] wherein:
[0748] X is N(CO)R⁷, NR₇ or CH₂;
[0749] Y is NR⁸, O, S, CR⁹R¹⁰;
[0750] Z is CR¹¹R¹² or absent;
[0751] Each of R¹, R², R³, R⁴, R⁹, and R¹⁰ is, independently, H, OR¹, or (CH₂)₆OR^{b}, provided that at least two of R¹, R², R³, R⁴, R⁹, and R¹⁰ are OR^{a} and/or (CH₂)ₙOR^{b};
[0752] Each of R⁵, R⁶, R¹¹, and R¹² is, independently, a ligand, H, C₁-C₆ alkyl optionally substituted with 1-3 R¹³, or C(O)NHR⁷; or R⁵ and R¹¹ together are C₃-C₈ cycloalkyl optionally substituted with R¹⁴;
[0753] R⁷ can be a ligand, e.g., R⁷ can be R⁴, or R⁷ can be a ligand tethered indirectly to the carrier, e.g., through a tethering moiety, e.g., C₁-C₂₀ alkyl substituted with NR^{c}R^{d}; or C₁-C₂₀ alkyl substituted with NHC(O)R^{d};
[0754] R⁸ is H or C₁-C₆ alkyl;
[0755] R¹³ is hydroxy, C₁-C₄ alkoxy, or halo;
[0756] R¹⁴ is NR^{c}R⁷;
[0757] R¹⁵ is C₁-C₆ alkyl optionally substituted with cyano, or C₂-C₆ alkenyl;
[0758] R¹⁶ is C₁-C₁₀ alkyl;
[0759] R¹⁷ is a liquid or solid phase support reagent;
[0760] L is —C(O)(CH₂)_{q}C(O)—, or —C(O)(CH₂)_{q}S—;
[0761] R^{a} is a protecting group, e.g., CAr₃; (e.g., a dimethoxytrityl group) or Si(X^{5′})(X^{5″})(X^{5′″}) in which (X^{5′}), (X^{5″}), and (X^{5′″}) are as described elsewhere.
[0762] R^{b} is P(O)(O⁻)H, P(OR¹⁵)N(R¹⁶)₂ or L-R¹⁷;
[0763] R^{c} is H or C₁-C₆ alkyl;
[0764] R^{d} is H or a ligand;
[0765] Each Ar is, independently, C₆-C₁₀ aryl optionally substituted with C₁-C₄ alkoxy;
[0766] n is 1-4; and q is 0-4.

[0767] Exemplary carriers include those in which, e.g., X is N(CO)R⁷ or NR₇, Y is CR⁹R¹⁰, and Z is absent; or X is N(CO)R⁷ or NR₇, Y is CR⁹R¹⁰, and Z is CR¹¹R¹²; or X is N(CO)R⁷ or NR₇, Y is NR₈, and Z is CR¹¹R¹²; or X is N(CO)R⁷ or NR⁷, Y is O, and Z is CR¹¹R¹²; or X is CH₂; Y is CR⁹R¹⁰; Z is CR¹¹R¹², and R⁵ and R¹¹ together form C₆ cycloalkyl (H, z=2), or the indane ring system, e.g., X is CH₂; Y is CR⁹R¹⁰; Z is CR¹¹R¹², and R⁵ and R¹¹ together form C₅ cycloalkyl (H, z=1).

[0768] In certain embodiments, the carrier may be based on the pyrroline ring system or the 4-hydroxyproline ring system, e.g., X is N(CO)R⁷ or NR⁷, Y is CR⁹R¹⁰, and Z is absent (D).

[chemical structure]

OFG¹ is preferably attached to a primary carbon, e.g., an exocyclic alkylene group, e.g., a methylene group, connected to one of the carbons in the five-membered ring (—CH₂OFG¹ in D). OFG² is preferably attached directly to one of the carbons in the five-membered ring (—OFG² in D). For the pyrroline-based carriers, —CH₂OFG¹ may be attached to C-2 and OFG² may be attached to C-3; or -CH₂OFG¹ may be attached to C-3 and OFG² may be attached to C-4. In certain embodiments, CH₂OFG¹ and OFG² may be geminally substituted to one of the above-referenced carbons. For the 3-hydroxyproline-based carriers, —CH₂OFG¹ may be attached to C-2 and OFG² may be attached to C-4. The pyrroline- and 4-hydroxyproline-based monomers may therefore contain linkages (e.g., carbon-carbon bonds) wherein bond rotation is restricted about that particular linkage, e.g. restriction resulting from the presence of a ring. Thus, CH₂OFG¹ and OFG² may be cis or trans with respect to one another in any of the pairings delineated above Accordingly, all cis/trans isomers are expressly included. The monomers may also contain one or more asymmetric centers and thus occur as racemates and racemic mixtures, single enantiomers, individual diastereomers and diastereomeric mixtures. All such isomeric forms of the monomers are expressly included (e.g., the centers bearing CH₂OFG¹ and OFG² can both have the R configuration; or both have the S configuration; or one center can have the R configuration and the other center can have the S configuration and vice versa). The tethering attachment point is preferably nitrogen. Preferred examples of carrier D include the following:

[chemical structure]

[0769] In certain embodiments, the carrier may be based on the piperdine ring system (E), e.g., X is N(CO)R⁷ or NR⁷, Y is CR⁹R¹⁰, and Z is CR¹¹R¹².

[chemical structure]

[0770] OFG¹ is preferably attached to a primary carbon, e.g., an exocyclic alkylene group, e.g., a methylene group (n=1) or ethylene group (n=2), connected to one of the carbons in the six-membered ring [—(CH₂)ₙOFG¹ in E]. OFG² is preferably attached directly to one of the carbons in the six-membered ring (—OFG² in E). —(CH₂)ₙOFG¹ and OFG² may be disposed in a geminal manner on the ring, i.e., both groups may be attached to the same carbon, e.g., at C-2, C-3, or C-4. Alternatively, —(CH₂)ₙOFG¹ and OFG² may be disposed in a vicinal manner on the ring, i.e., both groups may be attached to adjacent ring carbon atoms, e.g., —(CH₂)ₙOFG¹ may be attached to C-2 and OFG² may be attached to C-3; —(CH₂)ₙOFG¹ may be attached to C-3 and OFG² may be attached to C-2; —(CH₂)ₙOFG¹ may be attached to C-3 and OFG² may be attached to C-4; or —(CH₂)ₙOFG¹ may be attached to C-4 and OFG² may be attached to C-3. The piperdine-based monomers may therefore contain linkages (e.g., carbon-carbon bonds) wherein bond rotation is restricted about that particular linkage, e.g. restriction resulting from the presence of a ring. Thus, —(CH₂)ₙOFG¹ and OFG² may be cis or trans with respect to one another in any of the pairings delineated above. Accordingly, all cis/trans isomers are expressly included. The monomers may also contain one or more asymmetric centers and thus occur as racemates and racemic mixtures, single enantiomers, individual diastereomers and diastereomeric mixtures. All such isomeric forms of the monomers are expressly included (e.g., the centers bearing CH₂OFG¹ and OFG² can both have the R configuration; or both have the S configuration; or one center can have the R configuration and the other center can have the S configuration and vice versa). The tethering attachment point is preferably nitrogen.

[0771] In certain embodiments, the carrier may be based on the piperazine ring system (F), e.g., X is N(CO)R⁷ or NR⁷, Y is NR⁸, and Z is CR¹¹R¹², or the morpholine ring system (G), e.g., X is N(CO)R⁷ or NR⁷, Y is O, and Z is CR¹¹R¹².

[chemical structure]

OFG¹ is preferably attached to a primary carbon, e.g., an exocyclic alkylene group, e.g., a methylene group, connected to one of the carbons in the six-membered ring (—CH₂OFG¹ in F or G). OFG² is preferably attached directly to one of the carbons in the six-membered rings (—OFG² in F or G). For both F and G, —CH₂OFG¹ may be attached to C-2 and OFG² may be attached to C-3; or vice versa. In certain embodiments, CH₂OFG¹ and OFG² may be geminally substituted to one of the above-referenced carbons. The piperazine- and morpholine-based monomers may therefore contain linkages (e.g., carbon-carbon bonds) wherein bond rotation is restricted about that particular linkage, e.g. restriction resulting from the presence of a ring. Thus, CH OFG¹ and OFG² may be cis or trans with respect to one another in any of the pairings delineated above. Accordingly, all cis trans isomers are expressly included. The monomers may also contain one or more asymmetric centers and thus occur as racemates and racemic mixtures, single enantiomers, individual diastereomers and diastereomeric mixtures. All such isomeric forms of the monomers are expressly included (e.g., the centers bearing CH₂OFG¹ and OFG² can both have the R configuration; or both have the S configuration; or one center can have the R configuration and the other center can have the S configuration and vice versa). R′″ can be, e.g., C₁-C₆ alkyl, preferably CH₃. The tethering attachment point is preferably nitrogen in both F and G.

[0772] In certain embodiments, the carrier may be based on the decalin ring system, e.g., X is CH₂; Y is CR⁹R¹⁰; Z is CR¹¹R¹², and R⁵ and R¹¹ together form C₆ cycloalkyl (H, z=2), or the indane ring system, e.g., X is CH₂; Y is CR⁹R¹⁰; Z is CR¹¹R¹², and R⁵ and R¹¹ together form C₅ cycloalkyl (H, z=1).

[chemical structure]

OFG¹ is preferably attached to a primary carbon, e.g., an exocyclic methylene group (n=1) or ethylene group (n=2) connected to one of C-2, C-3, C-4, or C-5 [—(CH₂)ₙOFG¹ in H]. OFG² is preferably attached directly to one of C-2, C-3, C-4, or C-5 (—OFG² in H). —(CH₂)ₙOFG¹ and OFG² may be disposed in a geminal manner on the ring, i.e., both groups may be attached to the same carbon, e.g., at C-2, C-3, C-4, or C-5. Alternatively, —(CH₂)ₙOFG¹ and OFG² may be disposed in a vicinal manner on the ring, i.e., both groups may be attached to adjacent ring carbon atoms, e.g., —(CH₂)ₙOFG¹ may be attached to C-2 and OFG² may be attached to C-3; —(CH₂)ₙOFG¹ may be attached to C-3 and OFG² may be attached to C-2; —(CH₂)ₙOFG¹ may be attached to C-3 and OFG² may be attached to C-4; or —(CH₂)ₙOFG¹ may be attached to C-4 and OFG² may be attached to C-3; —(CH₂)ₙOFG¹ may be attached to C-4 and OFG² may be attached to C-5; or —(CH₂)ₙOFG¹ may be attached to C-5 and OFG² may be attached to C-4. The decalin or indane-based monomers may therefore contain linkages (e.g., carbon-carbon bonds) wherein bond rotation is restricted about that particular linkage, e.g. restriction resulting from the presence of a ring. Thus, —(CH₂)ₙOFG¹ and OFG² may be cis or trans with respect to one another in any of the pairings delineated above. Accordingly, all cis/trans isomers are expressly included. The monomers may also contain one or more asymmetric centers and thus occur as racemates and racemic mixtures, single enantiomers, individual diastereomers and diastereomeric mixtures. All such isomeric forms of the monomers are expressly included (e.g., the centers bearing CH₂OFG¹ and OFG² can both have the R configuration; or both have the S configuration; or one center can have the R configuration and the other center can have the S configuration and vice versa). In a preferred embodiment, the substituents at C-1 and C-6 are trans with respect to one another. The tethering attachment point is preferably C-6 or C-7.

[0773] Other carriers may include those based on 3-hydroxyproline (J).

[chemical structure]

Thus, —(CH₂)ₙOFG¹ and OFG² may be cis or trans with respect to one another. Accordingly, all cis/trans isomers are expressly included. The monomers may also contain one or more asymmetric centers and thus occur as racemates and racemic mixtures, single enantiomers, individual diastereomers and diastereomeric mixtures. All such isomeric forms of the monomers are expressly included (e.g., the centers bearing CH₂OFG¹ and OFG² can both have the R configuration; or both have the S configuration; or one center can have the R configuration and the other center can have the S configuration and vice versa). The tethering attachment point is preferably nitrogen.

[0774] Details about more representative cyclic, sugar replacement-based carriers can be found in U.S. Pat. Nos. 7,745,608 and 8,017,762, which are herein incorporated by reference in their entireties.

b. Sugar Replacement-Based Monomers (A cyclic)

[0775] Acyclic sugar replacement-based monomers, e.g., sugar replacement-based ligand-conjugated monomers, are also referred to herein as ribose replacement monomer subunit (RRMS) monomer compounds. Preferred acyclic carriers can have formula LCM-3 or LCM-4:

[chemical structure]

[0776] In some embodiments, each of x, y, and z can be, independently of one another, 0, 1, 2, or 3. In formula LCM-3, when y and z are different, then the tertiary carbon can have either the R or S configuration. In preferred embodiments, x is zero and y and z are each 1 in formula LCM-3 (e.g., based on serinol), and y and z are each 1 in formula LCM-3. Each of formula LCM-3 or LCM-4 below can optionally be substituted, e.g., with hydroxy, alkoxy, perhaloalkyl.

[0777] Details about more representative acyclic, sugar replacement-based carriers can be found in U.S. Pat. Nos. 7,745,608 and 8,017,762, which are herein incorporated by reference in their entireties.

[0778] The one or more C₂₂ hydrocarbon chains is conjugated to one or more internal positions on at least one strand. Internal positions of a strand refers to the nucleotide on any position of the strand, except the terminal position from the 3′ end and 5′ end of the strand (e.g., excluding 2 positions: position 1 counting from the 3′ end and position 1 counting from the 5′ end).

[0779] In one embodiment, the one or more C₂₂ hydrocarbon chains is conjugated to one or more internal positions on at least one strand, which include all positions except the terminal two positions from each end of the strand (e.g., excluding 4 positions: positions 1 and 2 counting from the 3′ end and positions 1 and 2 counting from the 5′ end). In one embodiment, the one or more Cu hydrocarbon chains is conjugated to one or more internal positions on at least one strand, which include all positions except the terminal three positions from each end of the strand (e.g., excluding 6 positions: positions 1, 2, and 3 counting from the 3′ end and positions 1, 2, and 3 counting from the 5′ end).

[0780] In one embodiment, the one or more C₂₂ hydrocarbon chains is conjugated to one or more internal positions on at least one strand, except the cleavage site region of the sense strand, for instance, the one or more C₂₂ hydrocarbon chains is not conjugated to positions 9-12 counting from the 5′-end of the sense strand, for example, the one or more C₂₂ hydrocarbon chains is not conjugated to positions 9-11 counting from the 5′-end of the sense strand. Alternatively, the internal positions exclude positions 11-13 counting from the 3′-end of the sense strand.

[0781] In one embodiment, the one or more C₂₂ hydrocarbon chains is conjugated to one or more internal positions on at least one strand, which exclude the cleavage site region of the antisense strand. For instance, the internal positions exclude positions 12-14 counting from the 5′-end of the antisense strand.

[0782] In one embodiment, the one or more C₂₂ hydrocarbon chains is conjugated to one or more internal positions on at least one strand, which exclude positions 11-13 on the sense strand, counting from the 3′-end, and positions 12-14 on the antisense strand, counting from the 5′-end.

[0783] In one embodiment, the one or more C₂₂ hydrocarbon chains is conjugated to one or more of the following internal positions: positions 4-8 and 13-18 on the sense strand, and positions 6-10 and 15-18 on the antisense strand, counting from the 5′end of each strand.

[0784] In one embodiment, the one or more C₂₂ hydrocarbon chains is conjugated to one or more of the following internal positions: positions 5, 6, 7, 15, and 17 on the sense strand, and positions 15 and 17 on the antisense strand, counting from the 5′end of each strand.

[0785] In one embodiment, the one or more C₂₂ hydrocarbon chains is conjugated to position 6 on the sense strand, counting from the 5′end of each strand.

[0786] In some embodiments, the one or more C₂₂ hydrocarbon chains is conjugated to a nucleobase, sugar moiety, or internucleosidic phosphate linkage of the dsRNA agent.

### VI. Synthesis of RNAi Agents of the Invention

[0787] The nucleic acids featured in the disclosure can be synthesized or modified by methods well established in the art, such as those described in “Current protocols in nucleic acid chemistry,” Beaucage, S. L. et al. (Edrs.), John Wiley & Sons, Inc., New York, NY, USA, which is hereby incorporated herein by reference.

[0788] An siRNA can be produced, e.g., in bulk, by a variety of methods. Exemplary methods include; organic synthesis and RNA cleavage, e.g., in vitro cleavage.

### A. Organic Synthesis

[0789] An siRNA can be made by separately synthesizing a single stranded RNA molecule, or each respective strand of a double-stranded RNA molecule, after which the component strands can then be annealed.

[0790] A large bioreactor, e.g., the OligoPilot II from Pharmacia Biotec AB (Uppsala Sweden), can be used to produce a large amount of a particular RNA strand for a given siRNA. The OligoPilotII reactor can efficiently couple a nucleotide using only a 1.5 molar excess of a phosphoramidite nucleotide. To make an RNA strand, ribonucleotides amidites are used. Standard cycles of monomer addition can be used to synthesize the 21 to 23 nucleotide strand for the siRNA. Typically, the two complementary strands are produced separately and then annealed, e.g., after release from the solid support and deprotection.

[0791] Organic synthesis can be used to produce a discrete siRNA species. The complementary of the species to a particular target gene can be precisely specified. For example, the species may be complementary to a region that includes a polymorphism, e.g., a single nucleotide polymorphism. Further the location of the polymorphism can be precisely defined. In some embodiments, the polymorphism is located in an internal region, e.g., at least 4, 5, 7, or 9 nucleotides from one or both of the termini.

B. dsiRNA Cleavage

[0792] siRNAs can also be made by cleaving a larger siRNA. The cleavage can be mediated in vitro or in vivo. For example, to produce iRNAs by cleavage in vitro, the following method can be used:

### 1. In Vitro Transcription.

[0793] dsiRNA is produced by transcribing a nucleic acid (DNA) segment in both directions. For example, the HiScribe™ RNAi transcription kit (New England Biolabs) provides a vector and a method for producing a dsiRNA for a nucleic acid segment that is cloned into the vector at a position flanked on either side by a T7 promoter. Separate templates are generated for T7 transcription of the two complementary strands for the dsiRNA. The templates are transcribed in vitro by addition of T7 RNA polymerase and dsiRNA is produced. Similar methods using PCR and/or other RNA polymerases (e.g., T3 or SP6 polymerase) can also be dotoxins that may contaminate preparations of the recombinant enzymes. In one embodiment, RNA generated by this method is carefully purified to remove endotoxins that may contaminate preparations of the recombinant enzymes.

### 2. In Vitro Cleavage.

[0794] dsRNA is cleaved in vitro into siRNAs, for example, using a Dicer or comparable RNAse III-based activity. For example, the dsiRNA can be incubated in an in vitro extract from Drosophila or using purified components, e.g., a purified RNAse or RISC complex (RNA-induced silencing complex). See, e.g., Ketting et al. Genes Dev 2001 Oct. 15; 15(20):2654-9 and Hammond Science 2001 Aug. 10; 293(5532):1146-50.

[0795] dsiRNA cleavage generally produces a plurality of siRNA species, each being a particular 21 to 23 nt fragment of a source dsiRNA molecule. For example, siRNAs that include sequences complementary to overlapping regions and adjacent regions of a source dsiRNA molecule may be present.

[0796] Regardless of the method of synthesis, the siRNA preparation can be prepared in a solution (e.g., an aqueous and/or organic solution) that is appropriate for formulation. For example, the siRNA preparation can be precipitated and redissolved in pure double-distilled water, and lyophilized. The dried siRNA can then be resuspended in a solution appropriate for the intended formulation process.

C. Making dsRNA Agents Conjugated to One or More C₂₂ Hydrocarbon Chains

[0797] In some embodiments, the one or more C₂₂ hydrocarbon chains is conjugated to the dsRNA agent via a nucleobase, sugar moiety, or internucleosidic linkage.

[0798] Conjugation to purine nucleobases or derivatives thereof can occur at any position including, endocyclic and exocyclic atoms. In some embodiments, the 2-, 6-, 7-, or 8-positions of a purine nucleobase are attached to a C₂₂ hydrocarbon chain. Conjugation to pyrimidine nucleobases or derivatives thereof can also occur at any position. In some embodiments, the 2-, 5-, and 6-positions of a pyrimidine nucleobase can be substituted with a C₂₂ hydrocarbon chain. When one or more Cu hydrocarbon chains is conjugated to a nucleobase, the preferred position is one that does not interfere with hybridization, i.e., does not interfere with the hydrogen bonding interactions needed for base pairing. In one embodiment, the one or more C₂₂ hydrocarbon chains may be conjugated to a nucleobase via a linker containing an alkyl, alkenyl or amide linkage.

[0799] Conjugation to sugar moieties of nucleosides can occur at any carbon atom. Exemplary carbon atoms of a sugar moiety that the one or more C₂₂ hydrocarbon chains can be attached to include the 2′, 3′, and 5′ carbon atoms. The one or more C₂₂ hydrocarbon chains can also be attached to the 1′ position, such as in an abasic residue. In one embodiment, the one or more C₂₂ hydrocarbon chains may be conjugated to a sugar moiety, via a 2′-0 modification, with or without a linker.

[0800] Internucleosidic linkages can also bear the one or more C₂₂ hydrocarbon chains. For phosphorus-containing linkages (e.g., phosphodiester, phosphorothioate, phosphorodithiotate, phosphoroamidate, and the like), the one or more C₂₂ hydrocarbon chains can be attached directly to the phosphorus atom or to an O, N, or S atom bound to the phosphorus atom. For amine- or amide-containing internucleosidic linkages (e.g., PNA), the one or more C₂₂ hydrocarbon chains can be attached to the nitrogen atom of the amine or amide or to an adjacent carbon atom.

[0801] There are numerous methods for preparing conjugates of oligonuclotides. Generally, an oligonucleotide is attached to a conjugate moiety by contacting a reactive group (e.g., OH, SH, amine, carboxyl, aldehyde, and the like) on the oligonucleotide with a reactive group on the conjugate moiety. In some embodiments, one reactive group is electrophilic and the other is nucleophilic.

[0802] For example, an electrophilic group can be a carbonyl-containing functionality and a nucleophilic group can be an amine or thiol. Methods for conjugation of nucleic acids and related oligomeric compounds with and without linking groups are well described in the literature such as, for example, in Manoharan in Antisense Research and Applications, Crooke and LeBleu, eds., CRC Press, Boca Raton, Fla., 1993, Chapter 17, which is incorporated herein by reference in its entirety.

[0803] In one embodiment, a first (complementary) RNA strand and a second (sense) RNA strand can be synthesized separately, wherein one of the RNA strands comprises a pendant C₂₂ hydrocarbon chain, and the first and second RNA strands can be mixed to form a dsRNA. The step of synthesizing the RNA strand preferably involves solid-phase synthesis, wherein individual nucleotides are joined end to end through the formation of internucleotide 3′-5′ phosphodiester bonds in consecutive synthesis cycles.

[0804] In one embodiment, the C₂₂ hydrocarbon chain having a phosphoramidite group is coupled to the 3′-end or 5′-end of either the first (complementary) or second (sense) RNA strand in the last synthesis cycle. In the solid-phase synthesis of an RNA, the nucleotides are initially in the form of nucleoside phosphoramidites. In each synthesis cycle, a further nucleoside phosphoramidite is linked to the —OH group of the previously incorporated nucleotide. If the one or more C₂₂ hydrocarbon chains has a phosphoramidite group, it can be coupled in a manner similar to a nucleoside phosphoramidite to the free OH end of the RNA synthesized previously in the solid-phase synthesis. The synthesis can take place in an automated and standardized manner using a conventional RNA synthesizer. Synthesis of the molecule having the phosphoramidite group may include phosphitylation of a free hydroxyl to generate the phosphoramidite group.

[0805] Synthesis procedures of the one or more C₂₂ hydrocarbon chain-conjugated phosphoramidites are exemplified in Example 1.

[0806] In general, the oligonucleotides can be synthesized using protocols known in the art, for example, as described in Caruthers et al., Methods in Enzymology (1992) 211:3-19; WO 99/54459; Wincott et al., Nucl. Acids Res. (1995) 23:2677-2684; Wincott et al., Methods Mol. Bio., (1997) 74:59; Brennan et al., Biotechnol. Bioeng. (1998) 61:33-45; and U.S. Pat. No. 6,001,311; each of which is hereby incorporated by reference in its entirety. In general, the synthesis of oligonucleotides involves conventional nucleic acid protecting and coupling groups, such as dimethoxytrityl at the 5′-end, and phosphoramidites at the 3′-end. In a non-limiting example, small scale syntheses are conducted on a Expedite 8909 RNA synthesizer sold by Applied Biosystems, Inc. (Weiterstadt, Germany), using ribonucleoside phosphoramidites sold by ChemGenes Corporation (Ashland, Mass.). Alternatively, syntheses can be performed on a 96-well plate synthesizer, such as the instrument produced by Protogene (Palo Alto, Calif.), or by methods such as those described in Usman et al., J. Am. Chem. Soc. (1987) 109:7845; Scaringe, et al., Nucl. Acids Res. (1990) 18:5433; Wincott, et al., Nucl. Acids Res. (1990) 23:2677-2684; and Wincott, et al., Methods Mol. Bio. (1997) 74:59, each of which is hereby incorporated by reference in its entirety.

[0807] The nucleic acid molecules of the present invention may be synthesized separately and joined together post-synthetically, for example, by ligation (Moore et al., Science (1992) 256:9923; WO 93/23569; Shabarova et al., Nucl. Acids Res. (1991) 19:4247; Bellon et al., Nucleosides & Nucleotides (1997) 16:951; Bellon et al., Bioconjugate Chem. (1997) 8:204; or by hybridization following synthesis and/or deprotection. The nucleic acid molecules can be purified by gel electrophoresis using conventional methods or can be purified by high pressure liquid chromatography (HPLC; see Wincott et al., supra, the totality of which is hereby incorporated herein by reference) and re-suspended in water.

### VII. Ligands

[0808] In certain embodiments, the dsRNA agent of the invention is further modified by covalent attachment of one or more conjugate groups. In general, conjugate groups modify one or more properties of the attached dsRNA agent of the invention including but not limited to pharmacodynamic, pharmacokinetic, binding, absorption, cellular distribution, cellular uptake, charge and clearance. Conjugate groups are routinely used in the chemical arts and are linked directly or via an optional linking moiety or linking group to a parent compound such as an oligomeric compound. A preferred list of conjugate groups includes without limitation, intercalators, reporter molecules, polyamines, polyamides, polyethylene glycols, thioethers, polyethers, cholesterols, thiocholesterols, cholic acid moieties, folate, lipids, phospholipids, biotin, phenazine, phenanthridine, anthraquinone, adamantane, acridine, fluoresceins, rhodamines, coumarins and dyes.

[0809] In some embodiments, the dsRNA agent further comprises a targeting ligand that targets a receptor which mediates delivery to a specific tissue, e.g., liver tissue. These targeting ligands can be conjugated in combination with the one or more C₂₂ hydrocarbon chains to enable specific systemic delivery. In one embodiment, a targeting ligand, e.g., one or more GalNAc derivatives, is conjugated to a dsRNA agent of the invention in combination with the one or more C₂₂ hydrocarbon chains. In another embodiment, a targeting ligand, e.g., one or more GalNAc derivatives, is not conjugated to a dsRNA agent of the invention in combination with the one or more C₂₂ hydrocarbon chains.

[0810] Exemplary targeting ligands that targets the receptor mediated delivery to an adipose tissue are peptide ligands such as Angiopep-2, lipoprotein receptor related protein (LRP) ligand, bEnd.3 cell binding ligand; transferrin receptor (TfR) ligand (which can utilize iron transport system in brain and cargo transport into the brain parenchyma); manose receptor ligand (which targets olfactory ensheathing cells, glial cells), glucose transporter protein, and LDL receptor ligand.

[0811] Preferred conjugate groups amenable to the present invention include lipid moieties such as a cholesterol moiety (Letsinger et al., Proc. Natl. Acad. Sci. USA, 1989, 86, 6553); cholic acid (Manoharan et al., Bioorg. Med. Chem. Lett., 1994, 4, 1053); a thioether, e.g., hexyl-S-tritylthiol (Manoharan et al., Ann. N.Y. Acad. Sci., 1992, 660, 306; Manoharan et al., Bioorg. Med. Chem. Let., 1993, 3, 2765); a thiocholesterol (Oberhauser et al., Nucl. Acids Res., 1992, 20, 533); an aliphatic chain, e.g., dodecandiol or undecyl residues (Saison-Behmoaras et al., EMBO J., 1991, 10, 111; Kabanov et al., FEBS Lett., 1990, 259, 327; Svinarchuk et al., Biochimie, 1993, 75, 49); a phospholipid, e.g., di-hexadecyl-rac-glycerol or triethylammonium-1,2-di-O-hexadecyl-rac-glycero-3-H-phosphonate (Manoharan et al., Tetrahedron Lett., 1995, 36, 3651; Shea et al., Nucl. Acids Res., 1990, 18, 3777); a polyamine or a polyethylene glycol chain (Manoharan et al., Nucleosides & Nucleotides, 1995, 14, 969); adamantane acetic acid (Manoharan et al., Tetrahedron Lett., 1995, 36, 3651); a palmityl moiety (Mishra et al., Biochim. Biophys. Acta, 1995, 1264, 229); or an octadecylamine or hexylamino-carbonyl-oxycholesterol moiety (Crooke et al., J. Pharmacol. Exp. Ther., 1996, 277, 923).

[0812] Generally, a wide variety of entities, e.g., ligands, can be coupled to the oligomeric compounds described herein. Ligands can include naturally occurring molecules, or recombinant or synthetic molecules. Exemplary ligands include, but are not limited to, polylysine (PLL), poly L-aspartic acid, poly L-glutamic acid, styrene-maleic acid anhydride copolymer, poly(L-lactide-co-glycolied) copolymer, divinyl ether-maleic anhydride copolymer, N-(2-hydroxypropyl)methacrylamide copolymer (HMPA), polyethylene glycol (PEG, e.g., PEG-2K, PEG-5K, PEG-101C, PEG-12K, PEG-15K, PEG-20K, PEG-40K), MPEG, [MPEG]2, polyvinyl alcohol (PVA), polyurethane, poly(2-ethylacryllic acid), N-isopropylacrylamide polymers, polyphosphazine, polyethylenimine, cationic groups, spermine, spermidine, polyamine, pseudopeptide-polyamine, peptidomimetic polyamine, dendrimer polyamine, arginine, amidine, protamine, cationic lipid, cationic porphyrin, quaternary salt of a polyamine, thyrotropin, melanotropin, lectin, glycoprotein, surfactant protein A, mucin, glycosylated polyaminoacids, transferrin, bisphosphonate, polyglutamate, polyaspartate, aptamer, asialofetuin, hyaluronan, procollagen, immunoglobulins (e.g., antibodies), insulin, transferrin, albumin, sugar-albumin conjugates, intercalating agents (e.g., acridines), cross-linkers (e.g. psoralen, mitomycin C), porphyrins (e.g., TPPC4, texaphyrin, Sapphyrin), polycyclic aromatic hydrocarbons (e.g., phenazine, dihydrophenazine), artificial endonucleases (e.g., EDTA), lipophilic molecules (e.g, steroids, bile acids, cholesterol, cholic acid, adamantane acetic acid, 1-pyrene butyric acid, dihydrotestosterone, 1,3-Bis-O(hexadecyl)glycerol, geranyloxyhexyl group, hexadecylglycerol, bomeol, menthol, 1,3-propanediol, heptadecyl group, palmitic acid, myristic acid,O3-(oleoyl)lithocholic acid, O3-(oleoyl)cholenic acid, dimethoxytrityl, or phenoxazine), peptides (e.g., an alpha helical peptide, amphipathic peptide, RGD peptide, cell permeation peptide, endosomolytic/fusogenic peptide), alkylating agents, phosphate, amino, mercapto, polyamino, alkyl, substituted alkyl, radiolabeled markers, enzymes, haptens (e.g. biotin), transport/absorption facilitators (e.g., naproxen, aspirin, vitamin E, folic acid), synthetic ribonucleases (e.g., imidazole, bisimidazole, histamine, imidazole clusters, acridine-imidazole conjugates, Eu3+ complexes of tetraazamacrocycles), dinitrophenyl, HRP, AP, antibodies, hormones and hormone receptors, lectins, carbohydrates, multivalent carbohydrates, vitamins (e.g., vitamin A, vitamin E, vitamin K, vitamin B, e.g., folic acid, B12, riboflavin, biotin and pyridoxal), vitamin cofactors, lipopolysaccharide, an activator of p38 MAP kinase, an activator of NF-κB, taxon, vincristine, vinblastine, cytochalasin, nocodazole, japlakinolide, latrunculin A, phalloidin, swinholide A, indanocine, myoservin, tumor necrosis factor alpha (TNFalpha), interleukin-1 beta, gamma interferon, natural or recombinant low density lipoprotein (LDL), natural or recombinant high-density lipoprotein (HDL), and a cell-permeation agent (e.g., a.helical cell-permeation agent).

[0813] Peptide and peptidomimetic ligands include those having naturally occurring or modified peptides, e.g., D or L peptides; α, β, or γ peptides; N-methyl peptides; azapeptides; peptides having one or more amide, i.e., peptide, linkages replaced with one or more urea, thiourea, carbamate, or sulfonyl urea linkages; or cyclic peptides. A peptidomimetic (also referred to herein as an oligopeptidomimetic) is a molecule capable of folding into a defined three-dimensional structure similar to a natural peptide. The peptide or peptidomimetic ligand can be about 5-50 amino acids long, e.g., about 5, 10, 15, 20, 25, 30, 35, 40, 45, or 50 amino acids long.

[0814] Exemplary amphipathic peptides include, but are not limited to, cecropins, lycotoxins, paradaxins, buforin, CPF, bombinin-like peptide (BLP), cathelicidins, ceratotoxins, S. clava peptides, hagfish intestinal antimicrobial peptides (HFIAPs), magainines, brevinins-2, dermaseptins, melittins, pleurocidin, H₂A peptides, Xenopus peptides, esculentinis-1, and caerins.

[0815] As used herein, the term “endosomolytic ligand” refers to molecules having endosomolytic properties. Endosomolytic ligands promote the lysis of and/or transport of the composition of the invention, or its components, from the cellular compartments such as the endosome, lysosome, endoplasmic reticulum (ER), Golgi apparatus, microtubule, peroxisome, or other vesicular bodies within the cell, to the cytoplasm of the cell. Some exemplary endosomolytic ligands include, but are not limited to, imidazoles, poly or oligoimidazoles, linear or branched polyethyleneimines (PEIs), linear and brached polyamines, e.g. spermine, cationic linear and branched polyamines, polycarboxylates, polycations, masked oligo or poly cations or anions, acetals, polyacetals, ketals/polyketals, orthoesters, linear or branched polymers with masked or unmasked cationic or anionic charges, dendrimers with masked or unmasked cationic or anionic charges, polyanionic peptides, polyanionic peptidomimetics, pH-sensitive peptides, natural and synthetic fusogenic lipids, natural and synthetic cationic lipids.

[0816] Exemplary endosomolytic/fusogenic peptides include, but are not limited to,

(SEQ ID NO: 91)
AALEALAEALEALAEALEALAEAAAAGGC (GALA);
(SEQ ID NO: 92)
AALAEALAEALAEALAEALAEALAAAAGGC (EALA);
(SEQ ID NO: 93)
ALEALAEALEALAEA;
(SEQ ID NO: 94)
GLFEAIEGFIENGWEGMIWDYG (INF-7);
(SEQ ID NO: 95)
GLFGAIAGFIENGWEGMIDGWYG (Inf HA-2);
(SEQ ID NO: 96)
GLFEAIEGFIENGWEGMIDGWYGCGLFEAIEGFIENGWEGMID GWYGC (diINF-7);
(SEQ ID NO: 97)
GLFEAIEGFIENGWEGMIDGGCGLFEAIEGFIENGWEGMIDGGC (diINF-3);
(SEQ ID NO: 98)
GLFGALAEALAEALAEHLAEALAEALEALAAGGSC (GLF);
(SEQ ID NO: 99)
GLFEAIEGFIENGWEGLAEALAEALEALAAGGSC (GALA-INF3);
(SEQ ID NO: 100)
GLF EAI EGFI ENGW EGnI DG K GLF EAI EGFI ENGW EGnI DG (INF-5, n is norleucine);
(SEQ ID NO: 101)
LFEALLELLESLWELLLEA (JTS-1);
(SEQ ID NO: 102)
GLFKALLKLLKSLWKLLLKA (ppTG1);
(SEQ ID NO: 103)
GLFRALLRLLRSLWRLLLRA (ppTG20);
(SEQ ID NO: 104)
WEAKLAKALAKALAKHLAKALAKALKACEA (KALA);
(SEQ ID NO: 105)
GLFFEAIAEFIEGGWEGLIEGC (HA);
(SEQ ID NO: 106)
GIGAVLKVLTTGLPALISWIKRKRQQ (Melittin);
(SEQ ID NO: 107)
H5WYG;
and
(SEQ ID NO: 108)
CHK6HC.

[0817] Without wishing to be bound by theory, fusogenic lipids fuse with and consequently destabilize a membrane. Fusogenic lipids usually have small head groups and unsaturated acyl chains. Exemplary fusogenic lipids include, but are not limited to, 1,2-dileoyl-sn-3-phosphoethanolamine (DOPE), phosphatidylethanolamine (POPE), palmitoyloleoylphosphatidylcholine (POPC), (6Z,9Z,28Z,31Z)-heptatriaconta-6,9,28,31-tetraen-19-ol (Di-Lin), N-methyl(2,2-di((9Z,12Z)-octadeca-9,12-dienyl)-1,3-dioxolan-4-yl)methanamine (DLin-k-DMA) and N-methyl-2-(2,2-di((9Z,12Z)-octadeca-9,12-dienyl)-1,3-dioxolan-4-yl)ethanamine (also refered to as XTC herein).

[0818] Synthetic polymers with endosomolytic activity amenable to the present invention are described in U.S. Pat. App. Pub. Nos. 2009/0048410; 2009/0023890; 2008/0287630; 2008/0287628; 2008/0281044; 2008/0281041; 2008/0269450; 2007/0105804; 20070036865; and 2004/0198687, contents of which are hereby incorporated by reference in their entirety.

[0819] Exemplary cell permeation peptides include, but are not limited to,

```
(SEQ ID NO: 109)
RQIKIWFQNRRMKWKK (penetratin);
(SEQ ID NO: 110)
GRKKRRQRRRPPQC (Tat fragment 48-60);
(SEQ ID NO: 111)
GALFLGWLGAAGSTMGAWSQPKKKRKV (signal sequence based peptide);
  (SEQ ID NO: 112)
LLIILRRRIRKQAHAHSK (PVEC);
(SEQ ID NO: 113)
GWTLNSAGYLLKINLKALAALAKKIL (transportan);
(SEQ ID NO: 114)
KLALKLALKALKAALKLA (amphiphilic model peptide);
(SEQ ID NO: 115)
RRRRRRRRR (Arg9);
(SEQ ID NO: 116)
KFFKFFKFFK (Bacterial cell wall permeating peptide);
(SEQ ID NO: 117)
LLGDFFRKSKEKIGKEFKRIVQRIKDFLRNLVPRTES (LL-37);
(SEQ ID NO: 118)
SWLSKTAKKLENSAKKRISEGIAIAIQGGPR (cecropin P1);
(SEQ ID NO: 119)
ACYCRIPACIAGERRYGTCIYQGRLWAFCC (α-defensin);
(SEQ ID NO: 120)
DHYNCVSSGGQCLYSACPIFTKIQGTCYRGKAKCCK (β-defensin);
(SEQ ID NO: 121)
RRRPRPPYLPRPRPPPFFPPRLPPRIPPGFPPRFPPRFPGKR-NH2 (PR-39);
(SEQ ID NO: 122)
ILPWKWPWWPWRR-NH2 (indolicidin);
(SEQ ID NO: 123)
AAVALLPAVLLALLAP (RFGF);
  (SEQ ID NO: 124)
AALLPVLLAAP (RFGF analogue);
and
(SEQ ID NO: 125)
RKCRIVVIRVCR (bactenecin).
```

[0820] Exemplary cationic groups include, but are not limited to, protonated amino groups, derived from e.g., O-AMINE (AMINE=NH₂; alkylamino, dialkylamino, heterocyclyl, arylamino, diaryl amino, heteroaryl amino, or diheteroaryl amino, ethylene diamine, polyamino); aminoalkoxy, e.g., O(CH₂)ₙAMINE, (e.g., AMINE=NH₂; alkylamino, dialkylamino, heterocyclyl, arylamino, diaryl amino, heteroaryl amino, or diheteroaryl amino, ethylene diamine, polyamino); amino (e.g. NH₂; alkylamino, dialkylamino, heterocyclyl, arylamino, diaryl amino, heteroaryl amino, diheteroaryl amino, or amino acid); and NH(CH₂CH₂NH)ₙCH₂CH₂-AMINE (AMINE=NH₂; alkylamino, dialkylamino, heterocyclyl, arylamino, diaryl amino, heteroaryl amino, or diheteroaryl amino).

[0821] As used herein the term “targeting ligand” refers to any molecule that provides an enhanced affinity for a selected target, e.g., a cell, cell type, tissue, organ, region of the body, or a compartment, e.g., a cellular, tissue or organ compartment. Some exemplary targeting ligands include, but are not limited to, antibodies, antigens, folates, receptor ligands, carbohydrates, aptamers, integrin receptor ligands, chemokine receptor ligands, transferrin, biotin, serotonin receptor ligands, PSMA, endothelin, GCPII, somatostatin, LDL and HDL ligands.

[0822] Carbohydrate based targeting ligands include, but are not limited to, D-galactose, multivalent galactose, N-acetyl-D-galactosamine (GalNAc), multivalent GalNAc, e.g. GalNAc₂ and GalNAc₃ (GalNAc and multivalent GalNAc are collectively referred to herein as GalNAc conjugates); D-mannose, multivalent mannose, multivalent lactose, N-acetyl-glucosamine, Glucose, multivalent Glucose, multivalent fucose, glycosylated polyaminoacids and lectins. The term multivalent indicates that more than one monosaccharide unit is present. Such monosaccharide subunits can be linked to each other through glycosidic linkages or linked to a scaffold molecule.

[0823] A number of folate and folate analogs amenable to the present invention as ligands are described in U.S. Pat. Nos. 2,816,110; 5,552,545; 6,335,434 and 7,128,893, contents of which are herein incorporated in their entireties by reference.

[0824] As used herein, the terms “PK modulating ligand” and “PK modulator” refers to molecules which can modulate the pharmacokinetics of the composition of the invention. Some exemplary PK modulator include, but are not limited to, lipophilic molecules, bile acids, sterols, phospholipid analogues, peptides, protein binding agents, vitamins, fatty acids, phenoxazine, aspirin, naproxen, ibuprofen, suprofen, ketoprofen, (5)-(+)-pranoprofen, carprofen, PEGS, biotin, and transthyretia-binding ligands (e.g., tetraiidothyroacetic acid, 2, 4, 6-triiodophenol and flufenamic acid). Oligomeric compounds that comprise a number of phosphorothioate intersugar linkages are also known to bind to serum protein, thus short oligomeric compounds, e.g. oligonucleotides of comprising from about 5 to 30 nucleotides (e.g., 5 to 25 nucleotides, preferably 5 to 20 nucleotides, e.g., 5, 6, 7, 8, 9, 10, 11, 12, 13, 14, 15, 16, 17, 18, 19, or 20 nucleotides), and that comprise a plurality of phosphorothioate linkages in the backbone are also amenable to the present invention as ligands (e.g. as PK modulating ligands). The PK modulating oligonucleotide can comprise at least 3, 4, 5, 6, 7, 8, 9, 10, 11, 12, 13, 14, 15 or more phosphorothioate and/or phosphorodithioate linkages. In some embodiments, all internucleotide linkages in PK modulating oligonucleotide are phosphorothioate and/or phosphorodithioates linkages. In addition, aptamers that bind serum components (e.g. serum proteins) are also amenable to the present invention as PK modulating ligands. Binding to serum components (e.g. serum proteins) can be predicted from albumin binding assays, such as those described in Oravcova, et al., Journal of Chromatography B (1996), 677: 1-27.

[0825] When two or more ligands are present, the ligands can all have same properties, all have different properties or some ligands have the same properties while others have different properties. For example, a ligand can have targeting properties, have endosomolytic activity or have PK modulating properties. In a preferred embodiment, all the ligands have different properties.

[0826] The ligand or tethered ligand can be present on a monomer when said monomer is incorporated into a component of the dsRNA agent of the invention (e.g., a dsRNA agent of the invention or linker). In some embodiments, the ligand can be incorporated via coupling to a “precursor” monomer after said “precursor” monomer has been incorporated into a component of the dsRNA agent of the invention (e.g., a dsRNA agent of the invention or linker). For example, a monomer having, e.g., an amino-terminated tether (i.e., having no associated ligand), e.g., monomer-linker-NH₂ can be incorporated into a component of the compounds of the invention (e.g., a dsRNA agent of the invention or linker). In a subsequent operation, i.e., after incorporation of the precursor monomer into a component of the compounds of the invention (e.g., a dsRNA agent of the invention or linker), a ligand having an electrophilic group, e.g., a pentafluorophenyl ester or aldehyde group, can subsequently be attached to the precursor monomer by coupling the electrophilic group of the ligand with the terminal nucleophilic group of the precursor monomer's tether.

[0827] In another example, a monomer having a chemical group suitable for taking part in Click Chemistry reaction can be incorporated e.g., an azide or alkyne terminated tether/linker. In a subsequent operation, i.e., after incorporation of the precursor monomer into the strand, a ligand having complementary chemical group, e.g. an alkyne or azide can be attached to the precursor monomer by coupling the alkyne and the azide together.

[0828] In some embodiments, ligand can be conjugated to nucleobases, sugar moieties, or internucleosidic linkages of the dsRNA agent of the invention. Conjugation to purine nucleobases or derivatives thereof can occur at any position including, endocyclic and exocyclic atoms. In some embodiments, the 2-, 6-, 7-, or 8-positions of a purine nucleobase are attached to a conjugate moiety. Conjugation to pyrimidine nucleobases or derivatives thereof can also occur at any position. In some embodiments, the 2-, 5-, and 6-positions of a pyrimidine nucleobase can be substituted with a conjugate moiety. When a ligand is conjugated to a nucleobase, the preferred position is one that does not interfere with hybridization, i.e., does not interfere with the hydrogen bonding interactions needed for base pairing.

[0829] Conjugation to sugar moieties of nucleosides can occur at any carbon atom. Example carbon atoms of a sugar moiety that can be attached to a conjugate moiety include the 2′, 3′, and 5′ carbon atoms. The 1′ position can also be attached to a conjugate moiety, such as in an abasic residue. Internucleosidic linkages can also bear conjugate moieties. For phosphorus-containing linkages (e.g., phosphodiester, phosphorothioate, phosphorodithiotate, phosphoroamidate, and the like), the conjugate moiety can be attached directly to the phosphorus atom or to an O, N, or S atom bound to the phosphorus atom. For amine- or amide-containing internucleosidic linkages (e.g., PNA), the conjugate moiety can be attached to the nitrogen atom of the amine or amide or to an adjacent carbon atom.

[0830] There are numerous methods for preparing conjugates of oligonuclotides. Generally, an oligonucleotide is attached to a conjugate moiety by contacting a reactive group (e.g., OH, SH, amine, carboxyl, aldehyde, and the like) on the oligonucleotide with a reactive group on the conjugate moiety. In some embodiments, one reactive group is electrophilic and the other is nucleophilic.

[0831] For example, an electrophilic group can be a carbonyl-containing functionality and a nucleophilic group can be an amine or thiol. Methods for conjugation of nucleic acids and related oligomeric compounds with and without linking groups are well described in the literature such as, for example, in Manoharan in Antisense Research and Applications, Crooke and LeBleu, eds., CRC Press, Boca Raton, Fla., 1993, Chapter 17, which is incorporated herein by reference in its entirety.

[0832] The ligand can be attached to the dsRNA agent of the inventions via a linker or a carrier monomer, e.g., a ligand carrier. The carriers include (i) at least one “backbone attachment point,” preferably two “backbone attachment points” and (ii) at least one “tethering attachment point.” A “backbone attachment point” as used herein refers to a functional group, e.g. a hydroxyl group, or generally, a bond available for, and that is suitable for incorporation of the carrier monomer into the backbone, e.g., the phosphate, or modified phosphate, e.g., sulfur containing, backbone, of an oligonucleotide. A “tethering attachment point” (TAP) in refers to an atom of the carrier monomer, e.g., a carbon atom or a heteroatom (distinct from an atom which provides a backbone attachment point), that connects a selected moiety. The selected moiety can be, e.g., a carbohydrate, e.g. monosaccharide, disaccharide, trisaccharide, tetrasaccharide, oligosaccharide and polysaccharide. Optionally, the selected moiety is connected by an intervening tether to the carrier monomer. Thus, the carrier will often include a functional group, e.g., an amino group, or generally, provide a bond, that is suitable for incorporation or tethering of another chemical entity, e.g., a ligand to the constituent atom.

[0833] Representative U.S. patents that teach the preparation of conjugates of nucleic acids include, but are not limited to, U.S. Pat. Nos. 4,828,979; 4,948,882; 5,218,105; 5,525,465; 5,541,313; 5,545,730; 5,552,538; 5,578,717, 5,580,731; 5,580,731; 5,591,584; 5,109,124; 5,118,802; 5,138,045; 5,414,077; 5,486,603; 5,512,439; 5,578,718; 5,608,046; 4,587,044; 4,605,735; 4,667,025; 4,762,779; 4,789,737; 4,824,941; 4,835,263; 4,876,335; 4,904,582; 4,958,013; 5,082,830; 5,112,963; 5,214,136; 5,082,830; 5,112,963; 5,149,782; 5,214,136; 5,245,022; 5,254,469; 5,258,506; 5,262,536; 5,272,250; 5,292,873; 5,317,098; 5,371,241, 5,391,723; 5,416,203, 5,451,463; 5,510,475; 5,512,667; 5,514,785; 5,565,552; 5,567,810; 5,574,142; 5,585,481; 5,587,371; 5,595,726; 5,597,696; 5,599,923; 5,599,928; 5,672,662; 5,688,941; 5,714,166; 6,153,737; 6,172,208; 6,300,319; 6,335,434; 6,335,437; 6,395,437; 6,444,806; 6,486,308; 6,525,031; 6,528,631; 6,559,279; contents of which are herein incorporated in their entireties by reference.

[0834] In some embodiments, the dsRNA agent further comprises a targeting ligand that targets a liver tissue. In some embodiments, the targeting ligand is a carbohydrate-based ligand. In one embodiment, the targeting ligand is a GalNAc conjugate.

[0835] In certain embodiments, the dsRNA agent of the invention further comprises a ligand having a structure shown below:

[chemical structure]

[0836] wherein:
   [0837] L^{G} is independently for each occurrence a ligand, e.g., carbohydrate, e.g. monosaccharide, disaccharide, trisaccharide, tetrasaccharide, polysaccharide; and
   [0838] Z′, Z″, Z′″ and Z″″ are each independently for each occurrence 0 or S.

[0839] In certain embodiments, the dsRNA agent of the invention comprises a ligand of Formula (II), (III), (IV) or (V):

[chemical structure]

[0840] wherein:
[0841] q^{2A}, q^{2B}, q^{3A}, q^{3B}, q^{4A}, q^{4B}, q^{5A}, q^{5B} and q^{5C} represent independently for each occurrence 0-20 and wherein the repeating unit can be the same or different;
[0842] Q and Q′ are independently for each occurrence is absent, —(P⁷-Q⁷-R⁷)ₚ-T⁷- or -T⁷-Q⁷-T^{7′}-B-T^{8′}-Q⁸-T⁸;
[0843] p^{2A}, p^{2B}, p^{3A}, p^{3B}, p^{4A}, p^{4B}, p^{5A}, p^{5B}, p^{5C}, p⁷, T^{2A}, T^{2B}, T^{3A}, T^{3B}, T^{4A}, T^{4B}, T^{5A}, T^{5B}, T^{5C}, T⁷, T^{7′}, T⁸ and T^{8′} are each independently for each occurrence absent, CO, NH, O, S, OC(O), NHC(O), CH₂, CH₂NH or CH₂O;
[0844] B is —CH₂—N(B^{L})—CH₂—;
[0845] B^{L} is -T^{B}-Q^{B}-T^{B′}-R^{x};
[0846] Q^{2A}, Q^{2B}, Q^{3A}, Q^{3B}, Q^{4A}, Q^{4B}, Q^{5A}, Q^{5B}, Q^{5C}, Q⁷, Q⁸ and Q^{B} are independently for each occurrence absent, alkylene, substituted alkylene and wherein one or more methylenes can be interrupted or terminated by one or more of O, S, S(O), SO₂, N(R^{N}), C(R′)═(R′), C≡C or C(O);
[0847] T^{B} and T^{B′} are each independently for each occurrence absent, CO, NH, O, S, OC(O), OC(O)O, NHC(O), NHC(O)NH, NHC(O)O, CH₂, CH₂NH or CH₂O;
[0848] R^{x} is a lipophile (e.g., cholesterol, cholic acid, adamantane acetic acid, 1-pyrene butyric acid, dihydrotestosterone, 1,3-Bis-O(hexadecyl)glycerol, geranyloxyhexyl group, hexadecylglycerol, bomeol, menthol, 1,3-propanediol, heptadecyl group, palmitic acid, myristic acid, O3-(oleoyl)lithocholic acid, O3-(oleoyl)cholenic acid, dimethoxytrityl, or phenoxazine), a vitamin (e.g., folate, vitamin A, vitamin E, biotin, pyridoxal), a peptide, a carbohydrate (e.g., monosaccharide, disaccharide, trisaccharide, tetrasaccharide, oligosaccharide, polysaccharide), an endosomolytic component, a steroid (e.g., uvaol, hecigenin, diosgenin), a terpene (e.g., triterpene, e.g., sarsasapogenin, Friedelin, epifriedelanol derivatized lithocholic acid), or a cationic lipid;
[0849] R¹, R², R^{2A}, R^{2B}, R^{3A}, R^{3B}, R^{4A}, R^{4B}, R^{5A}, R^{5B}, R^{5C}, R⁷ are each independently for each occurrence absent, NH, O, S, CH₂, C(O)O, C(O)NH, NHCH(R^{a})C(O), —C(O)—CH(R^{a}) NH—, CO, CH═N—O,

[chemical structure]

or heterocyclyl;
[0850] L¹, L^{2A}, L^{2B}, L^{3A}, L^{3B}, L^{4A}, L^{4B}, L^{5A}, L^{5B} and L^{5C} are each independently for each occurrence a carbohydrate, e.g., monosaccharide, disaccharide, trisaccharide, tetrasaccharide, oligosaccharide and polysaccharide;
[0851] R′ and R″ are each independently H, C₁-C₆ alkyl, OH, SH, or N(R^{N})₂;
[0852] R^{N} is independently for each occurrence H, methyl, ethyl, propyl, isopropyl, butyl or benzyl;
[0853] R^{a} is H or amino acid side chain;
[0854] Z′, Z″, Z′″ and Z″″ are each independently for each occurrence 0 or S;
[0855] p represent independently for each occurrence 0-20.

[0856] As discussed above, because the ligand can be conjugated to the iRNA agent via a linker or carrier, and because the linker or carrier can contain a branched linker, the iRNA agent can then contain multiple ligands via the same or different backbone attachment points to the carrier, or via the branched linker(s). For instance, the branchpoint of the branched linker may be a bivalent, trivalent, tetravalent, pentavalent, or hexavalent atom, or a group presenting such multiple valencies. In certain embodiments, the branchpoint is —N, —N(Q)-C, —O—C, —S—C, —SS—C, —C(O)N(Q)-C, —OC(O)N(Q)-C, N(Q)C(O)—C, or N(Q)C(O)O—C; wherein Q is independently for each occurrence H or optionally substituted alkyl. In other embodiment, the branchpoint is glycerol or glycerol derivative.

[0857] Suitable ligands for use in the compositions of the invention are described in U.S. Pat. Nos. 8,106,022, 8,450,467, 8,882,895, 9,352,048, 9,370,581, 9,370,582, 9,867,882, 10,806,791, and 11,110,174, and U.S. Patent Publication Nos. 2009/239814, 200/9247608, 2012/136042, 2013/178512, 2014/179761, 2015/011615, 2015/119444, 2015/119445, 2016/051691, 2016/375137, 2018/326070, 2019/099493, 2019/184018, and 2020/297853, the entire contents of each of which are incorporated herein by reference.

[0858] In some embodiments, a suitable ligand is a ligand disclosed in WO 2019/055633, the entire contents of which are incorporated herein by reference. In one embodiment the ligand comprises the structure below:

[chemical structure]

[0859] In certain embodiments, the dsRNA agent of the invention comprises a ligand of structure:

[chemical structure]

[0860] In certain embodiments, the dsRNA agent of the invention is conjugated with a ligand of structure:

[chemical structure]

[0861] In certain embodiments, the dsRNA agent of the invention comprises a ligand of structure:

[chemical structure]

[0862] In certain embodiments, the dsRNA agent of the invention comprises a monomer of structure:

[chemical structure]

[0863] In some embodiments, the RNAi agent is attached to the carbohydrate conjugate via a linker as shown in the following schematic, wherein X is O or S

[chemical structure]

[0864] In some embodiments, the RNAi agent is conjugated to L96 as defined in Table 1 and shown below:

[chemical structure]

[0865] Synthesis of above described ligands and monomers is described, for example, in U.S. Pat. No. 8,106,022, content of which are incorporated herein by reference in their entirety.

### VIII. Delivery of an RNAi Agent of the Disclosure

[0866] The delivery of a RNAi agent of the disclosure to a cell e.g., a cell within a subject, such as a human subject (e.g., a subject in need thereof, such as a subject having a metabolic disorder, can be achieved in a number of different ways. For example, delivery may be performed by contacting a cell with an RNAi agent of the disclosure either in vitro or in vivo. In vivo delivery may also be performed directly by administering a composition comprising an RNAi agent, e.g., a dsRNA, to a subject. Alternatively, in vivo delivery may be performed indirectly by administering one or more vectors that encode and direct the expression of the RNAi agent. These alternatives are discussed further below.

[0867] In general, any method of delivering a nucleic acid molecule (in vitro or in vivo) can be adapted for use with a RNAi agent of the disclosure (see e.g., Akhtar S. and Julian R L., (1992) Trends Cell. Biol. 2(5):139-144 and WO94/02595, which are incorporated herein by reference in their entireties). For in vivo delivery, factors to consider in order to deliver an RNAi agent include, for example, biological stability of the delivered agent, prevention of non-specific effects, and accumulation of the delivered agent in the target tissue. The non-specific effects of an RNAi agent can be minimized by local administration, for example, by direct injection or implantation into a tissue or topically administering the preparation. Local administration to a treatment site maximizes local concentration of the agent, limits the exposure of the agent to systemic tissues that can otherwise be harmed by the agent or that can degrade the agent, and permits a lower total dose of the RNAi agent to be administered. Several studies have shown successful knockdown of gene products when an RNAi agent is administered locally. For example, pulmonary delivery, e.g., inhalation, of a dsRNA, e.g., SOD1, has been shown to effectively knockdown gene and protein expression in lung tissue and that there is excellent uptake of the dsRNA by the bronchioles and alveoli of the lung. Intraocular delivery of a VEGF dsRNA by intravitreal injection in cynomolgus monkeys (Tolentino, M J. et al., (2004) Retina 24:132-138) and subretinal injections in mice (Reich, S J. et al. (2003) Mol. Vis. 9:210-216) were also both shown to prevent neovascularization in an experimental model of age-related macular degeneration. In addition, direct intratumoral injection of a dsRNA in mice reduces tumor volume (Pille, J. et al. (2005) Mol. Ther. 11:267-274) and can prolong survival of tumor-bearing mice (Kim, W J. et al., (2006) Mol. Ther. 14:343-350; Li, S. et al., (2007) Mol. Ther. 15:515-523). RNA interference has also shown success with local delivery to the CNS by direct injection (Dom, G. et al., (2004) Nucleic Acids 32:e49; Tan, P H. et al. (2005) Gene Ther. 12:59-66; Makimura, H. et al. (2002) BMC Neurosci. 3:18; Shishkina, G T., et al. (2004) Neuroscience 129:521-528; Thakker, E R., et al. (2004) Proc. Natl. Acad. Sci. USA. 101:17270-17275; Akaneya, Y., et al. (2005) J. Neurophysiol. 93:594-602) and to the lungs by intranasal administration (Howard, K A. et al., (2006) Mol. Ther. 14:476-484; Zhang, X. et al., (2004) J. Biol. Chem. 279:10677-10684; Bitko, V. et al., (2005) Nat. Med. 11:50-55). For administering a RNAi agent systemically for the treatment of a disease, the RNA can be modified or alternatively delivered using a drug delivery system; both methods act to prevent the rapid degradation of the dsRNA by endo- and exo-nucleases in vivo. Modification of the RNA or the pharmaceutical carrier can also permit targeting of the RNAi agent to the target tissue and avoid undesirable off-target effects (e.g., without wishing to be bound by theory, use of GNAs as described herein has been identified to destabilize the seed region of a dsRNA, resulting in enhanced preference of such dsRNAs for on-target effectiveness, relative to off-target effects, as such off-target effects are significantly weakened by such seed region destabilization). RNAi agents can be modified by chemical conjugation to lipophilic groups such as cholesterol to enhance cellular uptake and prevent degradation. For example, a RNAi agent directed against ApoB conjugated to a lipophilic cholesterol moiety was injected systemically into mice and resulted in knockdown of apoB mRNA in both the liver and jejunum (Soutschek, J. et al., (2004) Nature 432:173-178). Conjugation of an RNAi agent to an aptamer has been shown to inhibit tumor growth and mediate tumor regression in a mouse model of prostate cancer (McNamara, J O. et al., (2006) Nat. Biotechnol. 24:1005-1015). In an alternative embodiment, the RNAi agent can be delivered using drug delivery systems such as a nanoparticle, a dendrimer, a polymer, liposomes, or a cationic delivery system. Positively charged cationic delivery systems facilitate binding of molecule RNAi agent (negatively charged) and also enhance interactions at the negatively charged cell membrane to permit efficient uptake of an RNAi agent by the cell. Cationic lipids, dendrimers, or polymers can either be bound to an RNAi agent, or induced to form a vesicle or micelle (see e.g., Kim S H. et al., (2008) Journal of Controlled Release 129(2):107-116) that encases an RNAi agent. The formation of vesicles or micelles further prevents degradation of the RNAi agent when administered systemically. Methods for making and administering cationic-RNAi agent complexes are well within the abilities of one skilled in the art (see e.g., Sorensen, D R., et al. (2003) J. Mot Biol 327:761-766; Verma, U N. et al., (2003) Clin. Cancer Res. 9:1291-1300; Arnold, A S et al. (2007) J. Hypertens. 25:197-205, which are incorporated herein by reference in their entirety). Some non-limiting examples of drug delivery systems useful for systemic delivery of RNAi agents include DOTAP (Sorensen, D R., et al (2003), supra; Verma, U N. et al., (2003), supra), Oligofectamine, “solid nucleic acid lipid particles” (Zimmermann, T S. et at, (2006) Nature 441:111-114), cardiolipin (Chien, P Y. et al., (2005) Cancer Gene Ther. 12:321-328; Pal, A. et al., (2005) Int J. Oncol. 26:1087-1091), polyethyleneimine (Bonnet M E. et al., (2008) Pharm. Res. August 16 Epub ahead of print; Aigner, A. (2006) J. Biomed. Biotechnol. 71659), Arg-Gly-Asp (RGD) peptides (Liu, S. (2006) Mol. Pharm. 3:472-487), and polyamidoamines (Tomalia, D A. et al., (2007) Biochem. Soc. Trans. 35:61-67; Yoo, H. et al., (1999) Pharm. Res. 16:1799-1804). In some embodiments, a RNAi agent forms a complex with cyclodextrin for systemic administration. Methods for administration and pharmaceutical compositions of RNAi agents and cyclodextrins can be found in U.S. Patent No. 7, 427, 605, which is herein incorporated by reference in its entirety.

[0868] Certain aspects of the instant disclosure relate to a method of reducing the expression of a target gene, e.g., INHBE, ACVR1C, PLIN1, PDE3B, or INHBC, in a cell, comprising contacting said cell with the double-stranded RNAi agent of the disclosure. In one embodiment, the cell is a liver cell. In one embodiment, the cell is an adipocyte.

[0869] In certain embodiments, the RNAi agent is taken up on one or more tissue or cell types present in organs, e.g., liver, adipose tissue.

[0870] Another aspect of the disclosure relates to a method of reducing the expression and/or activity of a target gene, e.g., INHBE, ACVR1C, PLIN1, PDE3B, or INHBC, in a subject, comprising administering to the subject the double-stranded RNAi agent of the disclosure.

[0871] Another aspect of the disclosure relates to a method of treating a subject having a metabolic disorder or at risk of having or at risk of developing a metabolic disorder, comprising administering to the subject a therapeutically effective amount of the double-stranded RNAi agent of the disclosure, thereby treating the subject.

[0872] In one embodiment, the double-stranded RNAi agent is administered subcutaneously.

[0873] In one embodiment, the double-stranded RNAi agent is administered intramuscularly.

[0874] In one embodiment, the double-stranded RNAi agent is administered by intravenously.

[0875] In one embodiment, the double-stranded RNAi agent is administered by pulmonary system administration, e.g., intranasal administration, or oral inhalative administration.

[0876] For ease of exposition the formulations, compositions and methods in this section are discussed largely with regard to modified siRNA compounds. It may be understood, however, that these formulations, compositions and methods can be practiced with other siRNA compounds, e.g., unmodified siRNA compounds, and such practice is within the disclosure. A composition that includes a RNAi agent can be delivered to a subject by a variety of routes. Exemplary mutes include pulmonary system, intravenous, subcutaneous, intraventricular, oral, topical, rectal, anal, vaginal, nasal, and ocular.

[0877] The RNAi agents of the disclosure can be incorporated into pharmaceutical compositions suitable for administration. Such compositions typically include one or more species of RNAi agent and a pharmaceutically acceptable carrier. As used herein the language “pharmaceutically acceptable carrier” is intended to include any and all solvents, dispersion media, coatings, antibacterial and antifungal agents, isotonic and absorption delaying agents, and the like, compatible with pharmaceutical administration. The use of such media and agents for pharmaceutically active substances is well known in the art. Except insofar as any conventional media or agent is incompatible with the active compound, use thereof in the compositions is contemplated. Supplementary active compounds can also be incorporated into the compositions.

[0878] The pharmaceutical compositions of the present disclosure may be administered in a number of ways depending upon whether local or systemic treatment is desired and upon the area to be treated. Administration may be intratracheal, intranasal, topical (including ophthalmic, vaginal, rectal, intranasal, transdermal), oral, parenteral, or pulmonary, e.g., by inhalation or insufflation of powders or aerosols, including by nebulizer. Parenteral administration includes intravenous drip, subcutaneous, intraperitoneal, or intramuscular injection, or intrathecal or intraventricular administration.

[0879] The route and site of administration may be chosen to enhance targeting. For example, to target muscle cells, intramuscular injection into the muscles of interest would be a logical choice. Lung cells might be targeted by administering the RNAi agent in powder or aerosol form. The vascular endothelial cells could be targeted by coating a balloon catheter with the RNAi agent and mechanically introducing the RNA.

[0880] Compositions for pulmonary system delivery may include aqueous solutions, e.g., for intranasal or oral inhalative administration, suitable carriers composed of, e.g., lipids (liposomes, niosomes, microemulsions, lipidic micelles, solid lipid nanoparticles) or polymers (polymer micelles, dendrimers, polymeric nanoparticles, nonogels, nanocapsules), adjuvant, e.g., for oral inhalative administration. Aqueous compositions may be sterile and may optionally contain buffers, diluents, absorption enhancers and other suitable additives. Such administration permits both systemic and local delivery of the double stranded RNAi agents of the invention.

[0881] Intranasal administration may include instilling or insufflating a double stranded RNAi agent into the nasal cavity with syringes or droppers by applying a few drops at a time or via atomization. Suitable dosage forms for intranasal administration include drops, powders, nebulized mists, and sprays. Nasal delivery devices include, but not limited to, vapor inhaler, nasal dropper, spray bottle, metered dose spray pump, gas driven spray atomizer, nebulizer, mechanical powder sprayer, breath actuated inhaler, and insufflator. Devices for delivery deeper into the respiratory system, e.g., into the lung, include nebulizer, pressured metered-dose inhaler, dry powder inhaler, and thermal vaporization aerosol device. Devices for delivery by inhalation are available from commercial suppliers. Devices can be fixed or variable dose, single or multidose, disposable or reusable depending on, for example, the disease or disorder to be prevented or treated, the volume of the agent to be delivered, the frequency of delivery of the agent, and other considerations in the art.

[0882] Oral inhalative administration may include use of device, e.g., a passive breath driven or active power driven single/-multiple dose dry powder inhaler (DPI), to deliver a double stranded RNAi agent to the pulmonary system. Suitable dosage forms for oral inhalative administration include powders and solutions. Suitable devices for oral inhalative administration include nebulizers, metered-dose inhalers, and dry powder inhalers. Dry powder inhalers are of the most popular devices used to deliver drugs, especially proteins to the lungs. Exemplary commercially available dry powder inhalers include Spinhaler (Fisons Pharmaceuticals, Rochester, NY) and Rotahaler (GSK, RTP, NC). Several types of nebulizers are available, namely jet nebulizers, ultrasonic nebulizers, vibrating mesh nebulizers. Jet nebulizers are driven by compressed air. Ultrasonic nebulizers use a piezoelectric transducer in order to create droplets from an open liquid reservoir. Vibrating mesh nebulizers use perforated membranes actuated by an annular piezoelement to vibrate in resonant bending mode. The holes in the membrane have a large cross-section size on the liquid supply side and a narrow cross-section size on the side from where the droplets emerge. Depending on the therapeutic application, the hole sizes and number of holes can be adjusted. Selection of a suitable device depends on parameters, such as nature of the drug and its formulation, the site of action, and pathophysiology of the lung. Aqueous suspensions and solutions are nebulized effectively. Aerosols based on mechanically generated vibration mesh technologies also have been used successfully to deliver proteins to lungs.

[0883] The amount of RNAi agent for pulmonary system administration may vary from one target gene to another target gene and the appropriate amount that has to be applied may have to be determined individually for each target gene. Typically, this amount ranges from 10 μg to 2 mg, or 50 μg to 1500 μg, or 100 μg to 1000 μg.

[0884] Formulations for topical administration may include transdermal patches, ointments, lotions, creams, gels, drops, suppositories, sprays, liquids, and powders. Conventional pharmaceutical carriers, aqueous, powder or oily bases, thickeners and the like may be necessary or desirable. Coated condoms, gloves, and the like may also be useful.

[0885] Compositions for oral administration include powders or granules, suspensions or solutions in water, syrups, elixirs or non-aqueous media, tablets, capsules, lozenges, or troches. In the case of tablets, carriers that can be used include lactose, sodium citrate and salts of phosphoric acid. Various disintegrants such as starch, and lubricating agents such as magnesium stearate, sodium lauryl sulfate and talc, are commonly used in tablets. For oral administration in capsule form, useful diluents are lactose and high molecular weight polyethylene glycols. When aqueous suspensions are required for oral use, the nucleic acid compositions can be combined with emulsifying and suspending agents. If desired, certain sweetening or flavoring agents can be added. Compositions suitable for oral administration of the agents of the invention are further described in PCT Application No. PCT/US20/33156, the entire contents of which are incorporated herein by reference.

[0886] Compositions for intrathecal or intraventricular administration may include sterile aqueous solutions which may also contain buffers, diluents, and other suitable additives.

[0887] Formulations for parenteral administration may include sterile aqueous solutions which may also contain buffers, diluents, and other suitable additives. Intraventricular injection may be facilitated by an intraventricular catheter, for example, attached to a reservoir. For intravenous use, the total concentration of solutes may be controlled to render the preparation isotonic.

[0888] In one embodiment, the administration of the siRNA compound, e.g., a double-stranded siRNA compound, is parenteral, e.g., intravenous (e.g., as a bolus or as a diffusible infusion), intradermal, intraperitoneal, intramuscular, intrathecal, intraventricular, intracranial, subcutaneous, transmucosal, buccal, sublingual, endoscopic, rectal, oral, vaginal, topical, pulmonary system, intranasal, urethral, or ocular. Administration can be provided by the subject or by another person, e.g., a health care provider. The medication can be provided in measured doses or in a dispenser which delivers a metered dose. Selected modes of delivery are discussed in more detail below.

### A. Vector Encoded RNAi Agents of the Disclosure

[0889] RNAi agents targeting the target gene can be expressed from transcription units inserted into DNA or RNA vectors (see, e.g., Couture, A, et al., TIG. (1996), 12:5-10; WO 00/22113, WO 00/22114, and U.S. Pat. No. 6,054,299). Expression can be sustained (months or longer), depending upon the specific construct used and the target tissue or cell type. These transgenes can be introduced as a linear construct, a circular plasmid, or a viral vector, which can be an integrating or non-integrating vector. The transgene can also be constructed to permit it to be inherited as an extrachromosomal plasmid (Gassmann, et al., (1995) Proc. Natl. Acad. Sci. USA 92:1292).

[0890] The individual strand or strands of a RNAi agent can be transcribed from a promoter on an expression vector. Where two separate strands are to be expressed to generate, for example, a dsRNA, two separate expression vectors can be co-introduced (e.g., by transfection or infection) into a target cell. Alternatively, each individual strand of a dsRNA can be transcribed by promoters both of which are located on the same expression plasmid. In one embodiment, a dsRNA is expressed as inverted repeat polynucleotides joined by a linker polynucleotide sequence such that the dsRNA has a stem and loop structure.

[0891] RNAi agent expression vectors are generally DNA plasmids or viral vectors. Expression vectors compatible with eukaryotic cells, such as those compatible with vertebrate cells, can be used to produce recombinant constructs for the expression of a RNAi agent as described herein. Delivery of RNAi agent expressing vectors can be systemic, such as by intravenous or intramuscular administration, by administration to target cells ex-planted from the patient followed by reintroduction into the patient, or by any other means that allows for introduction into a desired target cell.

[0892] Viral vector systems which can be utilized with the methods and compositions described herein include, but are not limited to, (a) adenovirus vectors; (b) retrovirus vectors, including but not limited to lentiviral vectors, moloney murine leukemia virus, etc.; (c) adeno-associated virus vectors; (d) herpes simplex virus vectors; (e) SV 40 vectors; (f) polyoma virus vectors; (g) papilloma virus vectors; (h) picornavirus vectors; (i) pox virus vectors such as an orthopox, e.g., vaccinia virus vectors or avipox, e.g. canary pox or fowl pox; and (j) a helper-dependent or gutless adenovirus. Replication-defective viruses can also be advantageous. Different vectors will or will not become incorporated into the cells' genome. The constructs can include viral sequences for transfection, if desired. Alternatively, the construct can be incorporated into vectors capable of episomal replication, e.g. EPV and EBV vectors. Constructs for the recombinant expression of a RNAi agent will generally require regulatory elements, e.g., promoters, enhancers, etc., to ensure the expression of the RNAi agent in target cells. Other aspects to consider for vectors and constructs are known in the art.

### IX. Pharmaceutical Compositions

[0893] The present disclosure also includes pharmaceutical compositions and formulations which include the RNAi agents of the disclosure. In one embodiment, provided herein are pharmaceutical compositions containing an RNAi agent, as described herein, and a pharmaceutically acceptable carrier. The pharmaceutical compositions containing the RNAi agent are useful for treating a subject who would benefit from inhibiting or reducing the expression of a target gene, e.g., INHBE, ACVR1C, PLIN1, PDE3B, or INHBC, e.g., a subject having a metabolic disorder. Such pharmaceutical compositions are formulated based on the mode of delivery. One example is compositions that are formulated for systemic administration via parenteral delivery, e.g., by intravenous (IV), intramuscular (IM), or for subcutaneous (subQ) delivery.

[0894] In some embodiments, the pharmaceutical compositions of the invention are pyrogen free or non-pyrogenic.

[0895] In one embodiment, the delivery vehicle can deliver an iRNA compound, e.g., a double-stranded iRNA compound, or ssiRNA compound, (e.g., a precursor thereof, e.g., a larger siRNA compound which can be processed into a ssiRNA compound, or a DNA which encodes an siRNA compound, e.g., a double-stranded siRNA compound, or ssiRNA compound, or precursor thereof) to a cell by a topical route of administration. The delivery vehicle can be microscopic vesicles. In one example the microscopic vesicles are liposomes. In some embodiments the liposomes are cationic liposomes. In another example the microscopic vesicles are micelles. In one aspect, the invention features a pharmaceutical composition including an siRNA compound, e.g., a double-stranded siRNA compound, or ssiRNA compound, (e.g., a precursor thereof, e.g., a larger siRNA compound which can be processed into a ssiRNA compound, or a DNA which encodes an siRNA compound, e.g., a double-stranded siRNA compound, or ssiRNA compound, or precursor thereof) in an injectable dosage form. In one embodiment, the injectable dosage form of the pharmaceutical composition includes sterile aqueous solutions or dispersions and sterile powders. In some embodiments the sterile solution can include a diluent such as water; saline solution; fixed oils, polyethylene glycols, glycerin, or propylene glycol.

[0896] In one aspect, the invention features a pharmaceutical composition including an siRNA compound, e.g., a double-stranded siRNA compound, or ssiRNA compound, (e.g., a precursor thereof, e.g., a larger siRNA compound which can be processed into a ssiRNA compound, or a DNA which encodes an siRNA compound, e.g., a double-stranded siRNA compound, or ssiRNA compound, or precursor thereof) in oral dosage form. In one embodiment, the oral dosage form is selected from the group consisting of tablets, capsules and gel capsules. In another embodiment, the pharmaceutical composition includes an enteric material that substantially prevents dissolution of the tablets, capsules or gel capsules in a mammalian stomach. In some embodiments the enteric material is a coating. The coating can be acetate phthalate, propylene glycol, sorbitan monoleate, cellulose acetate trimellitate, hydroxy propyl methyl cellulose phthalate or cellulose acetate phthalate. In one embodiment, the oral dosage form of the pharmaceutical composition includes a penetration enhancer, e.g., a penetration enhancer described herein.

[0897] In another embodiment, the oral dosage form of the pharmaceutical composition includes an excipient. In one example the excipient is polyethyleneglycol. In another example the excipient is precirol.

[0898] In another embodiment, the oral dosage form of the pharmaceutical composition includes a plasticizer. The plasticizer can be diethyl phthalate, triacetin dibutyl sebacate, dibutyl phthalate or triethyl citrate.

### X. Methods for Inhibiting Target Gene Expression

[0899] Another aspect of the invention relates to a method of reducing the expression of a target gene, e.g., INHBE, ACVR1C, PLIN1, PDE3B, or INHBC, in a cell, comprising contacting the cell with a dsRNA agent of the invention. The methods include contacting the cell with a dsRNA of the disclosure and maintaining the cell for a time sufficient to obtain degradation of the mRNA transcripts of a target gene, thereby inhibiting expression of the target gene in the cell.

[0900] Reduction in gene expression can be assessed by any methods known in the art. For example, a reduction in the expression of a target may be determined by determining the mRNA expression level of the target gene using methods routine to one of ordinary skill in the art, e.g., northern blotting, qRT-PCR; by determining the protein level of a target protein using methods routine to one of ordinary skill in the art, such as western blotting, immunological techniques.

[0901] In the methods of the disclosure the cell may be contacted in vitro or in vivo, i.e., the cell may be within a subject. Contacting a cell in vivo with the RNAi agent includes contacting a cell or group of cells within a subject, e.g., a human subject, with the RNAi agent. Combinations of in vitro and in vivo methods of contacting a cell are also possible.

[0902] The cell may be an extra-hepatic cell, such as a liver cell or an adipocyte.

[0903] A cell suitable for treatment using the methods of the disclosure may be any cell that expresses a target gene. A cell suitable for use in the methods of the disclosure may be a mammalian cell, e.g., a primate cell (such as a human cell or a non-human primate cell, e.g., a monkey cell or a chimpanzee cell), a non-primate cell (such as a rat cell, or a mouse cell. In one embodiment, the cell is a human cell, e.g., a human liver cell or a human kidney cell.

[0904] Contacting a cell may be direct or indirect, as discussed above. Furthermore, contacting a cell may be accomplished via a targeting ligand, including any ligand described herein or known in the art. In some embodiments, the targeting ligand is a carbohydrate moiety, e.g., a GalNAc ligand, or any other ligand that directs the RNAi agent to a site of interest. In certain embodiments, the RNAi agent does not include a targeting ligand.

[0905] The term “inhibiting,” as used herein, is used interchangeably with “reducing,” “silencing,” “downregulating,” “suppressing” and other similar terms, and includes any level of inhibition. In certain embodiments, a level of inhibition, e.g., for an RNAi agent of the instant disclosure, can be assessed in cell culture conditions, e.g., wherein cells in cell culture are transfected via Lipofectamine™-mediated transfection at a concentration in the vicinity of a cell of 10 nM or less, 1 nM or less, etc. Knockdown of a given RNAi agent can be determined via comparison of pre-treated levels in cell culture versus post-treated levels in cell culture, optionally also comparing against cells treated in parallel with a scrambled or other form of control RNAi agent. Knockdown in cell culture of, e.g., 50% or more, can thereby be identified as indicative of “inhibiting” or “reducing”, “downregulating” or “suppressing”, etc. having occurred. It is expressly contemplated that assessment of targeted mRNA or encoded protein levels (and therefore an extent of “inhibiting”, etc. caused by a RNAi agent of the disclosure) can also be assessed in in vivo systems for the RNAi agents of the instant disclosure, under properly controlled conditions as described in the art.

[0906] The phrase “inhibiting expression of a target gene” or “inhibiting expression of a target,” as used herein, includes inhibition of expression of any target gene (such as, e.g., a mouse target gene, a rat target gene, a monkey target gene, or a human target gene) as well as variants or mutants of a target gene that encode a target protein. Thus, the target gene may be a wild-type target gene, a mutant target gene, or a transgenic target gene in the context of a genetically manipulated cell, group of cells, or organism.

[0907] “Inhibiting expression of a target gene” includes any level of inhibition of a target gene, e.g., at least partial suppression of the expression of a target gene, such as an inhibition by at least 20%. In certain embodiments, inhibition is by at least 30%, at least 40%, at least 50%, at least about 60%, at least 70%, at least about 80%, at least 85%, at least 90%, at least 95%, at least 96%, at least 97%, at least 98%, or at least 99%; or to below the level of detection of the assay method. In certain method, inhibition is measured at a 10 nM concentration of the siRNA using the luciferase assay provided in Example 1.

[0908] The expression of a target gene may be assessed based on the level of any variable associated with target gene expression, e.g., target mRNA level or target protein level.

[0909] Inhibition may be assessed by a decrease in an absolute or relative level of one or more of these variables compared with a control level. The control level may be any type of control level that is utilized in the art, e.g., a pre-dose baseline level, or a level determined from a similar subject, cell, or sample that is untreated or treated with a control (such as, e.g., buffer only control or inactive agent control).

[0910] In some embodiments of the methods of the disclosure, expression of a target gene is inhibited by at least 20%, 30%, 40%, 50%, 60%, 70%, 80%, 85%, 90%, or 95%, or to below the level of detection of the assay. In certain embodiments, the methods include a clinically relevant inhibition of expression of a target gene, e.g. as demonstrated by a clinically relevant outcome after treatment of a subject with an agent to reduce the expression of a target gene.

[0911] Inhibition of the expression of a target gene may be manifested by a reduction of the amount of mRNA expressed by a first cell or group of cells (such cells may be present, for example, in a sample derived from a subject) in which a target gene is transcribed and which has or have been treated (e.g., by contacting the cell or cells with a RNAi agent of the disclosure, or by administering a RNAi agent of the disclosure to a subject in which the cells are or were present) such that the expression of a target gene is inhibited, as compared to a second cell or group of cells substantially identical to the first cell or group of cells but which has not or have not been so treated (control cell(s) not treated with a RNAi agent or not treated with a RNAi agent targeted to the genome of interest). The degree of inhibition may be expressed in terms of:

$$\frac{( mRNA in control cells ) - ( mRNA in treated cells )}{( mRNA in control cells )} \cdot 100 \%$$

[0912] In other embodiments, inhibition of the expression of a target gene may be assessed in terms of a reduction of a parameter that is functionally linked to a target gene expression, e.g., target protein expression. Target gene silencing may be determined in any cell expressing a target gene, either endogenous or heterologous from an expression construct, and by any assay known in the art.

[0913] Inhibition of the expression of a target protein may be manifested by a reduction in the level of the target protein that is expressed by a cell or group of cells (e.g., the level of protein expressed in a sample derived from a subject). As explained above, for the assessment of genome suppression, the inhibition of protein expression levels in a treated cell or group of cells may similarly be expressed as a percentage of the level of protein in a control cell or group of cells.

[0914] A control cell or group of cells that may be used to assess the inhibition of the expression of a target gene includes a cell or group of cells that has not yet been contacted with an RNAi agent of the disclosure. For example, the control cell or group of cells may be derived from an individual subject (e.g., a human or animal subject) prior to treatment of the subject with an RNAi agent.

[0915] The level of target gene mRNA that is expressed by a cell or group of cells may be determined using any method known in the art for assessing RNA expression. In one embodiment, the level of expression of target gene in a sample is determined by detecting a transcribed polynucleotide, or portion thereof, e.g., mRNA of the target gene. RNA may be extracted from cells using RNA extraction techniques including, for example, using acid phenol/guanidine isothiocyanate extraction (RNAzol B; Biogenesis), RNeasym™ RNA preparation kits (Qiagen®) or PAXgene (PreAnalytix, Switzerland). Typical assay formats utilizing ribonucleic acid hybridization include nuclear run-on assays, RT-PCR, RNase protection assays, northern blotting, in situ hybridization, and microarray analysis. Circulating target mRNA may be detected using methods the described in WO2012/177906, the entire contents of which are hereby incorporated herein by reference.

[0916] In some embodiments, the level of expression of target gene is determined using a nucleic acid probe. The term “probe”, as used herein, refers to any molecule that is capable of selectively binding to a specific target nucleic acid or protein, or fragment thereof. Probes can be synthesized by one of skill in the art, or derived from appropriate biological preparations. Probes may be specifically designed to be labeled. Examples of molecules that can be utilized as probes include, but are not limited to, RNA, DNA, proteins, antibodies, and organic molecules.

[0917] Isolated mRNA can be used in hybridization or amplification assays that include, but are not limited to, Southern or northern analyses, polymerase chain reaction (PCR) analyses and probe arrays. One method for the determination of RNA levels involves contacting the isolated RNA with a nucleic acid molecule (probe) that can hybridize to target RNA. In one embodiment, the RNA is immobilized on a solid surface and contacted with a probe, for example by running the isolated RNA on an agarose gel and transferring the RNA from the gel to a membrane, such as nitrocellulose. In an alternative embodiment, the probe(s) are immobilized on a solid surface and the RNA is contacted with the probe(s), for example, in an Affymetrix® gene chip array. A skilled artisan can readily adapt known RNA detection methods for use in determining the level of target mRNA.

[0918] An alternative method for determining the level of expression of target in a sample involves the process of nucleic acid amplification or reverse transcriptase (to prepare cDNA) of for example mRNA in the sample, e.g., by RT-PCR (the experimental embodiment set forth in Mullis, 1987, U.S. Pat. No. 4,683,202), ligase chain reaction (Barany (1991) Proc. Natl. Acad. Sci. USA 88:189-193), self sustained sequence replication (Guatelli et al. (1990) Proc. Natl. Acad. Sci. USA 87:1874-1878), transcriptional amplification system (Kwoh et al. (1989) Proc. Natl. Acad. Sci. USA 86:1173-1177), Q-Beta Replicase (Lizardi et al. (1988) Bio/Technology 6:1197), rolling circle replication (Lizardi et al., U.S. Pat. No. 5,854,033) or any other nucleic acid amplification method, followed by the detection of the amplified molecules using techniques well known to those of skill in the art. These detection schemes are especially useful for the detection of nucleic acid molecules if such molecules are present in very low numbers. In particular aspects of the disclosure, the level of expression of target is determined by quantitative fluorogenic RT-PCR (i.e., the TagMan™ System), by a Dual-Glo® Luciferase assay, or by other art-recognized method for measurement of target expression or mRNA level.

[0919] The expression level of target mRNA may be monitored using a membrane blot (such as used in hybridization analysis such as northern, Southern, dot, and the like), or microwells, sample tubes, gels, beads or fibers (or any solid support comprising bound nucleic acids). See U.S. Pat. Nos. 5,770,722, 5,874,219, 5,744,305, 5,677,195 and 5,445,934, which are incorporated herein by reference. The determination of target expression level may also comprise using nucleic acid probes in solution.

[0920] In some embodiments, the level of RNA expression is assessed using branched DNA (bDNA) assays or real time PCR (qPCR). The use of this PCR method is described and exemplified in the Examples presented herein. Such methods can also be used for the detection of target nucleic acids.

[0921] The level of target protein expression may be determined using any method known in the art for the measurement of protein levels. Such methods include, for example, electrophoresis, capillary electrophoresis, high performance liquid chromatography (HPLC), thin layer chromatography (TLC), hyperdiffusion chromatography, fluid or gel precipitin reactions, absorption spectroscopy, a colorimetric assays, spectrophotometric assays, flow cytometry, immunodiffusion (single or double), immunoelectrophoresis, western blotting, radioimmunoassay (RIA), enzyme-linked immunosorbent assays (ELISAs), immunofluorescent assays, electrochemiluminescence assays, and the like. Such assays can also be used for the detection of proteins indicative of the presence or replication of target proteins.

[0922] In some embodiments, the efficacy of the methods of the disclosure in the treatment of a target gene-related disease is assessed by a decrease in target mRNA level (e.g, by assessment of a blood target gene level, or otherwise).

[0923] In some embodiments, the efficacy of the methods of the disclosure in the treatment of a target gene-related disease is assessed by a decrease in target mRNA level (e.g, by assessment of a liver or kidney sample for target level, by biopsy, or otherwise).

[0924] In some embodiments of the methods of the disclosure, the RNAi agent is administered to a subject such that the RNAi agent is delivered to a specific site within the subject. The inhibition of expression of target may be assessed using measurements of the level or change in the level of target mRNA or target protein in a sample derived from a specific site within the subject, e.g., liver or kidney cells. In certain embodiments, the methods include a clinically relevant inhibition of expression of target, e.g. as demonstrated by a clinically relevant outcome after treatment of a subject with an agent to reduce the expression of target gene.

[0925] As used herein, the terms detecting or determining a level of an analyte are understood to mean performing the steps to determine if a material, e.g., protein, RNA, is present. As used herein, methods of detecting or determining include detection or determination of an analyte level that is below the level of detection for the method used.

### XI. Prophylactic and Treatment Methods of the Invention

[0926] The present invention also provides methods of using an iRNA of the invention or a composition containing an iRNA of the invention to inhibit expression of a metabolic disorder-associated target gene, thereby preventing or treating a metabolic disorder, e.g., metabolic syndrome, a disorder of carbohydrates, e.g., type II diabetes, pre-diabetes, a lipid metabolism disorder, e.g., a hyperlipidemia, hypertension, lipodystrophy; a kidney disease; a cardiovascular disease, a disorder of body weight. In the methods of the invention the cell may be contacted with the siRNA in vitro or in vivo, i.e., the cell may be within a subject.

[0927] A cell suitable for treatment using the methods of the invention may be any cell that expresses a metabolic disorder-associated target gene, e.g., INHBE, ACVR1C, PLIN1, PDE3B, or INHBC, e.g., an adipocyte cell, or a liver cell. A cell suitable for use in the methods of the invention may be a mammalian cell, e.g., a primate cell (such as a human cell, including human cell in a chimeric non-human animal, or a non-human primate cell, e.g., a monkey cell or a chimpanzee cell), or a non-primate cell. In certain embodiments, the cell is a human cell, e.g., a human liver cell. In the methods of the invention, target gene expression is inhibited in the cell by at least 50, 55, 60, 65, 70, 75, 80, 85, 90, or 95, or to a level below the level of detection of the assay.

[0928] The in vivo methods of the invention may include administering to a subject a composition containing an iRNA, where the iRNA includes a nucleotide sequence that is complementary to at least a part of an RNA transcript of the target gene of the mammal to which the RNAi agent is to be administered. The composition can be administered by any means known in the art including, but not limited to oral, intraperitoneal, or parenteral routes, including intracranial (e.g., intraventricular, intraparenchymal, and intrathecal), intravenous, intramuscular, subcutaneous, transdermal, airway (aerosol), nasal, rectal, intraocular (e.g., periocular, conjunctival, subtenon, intracameral, intravitreal, intraocular, anterior or posterior juxtascleral, subretinal, subconjunctival, retrobulbar, or intracanalicular injection), intravenous, intramuscular, subcutaneous, transdermal, airway (aerosol), and topical (including buccal and sublingual) administration.

[0929] In certain embodiments, the compositions are administered by intravenous infusion or injection. In certain embodiments, the compositions are administered by subcutaneous injection. In certain embodiments, the compositions are administered by intramuscular injection.

[0930] The mode of administration may be chosen based upon whether local or systemic treatment is desired and based upon the area to be treated. The route and site of administration may be chosen to enhance targeting.

[0931] In one aspect, the present invention also provides methods for inhibiting the expression of a metabolic disorder-associated target gene selected from the group consisting of inhibin subunit beta E (INHBE), activin A receptor type 1C (ACVR1C), perilipin-1 (PLIN1), phosphodiesterase 3B (PDE3B), and inhibin subunit beta C (INHBC) in a mammal. The methods include administering to the mammal a composition comprising a dsRNA that targets a target gene in a cell of the mammal and maintaining the mammal for a time sufficient to obtain degradation of the mRNA transcript of the target gene, thereby inhibiting expression of the target gene in the cell. Reduction in gene expression can be assessed by any methods known in the art and by methods, e.g. qRT-PCR, described herein, e.g., in Example 2. Reduction in protein production can be assessed by any methods known it the art, e.g. ELISA. In certain embodiments, a puncture liver biopsy sample serves as the tissue material for monitoring the reduction in the target gene or protein expression. In other embodiments, a blood sample serves as the subject sample for monitoring the reduction in the target protein expression.

[0932] The present invention further provides methods of treatment in a subject in need thereof, e.g., a subject diagnosed with a metabolic disorder, e.g., metabolic syndrome, a disorder of carbohydrates, e.g., type II diabetes, pre-diabetes, a lipid metabolism disorder, e.g., a hyperlipidemia, hypertension, lipodystrophy; a kidney disease; a cardiovascular disease, a disorder of body weight.

[0933] The present invention further provides methods of prophylaxis in a subject in need thereof. The treatment methods of the invention include administering an iRNA of the invention to a subject, e.g., a subject that would benefit from a reduction of expression of a metabolic disorder-associated target gene selected from the group consisting of inhibin subunit beta E (INHBE), activin A receptor type 1C (ACVR1C), perilipin-1 (PLIN1), phosphodiesterase 3B (PDE3B), and inhibin subunit beta C (INHBC), in a prophylactically effective amount of a dsRNA targeting INHBE, ACVR1C, PLIN1, PDE3B, or INHBC or a pharmaceutical composition comprising a dsRNA targeting INHBE, ACVR1C, PLIN1, PDE3B, or INHBC.

[0934] In one aspect, the present invention provides methods of treating a subject having a disorder that would benefit from reduction in expression of a metabolic disorder-associated target gene selected from the group consisting of inhibin subunit beta E (INHBE), activin A receptor type 1C (ACVR1C), perilipin-1 (PLIN1), phosphodiesterase 3B (PDE3B), and inhibin subunit beta C (INHBC), e.g., a metabolic disorder, e.g., diabetes.

[0935] Treatment of a subject that would benefit from a reduction and/or inhibition of INHBE, ACVR1C, PLIN1, PDE3B, or INHBC gene expression includes therapeutic treatment (e.g., a subject is having a metabolic disorder) and prophylactic treatment (e.g., the subject is not having a metabolic disorder or a subject may be at risk of developing a metabolic disorder).

[0936] Examples of metabolic disorders include but are not limited to, metabolic syndrome, a disorder of carbohydrates, e.g., type II diabetes, pre-diabetes, a lipid metabolism disorder, e.g., a hyperlipidemia, hypertension, lipodystrophy; a kidney disease; a cardiovascular disease, a disorder of body weight.

[0937] In some embodiments, the metabolic disorder is metabolic syndrome.

[0938] In some embodiments, the RNAi agent is administered to a subject in an amount effective to inhibit expression of a metabolic disorder-associated target gene selected from the group consisting of inhibin subunit beta E (INHBE), activin A receptor type 1C (ACVR1C), perilipin-1 (PLIN1), phosphodiesterase 3B (PDE3B), and inhibin subunit beta C (INHBC) in a cell within the subject. The amount effective to inhibit target gene expression in a cell within a subject may be assessed using methods discussed above, including methods that involve assessment of the inhibition of target gene mRNA, target gene protein, or related variables, such as insulin resistance, BMI, WHRadj BMI, adipose tissue, e.g., image-based quantification of adipose tissue, e.g., MRI or DEXA for abdominal subcutaneous adipose and visceral adipose tissue quantification.

[0939] An iRNA of the invention may be administered as a “free iRNA.” A free iRNA is administered in the absence of a pharmaceutical composition. The naked iRNA may be in a suitable buffer solution. The buffer solution may comprise acetate, citrate, prolamine, carbonate, or phosphate, or any combination thereof. In one embodiment, the buffer solution is phosphate buffered saline (PBS). The pH and osmolarity of the buffer solution containing the iRNA can be adjusted such that it is suitable for administering to a subject.

[0940] Alternatively, an iRNA of the invention may be administered as a pharmaceutical composition, such as a dsRNA liposomal formulation.

[0941] Subjects that would benefit from an inhibition of INHBE, ACVR1C, PLIN1, PDE3B, or INHBC gene expression are subjects susceptible to or diagnosed with a metabolic disorder, e.g., metabolic syndrome, a disorder of carbohydrates, e.g., type II diabetes, pre-diabetes, a lipid metabolism disorder, e.g., a hyperlipidemia, hypertension, lipodystrophy; a kidney disease; a cardiovascular disease, a disorder of body weight. In an embodiment, the method includes administering a composition featured herein such that expression of the target gene is decreased, such as for about 1, 2, 3, 4, 5, 6, 1-6, 1-3, or 3-6 months per dose. In certain embodiments, the composition is administered once every 3-6 months.

[0942] In one embodiment, the iRNAs useful for the methods and compositions featured herein specifically target RNAs (primary or processed) of the target gene. Compositions and methods for inhibiting the expression of these genes using iRNAs can be prepared and performed as described herein.

[0943] Administration of the iRNA according to the methods of the invention may result prevention or treatment of a metabolic disorder, e.g., metabolic syndrome, a disorder of carbohydrates, e.g., type II diabetes, pre-diabetes, a lipid metabolism disorder, e.g., a hyperlipidemia, hypertension, lipodystrophy; a kidney disease; a cardiovascular disease, a disorder of body weight. Subjects can be administered a therapeutic amount of iRNA, such as about 0.01 mg/kg to about 200 mg/kg.

[0944] In one embodiment, the iRNA is administered subcutaneously, i.e., by subcutaneous injection. One or more injections may be used to deliver the desired dose of iRNA to a subject. The injections may be repeated over a period of time.

[0945] The administration may be repeated on a regular basis. In certain embodiments, after an initial treatment regimen, the treatments can be administered on a less frequent basis. A repeat-dose regimen may include administration of a therapeutic amount of iRNA on a regular basis, such as once per month to once a year. In certain embodiments, the iRNA is administered about once per month to about once every three months, or about once every three months to about once every six months.

[0946] The invention further provides methods and uses of an iRNA agent or a pharmaceutical composition thereof for treating a subject that would benefit from reduction and/or inhibition of INHBE, ACVR1C, PLIN1, PDE3B, or INHBC gene expression, e.g., a subject having a metabolic disorder, in combination with other pharmaceuticals and/or other therapeutic methods, e.g., with known pharmaceuticals and/or known therapeutic methods, such as, for example, those which are currently employed for treating these disorders.

[0947] Accordingly, in some aspects of the invention, the methods which include administration of an iRNA agent of the invention, further include administering to the subject one or more additional therapeutic agents.

[0948] For example, in certain embodiments, an iRNA targeting INHBE, ACVR1C, PLIN1, PDE3B, or INHBC is administered in combination with, e.g., an agent useful in treating a metabolic disorder as described herein or otherwise known in the art. For example, additional agents and treatments suitable for treating a subject that would benefit from reduction in INHBE, ACVR1C, PLIN1, PDE3B, or INHBC expression, e.g., a subject having a metabolic disorder, may include agents currently used to treat symptoms of a metabolic disorder.

[0949] Examples of the additional therapeutic agents which can be used with an RNAi agent of the invention include, but are not limited to, insulin, a glucagon-like peptide 1 agonist (e.g., exenatide, liraglutide, dulaglutide, semaglutide, and pramlintide, a sulfonylurea (e.g., chlorpropamide, glipizide), a seglitinide (e.g., repaglinide, nateglinidie), biguanides (e.g., metformin), a thiazolidinedione, e.g, rosiglitazone, troglitazone, an alpha-glucosidase inhibitor (e.g., acarbose and meglitol), an SGLT2 inhibitor (e.g., dapagliflozin), a DPP-4 inhibitor (e.g., linagliptin), or an HMG-CoA reductase inhibitor, e.g., statins, such as atorvastatin (Lipitor), fluvastatin (Lescol), lovastatin (Mevacor), lovastatin extended-release (Altoprev), pitavastatin (Livalo), pravastatin (Pravachol), rosuvastatin (Crestor), and simvastatin (Zocor).

[0950] The method according to any one of claims 34 to 36, wherein the metabolic disorder is type 2 diabetes, and the therapeutic agent is chosen from metformin, insulin, glyburide, glipizide, glimepiride, repaglinide, nateglinide, thiazolidinediones, rosiglitazone, pioglitazone, sitagliptin, saxagliptin, linagliptin, exenatide, liraglutide, semaglutide, canagliflozin, dapagliflozin, and empagliflozin, or any combination thereof.

[0951] In one embodiment, the metabolic disorder is obesity, and the therapeutic agent is chosen from orlistat, phentermine, topiramate, bupropion, naltrexone, and liraglutide, or any combination thereof.

[0952] In one embodiment, the metabolic disorder is elevated triglyceride, and the therapeutic agent is chosen from rosuvastatin, simvastatin, atorvastatin, fenofibrate, gemfibrozil, fenofibric acid, niacin, and an omega-3 fatty acid, or any combination thereof.

[0953] In one embodiment, the metabolic disorder is lipodystrophy, and the therapeutic agent is chosen from tesamorelin, metformin, poly-L-lactic acid, calcium hydroxyapatite, polymethylmethacrylate, bovine collagens, human collagens, silicone, and hyaluronic acid, or any combination thereof.

[0954] In one embodiment, the metabolic disorder is liver inflammation, and the therapeutic agent is a hepatitis therapeutic or a hepatitis vaccine.

[0955] In one embodiment, the metabolic disorder is fatty liver disease include, and the subject is administered bariatric surgery and/or dietary intervention.

[0956] In one embodiment, the metabolic disorder is hypercholesterolemia, and the therapeutic agent is chosen from: atorvastatin, fluvastatin, lovastatin, pitavastatin, pravastatin, rosuvastatin calcium, simvastatin, cholestyramine, colesevelam, and colestipol, alirocumab, evolocumab, niaspan, niacor, fenofibrate, gemfibrozil, and bempedoic, or any combination thereof.

[0957] In one embodiment, the metabolic disorder is an elevated liver enzyme), and the therapeutic agent is chosen from coffee, folic acid, potassium, vitamin B6, a statin, and fiber, or any combination thereof.

[0958] In one embodiment, the metabolic disorder is nonalcoholic steatohepatitis (NASH) and the therapeutic agent is obeticholic acid, Selonsertib, Elafibranor, Cenicriviroc, GR_MD_02, MGL_3196, IMM124E, arachidyl amido cholanoic acid, GS0976, Emricasan, Volixibat, NGM282, GS9674, Tropifexor, MN_001, LMB763, B1_1467335, MSDC_0602, PF_05221304, DF102, Saroglitazar, BMS986036, Lanifibranor, Semaglutide, Nitazoxanide, GRI_0621, EYP001, VK2809, Nalmefene, LIK066, MT 3995, Elobixibat, Namodenoson, Foralumab, SAR425899, Sotagliflozin, EDP_305, Isosabutate, Gemcabene, TERN 101, KBP_042, PF_06865571, DUR928, PF_06835919, NGM313, BMS_986171, Namacizumab, CER_209, ND_L02_s0201, RTU_1096, DRX_065, IONIS_DGAT2Rx, INT_767, NC_001, Seladepar, PXL770, TERN_201, NV556, AZD2693, SP_1373, VK0214, Hepastem, TGFTX4, RLBN1127, GKT_137831, RYI_018, CB4209-CB4211, and JH_0920.

[0959] In one embodiment, the therapeutic agent that treats or inhibits the metabolic disorder is a melanocortin 4 receptor (MC4R) agonist.

[0960] In one embodiment, the MC4R agonist comprises a protein, a peptide, a nucleic acid molecule, or a small molecule.

[0961] In one embodiment, the protein is a peptide analog of MC4R.

[0962] In one embodiment, the peptide is setmelanotide.

[0963] In one embodiment, the MC4R agonist is a peptide comprising the amino acid sequence His-Phe-Arg-Trp.

[0964] In one embodiment, the small molecule is 1,2,3R,4-tetrahydroisoquinoline-3-carboxylic acid.

[0965] In one embodiment, the MC4R agonist is ALB-127158(a).

[0966] In one embodiment, the cardiovascular disease is high blood pressure, and the therapeutic agent is chosen from chlorthalidone, chlorothiazide, hydrochlorothiazide, indapamide, metolazone, acebutolol, atenolol, betaxolol, bisoprolol fumarate, carteolol hydrochloride, metoprolol tartrate, metoprolol succinate, nadolol, benazepril hydrochloride, captopril, enalapril maleate, fosinopril sodium, lisinopril, moexipril, perindopril, quinapril hydrochloride, ramipril, trandolapril, candesartan, eprosartan mesylate, irbesartan, losartan potassium, telmisartan, valsartan, amlodipine besylate, bepridil, diltiazem hydrochloride, felodipine, isradipine, nicardipine, nifedipine, nisoldipine, verapamil hydrochloride, doxazosin mesylate, prazosin hydrochloride, terazosin hydrochloride, methyldopa, carvedilol labetalol hydrochloride, alpha methyldopa, clonidine hydrochloride, guanabenz acetate, guanfacine hydrochloride, guanadrel, guanethidine monosulfate, reserpine, hydralazine hydrochloride, and minoxidil, or any combination thereof.

[0967] In one embodiment, the cardiovascular disease is cardiomyopathy, and the therapeutic agent is an ACE inhibitor, an angiotensin II receptor blocker, a beta blocker, a calcium channel blocker, digoxin, an antiarrhythmic, an aldosterone blocker, a diuretic, an anticoagulant, a blood thinner, and a corticosteroid.

[0968] In one embodiment, the cardiovascular disease is heart failure, and the therapeutic agent is an ACE inhibitor, an angiotensin-2 receptor blocker, a beta blocker, a mineralocorticoid receptor antagonist, a diuretic, ivabradine, sacubitril valsartan, hydralazine with nitrate, and digoxin.

[0969] The iRNA agent and an additional therapeutic agent and/or treatment may be administered at the same time and/or in the same combination, e.g., parenterally, or the additional therapeutic agent can be administered as part of a separate composition or at separate times and/or by another method known in the art or described herein.

### XII. Kits

[0970] In certain aspects, the instant disclosure provides kits that include a suitable container containing a pharmaceutical formulation of a siRNA compound, e.g., a double-stranded siRNA compound, or siRNA compound, (e.g., a precursor, e.g., a larger siRNA compound which can be processed into a siRNA compound, or a DNA which encodes an siRNA compound, e.g., a double-stranded siRNA compound, or ssiRNA compound, or precursor thereof).

[0971] Such kits include one or more dsRNA agent(s) and instructions for use, e.g., instructions for administering a prophylactically or therapeutically effective amount of a dsRNA agent(s). The dsRNA agent may be in a vial or a pre-filled syringe. The kits may optionally further comprise means for administering the dsRNA agent (e.g., an injection device, such as a pre-filled syringe), or means for measuring the inhibition of a metabolic disorder-associated target gene, e.g., INHBE, ACVR1C, PLIN1, PDE3B, or INHBC (e.g., means for measuring the inhibition of target gene mRNA, target gene protein, and/or target gebe activity). Such means for measuring the inhibition of target gene may comprise a means for obtaining a sample from a subject, such as, e.g., a plasma sample. The kits of the invention may optionally further comprise means for determining the therapeutically effective or prophylactically effective amount.

[0972] In certain embodiments the individual components of the pharmaceutical formulation may be provided in one container, e.g., a vial or a pre-filled syringe. Alternatively, it may be desirable to provide the components of the pharmaceutical formulation separately in two or mom containers, e.g., one container for a siRNA compound preparation, and at least another for a carrier compound. The kit may be packaged in a number of different configurations such as one or more containers in a single box. The different components can be combined, e.g., according to instructions provided with the kit. The components can be combined according to a method described herein, e.g., to prepare and administer a pharmaceutical composition. The kit can also include a delivery device.

[0973] This invention is further illustrated by the following examples which should not be construed as limiting. The entire contents of all references, patents and published patent applications cited throughout this application, as well as the informal Sequence Listing and Figures, are hereby incorporated herein by reference.

### EXAMPLES

### Example 1. Identification of Association of INHBE Loss-Of-Function with Waist-To-Hip Ratio in UK Biobank

[0974] Abdominal obesity is the most prevalent manifestation of metabolic syndrome (Després J. and Lemieux I. Nature 2006; 444:881-887) and is recognized as a contributor to cardiovascular disease and metabolic risk beyond body mass index (BMI) (Neeland U et al. Lancet Diabetes & Endocrinology 2019; 7(9):715-725). Waist-to-hip ratio adjusted for BMI (WHRadjBMI) reflects abdominal adiposity and correlates with direct imaging of abdominal fat. Mendelian randomization studies have shown a causal relationship between WHRadjBMI and risk of type 2 diabetes and coronary heart disease along with ischemic stroke, glycemic traits and circulating lipids (Emdin C A et al. JAMA 2017; 317(6):626-634; Dale C E et al. Circulation 2017; 135(24):2373-2388).

[0975] Rare genetic variants were tested for association with waist-to-hip ratio adjusted for BMI using exome sequencing data from the UK Biobank (UKBB). UKBB, a large long-term biobank study in the United Kingdom (UK) is investigating the respective contributions of genetic predisposition and environmental exposure (including nutrition, lifestyle, medications etc.) to the development of disease (see, e.g., www.ukbiobank.ac.uk). The study is following about 500,000 volunteers in the UK, enrolled at ages from 40 to 69. Initial enrollment took place over four years from 2006, and the volunteers will be followed for at least 30 years thereafter. A plethora of phenotypic data has been collected including anthropometric measurements such as waist and hip circumference. Recently, the exome sequencing data (or the portion of the genomes composed of exons) from about 450,000 participants in the study has been obtained.

[0976] These whole exome sequences were used to identify rare predicted loss-of-function (pLOF) variants (i.e., frameshift, stop gain, splice donor or splice acceptor variants) called as high confidence by LOFTEE. WHR adjBMI were calculated for participants using manual measurements for waist circumference, hip circumference, and body mass index (BMI) which were taken at their UKBB assessment. WHR was calculated as the ratio of these two measurements. Using these data, along with age at recruitment and sex, a linear model was built modeling WHR (WHR˜Age+Sex+BMI). WHR adjBMI was defined using the residuals from this model.

[0977] Gene-based collapsing tests (i.e., burden tests) were used to look for associations between rare (minor allele frequency ≤1%) pLOF variants and WHRadjBMI. Burden testing was performed in the unrelated White population (n=363,973) adjusting for age, sex and genetic ancestry via 12 principal components. INHBE pLOF associated with a 0.22 standard deviation decrease in WHRadjBMI (Table A). INHBE was tested for association with additional quantitative traits and we detected associations with birth weight, WHR (not adjusted for BMI), triglycerides and HDL cholesterol (Table A). INHBE pLOF also has a lower odds ratio for hypertension, coronary heart disease and T2D (Table B)

[0978] The most common INHBE pLOF variant in the UKBB exome-sequencing data was a splice acceptor variant (rs150777893) carried by 536 out of 620 pLOF carriers. Tested as a single variant, rs150777893 significantly associated with decreased WHRadj BMI (Table C).

TABLE A
Association of INHBE pLOF with WHRadj BMI and other traits

| | | | Effect | N carrier |
|---|---|---|---|---|
| | Variant set | pvalue | (SD) | measured |
| WaistHipRatioAdjBMI | INHBE pLOF | 4.76E−08 | −0.22 | 618 |
| EarlyLife_Birth_weight | INHBE pLOF | 7.01E−07 | 0.26 | 345 |
| WaistHipRatio | INHBE pLOF | 3.45E−05 | −0.13 | 619 |
| Blood_Biochemistry_Triglycerides | INHBE pLOF | 0.001 | −0.13 | 594 |
| Blood_Biochemistry_HDL_cholesterol | INHBE pLOF | 0.01 | 0.10 | 550 |

TABLE B
Association of INHBE pLOF with hypertension, heat disease and T2D

| | | Odds ratio | n carrier | n |
|---|---|---|---|---|
| phenotype | pvalue | (95% CI) | cases | expected |
| I10_essential_primary_hypertension | 0.10 | 0.86 | 186 | 202.31 |
| | | (0.71, 1.03) | | |
| I25_chronic_ischaemic_heart_disease | 0.21 | 0.83 | 56 | 61.31 |
| | | (0.63, 1.11) | | |
| E11_non_insulin_dependent_diabetes | 0.36 | 0.87 | 45 | 50.30 |
| | | (0.64, 1.18) | | |

TABLE C
Association of splice acceptor variant rs150777893 with WHRadjBMI

| | | | | | | Effect | | | | MAF | N white |
|---|---|---|---|---|---|---|---|---|---|---|---|
| | chrom | pos | ref | alt | pvalue | (SD) | rsid | gene | consequence | white | carriers |
| WHRAdjBMI | 12 | 57456093 | G | C | 3.75E−08 | −0.24 | rs150777893 | INHBE | splice | 0.07% | 539 |
| | | | | | | | | | acceptor | | |
| | | | | | | | | | variant | | |

### Example 2. iRNA Synthesis

### Source of Reagents

[0979] Where the source of a reagent is not specifically given herein, such reagent can be obtained from any supplier of reagents for molecular biology at a quality/purity standard for application in molecular biology.

siRNA Design

[0980] siRNAs targeting the inhibin subunit beta E gene (INHBE, human: NCBI refseqID NM_031479.5, NCBI Gene ID: 83729) were designed using custom R and Python scripts. The human NM 031479.5 mRNA has a length of 2460 bases.

[0981] Detailed lists of the unmodified INHBE sense and antisense strand nucleotide sequences are shown in Table 2.

[0982] Detailed lists of the modified INHBE sense and antisense strand nucleotide sequences are shown in Table 3.

[0983] siRNAs targeting the activin A receptor type 1C (ACVR1C) gene (ACVR1C, human: NCBI refseqID NM_145259.3, NCBI Gene ID: 130399) were designed using custom R and Python scripts. The human NM_145259.3 mRNA has a length of 8853 bases.

[0984] Detailed lists of the unmodified sense and antisense strand sequences of ACVR1C dsRNA agents comprising an unsaturated C22 hydrocarbon chain conjugated to position 6 on the sense strand, counting from the 5′-end of the sense strand are shown in Table 4.

[0985] Detailed lists of the modified sense and antisense strand sequences of ACVR1C dsRNA agents comprising an unsaturated C22 hydrocarbon chain conjugated to position 6 on the sense strand, counting from the 5′-end of the sense strand are shown in Table 5.

[0986] Detailed lists of the unmodified sense and antisense strand sequences of ACVR1C dsRNA agents comprising a GalNAc derivative targeting ligand are shown in Table 6.

[0987] Detailed lists of the modified sense and antisense strand sequences of ACVR1C dsRNA agents comprising a GalNAc derivative targeting ligand are shown in Table 7.

[0988] siRNAs targeting the perilipin-1 (PLIN1) gene (PLIN1, human: NCBI refseqID NM_002666.5, NCBI Gene ID: 5346) were designed using custom R and Python scripts. The human NM_002666.5 mRNA has a length of 2916 bases.

[0989] Detailed lists of the unmodified sense and antisense strand sequences of PLIN1 dsRNA agents comprising an unsaturated C22 hydrocarbon chain conjugated to position 6 on the sense strand, counting from the 5′-end of the sense strand are shown in Table 8.

[0990] Detailed lists of the modified sense and antisense strand sequences of PLIN1 dsRNA agents comprising an unsaturated C22 hydrocarbon chain conjugated to position 6 on the sense strand, counting from the 5′-end of the sense strand are shown in Table 9.

[0991] Detailed lists of the unmodified sense and antisense strand sequences of PLIN1 dsRNA agents comprising a GalNAc derivative targeting ligand are shown in Table 10.

[0992] Detailed lists of the modified sense and antisense strand sequences of PLIN1 dsRNA agents comprising a GalNAc derivative targeting ligand are shown in Table 11.

[0993] siRNAs targeting the phosphodiesterase 3B (PDE3B) gene (PDE3B, human: NCBI refseqID NM_000922.4, NCBI Gene ID: 5140) were designed using custom R and Python scripts. The human NM_000922.4 mRNA has a length of 5995 bases.

[0994] Detailed lists of the unmodified sense and antisense strand sequences of PDE3B dsRNA agents comprising an unsaturated C22 hydrocarbon chain conjugated to position 6 on the sense strand, counting from the 5′-end of the sense strand are shown in Table 12.

[0995] Detailed lists of the modified sense and antisense strand sequences of PDE3B dsRNA agents comprising an unsaturated C22 hydrocarbon chain conjugated to position 6 on the sense strand, counting from the 5′-end of the sense strand are shown in Table 13.

[0996] Detailed lists of the unmodified sense and antisense strand sequences of PDE3B dsRNA agents comprising a GalNAc derivative targeting ligand are shown in Table 14.

[0997] Detailed lists of the modified sense and antisense strand sequences of PDE3B dsRNA agents comprising a GalNAc derivative targeting ligand are shown in Table 15.

[0998] siRNAs targeting the inhibin subunit beta C (INHBC) gene (INHBC, human: NCBI refseqID NM_005538.4, NCBI Gene ID: 3626) were designed using custom R and Python scripts. The human NM_005538.4, mRNA has a length of 3202 bases.

[0999] Detailed lists of the unmodified sense and antisense strand sequences of INHBC dsRNA agents comprising a GalNAc derivative targeting ligand are shown in Table 16.

[1000] Detailed lists of the modified sense and antisense strand sequences of INHBC dsRNA agents comprising a GalNAc derivative targeting ligand are shown in Table 17.

[1001] It is to be understood that, throughout the application, a duplex name without a decimal is equivalent to a duplex name with a decimal which merely references the batch number of the duplex. For example, AD-959917 is equivalent to AD-959917.1.

siRNA Synthesis

[1002] siRNAs were designed, synthesized, and prepared using methods known in the art.

[1003] Briefly, siRNA sequences were synthesized on a 1 μmol scale using a Mermade 192 synthesizer (BioAutomation) with phosphoramidite chemistry on solid supports. The solid support was controlled pore glass (500-1000 Å) loaded with a custom GalNAc ligand (3′-GalNAc conjugates), universal solid support (AM Chemicals), or the first nucleotide of interest. Ancillary synthesis reagents and standard 2-cyanoethyl phosphoramidite monomers (2′-deoxy-2′-fluoro, 2′-O-methyl, RNA, DNA) were obtained from Thermo-Fisher (Milwaukee, WI), Hongene (China), or Chemgenes (Wilmington, MA, USA). Additional phosphoramidite monomers were procured from commercial suppliers, prepared in-house, or procured using custom synthesis from various CMOs. Phosphoramidites were prepared at a concentration of 100 mM in either acetonitrile or 9:1 acetonitrile:DMF and were coupled using 5-Ethylthio-1H-tetrazole (ETT, 0.25 M in acetonitrile) with a reaction time of 400 s. Phosphorothioate linkages were generated using a 100 mM solution of 3-((Dimethylamino-methylidene) amino)-3H-1,2,4-dithiazole-3-thione (DDTT, obtained from Chemgenes (Wilmington, MA, USA)) in anhydrous acetonitrile/pyridine (9:1 v/v). Oxidation time was 5 minutes. All sequences were synthesized with final removal of the DMT group (“DMT-Off”).

[1004] Upon completion of the solid phase synthesis, solid-supported oligoribonucleotides were treated with 300 μL of Methylamine (40% aqueous) at room temperature in 96 well plates for approximately 2 hours to afford cleavage from the solid support and subsequent removal of all additional base-labile protecting groups. For sequences containing any natural ribonucleotide linkages (2′-OH) protected with a tert-butyl dimethyl silyl (TBDMS) group, a second deprotection step was performed using TEA·3HF (triethylamine trihydrofluoride). To each oligonucleotide solution in aqueous methylamine was added 200 μL of dimethyl sulfoxide (DMSO) and 300 μL TEA·3HF and the solution was incubated for approximately 30 mins at 60° C. After incubation, the plate was allowed to come to room temperature and crude oligonucleotides were precipitated by the addition of 1 mL of 9:1 acetontrile:ethanol or 1:1 ethanol:isopropanol. The plates were then centrifuged at 4° C. for 45 mins and the supernatant carefully decanted with the aid of a multichannel pipette. The oligonucleotide pellet was resuspended in 20 mM NaOAc and subsequently desalted using a HiTrap size exclusion column (5 mL, GE Healthcare) on an Agilent LC system equipped with an autosampler, UV detector, conductivity meter, and fraction collector. Desalted samples were collected in 96 well plates and then analyzed by LC-MS and UV spectrometry to confirm identity and quantify the amount of material, respectively.

[1005] Duplexing of single strands was performed on a Tecan liquid handling robot. Sense and antisense single strands were combined in an equimolar ratio to a final concentration of 10 μM in 1×PBS in 96 well plates, the plate sealed, incubated at 100° C. for 10 minutes, and subsequently allowed to return slowly to room temperature over a period of 2-3 hours. The concentration and identity of each duplex was confirmed and then subsequently utilized for in vitro screening assays.

### Example 3. In Vitro Screening Methods

### Cell Culture and 96-Well Transfections

[1006] Hep3b cells (ATCC, Manassas, VA) were grown to near confluence at 37° C. in an atmosphere of 5% CO₂ in Eagle's Minimum Essential Medium (Gibco) supplemented with 10% FBS (ATCC) before being released from the plate by trypsinization. Transfection was carried out by adding 7.5 μl of Opti-MEM plus 0.3 μl of Lipofectamine RNAiMax per well (Invitrogen, Carlsbad CA. cat 13778-150) to 2.5 μl of each siRNA duplex to an individual well in a 384-well plate. The mixture was then incubated at room temperature for 15 minutes. Forty μl of complete growth media without antibiotic containing ˜1.5×10⁴ cells were then added to the siRNA mixture. Cells were incubated for 24 hours prior to RNA purification. Single dose experiments were performed at 10 nM, and 1 nM final duplex concentration.

Total RNA Isolation Using DYNABEADS mRNA Isolation Kit (Invitrogen™, Part #: 610-12)

[1007] Cells were lysed in 75 μl of Lysis/Binding Buffer containing 3 μL of beads per well and mixed for 10 minutes on an electrostatic shaker. The washing steps were automated on a Biotek EL406, using a magnetic plate support. Beads were washed (in 90 μL) once in Buffer A, once in Buffer B, and twice in Buffer E, with aspiration steps in between. Following a final aspiration, complete 10 μL RT mixture was added to each well, as described below.

cDNA Synthesis Using ABI High Capacity cDNA Reverse Transcription Kit (Applied Biosystems, Foster City, CA, Cat #4368813)

[1008] A master mix of 1 μl 10× Buffer, 0.4 μl 25×dNTPs, 1 μl Random primers, 0.50 Reverse

[1009] Transcriptase, 0.5 μl RNase inhibitor and 6.6 μl of H₂O per reaction were added per well. Plates were sealed, agitated for 10 minutes on an electrostatic shaker, and then incubated at 37 degrees C. for 2 hours. Following this, the plates were agitated at 80 degrees C. for 8 minutes.

### Real Time PCR

[1010] Two microlitre (μl) of cDNA were added to a master mix containing 0.5 μl of human GAPDH

[1011] TaqMan Probe (4326317E), 0.5 μl human INHBE, 2 μl nuclease-free water and 5 μl Lightcycler 480 probe master mix (Roche Cat #04887301001) per well in a 384 well plates (Roche cat #04887301001). Real time PCR was done in a LightCycler480 Real Time PCR system (Roche).

[1012] To calculate relative fold change, data were analyzed using the ΔΔCt method and normalized assays performed with cells transfected with 10 nM AD-1955, or mock transfected cells. IC₅₀s are calculated using a 4 parameter fit model using XLFit and normalized to cells transfected with AD-1955 or mock-transfected. The sense and antisense sequences of AD-1955 are: sense:

(SEQ ID NO: 126)
cuuAcGcuGAGuAcuucGAdTsdT
and
antisense
(SEQ ID NO: 127)
UCGAAGuACUcAGCGuAAGdTsdT
and
antisense
UCGAAGUACUcAGCGuAAGdTsdT.

[1013] Table 18 shows the results of a single dose screen in Hep3b cells transfected with the indicated agents from Tables 2 and 3.

TABLE 1
Abbreviations of nucleotide monomers used in nucleic acid sequence representation. It
will be understood that these monomers, when present in an oligonucleotide, are mutually linked by
5′-3′-phosphodiester bonds; and it is understood that when the nucleotide contains a 2′-fluoro
modification, then the fluoro replaces the hydroxy at that position in the parent nucleotide (i.e., it is a
2′-deoxy-2′-fluoronucleotide).

| Abbreviation | Nucleotide(s) |
|---|---|
| A | Adenosine-3′-phosphate |
| Ab | beta-L-adenosine-3′-phosphate |
| Abs | beta-L-adenosine-3′-phosphorothioate |
| Af | 2′-fluoroadenosine-3′-phosphate |
| Afs | 2′-fluoroadenosine-3′-phosphorothioate |
| As | adenosine-3′-phosphorothioate |
| C | cytidine-3′-phosphate |
| Cb | beta-L-cytidine-3′-phosphate |
| Cbs | beta-L-cytidine-3′-phosphorothioate |
| Cf | 2′-fluorocytidine-3′-phosphate |
| Cfs | 2′-fluorocytidine-3′-phosphorothioate |
| Cs | cytidine-3′-phosphorothioate |
| G | guanosine-3′-phosphate |
| Gb | beta-L-guanosine-3′-phosphate |
| Gbs | beta-L-guanosine-3′-phosphorothioate |
| Gf | 2′-fluoroguanosine-3′-phosphate |
| Gfs | 2′-fluoroguanosine-3′-phosphorothioate |
| Gs | guanosine-3′-phosphorothioate |
| T | 5′-methyluridine-3′-phosphate |
| Tf | 2′-fluoro-5-methyluridine-3′-phosphate |
| Tfs | 2′-fluoro-5-methyluridine-3′-phosphorothioate |
| Ts | 5-methyluridine-3′-phosphorothioate |
| U | Uridine-3′-phosphate |
| Uf | 2′-fluorouridine-3′-phosphate |
| Ufs | 2′-fluorouridine-3′-phosphorothioate |
| Us | uridine-3′-phosphorothioate |
| N | any nucleotide, modified or unmodified |
| a | 2′-O-methyladenosine-3′-phosphate |
| as | 2′-O-methyladenosine-3′-phosphorothioate |
| c | 2′-O-methylcytidine-3′-phosphate |
| cs | 2′-O-methylcytidine-3′-phosphorothioate |
| g | 2′-O-methylguanosine-3′-phosphate |
| gs | 2′-O-methylguanosine-3′-phosphorothioate |
| t | 2′-O-methyl-5-methyluridine-3′-phosphate |
| ts | 2′-O-methyl-5-methyluridine-3′-phosphorothioate |
| u | 2′-O-methyluridine-3′-phosphate |
| us | 2′-O-methyluridine-3′-phosphorothioate |
| s | phosphorothioate linkage |
| L10 | N-(cholesterylcarboxamidocaproyl)-4-hydroxyprolinol (Hyp-C6-Chol) |
| L96 | N-[tris(GalNAc-alkyl)-amidodecanoyl)]-4-hydroxyprolinol |
| | (Hyp-(GalNAc-alkyl)3) |
| | [chemical structure] |
| Y34 | 2-hydroxymethyl-tetrahydrofurane-4-methoxy-3-phosphate (abasic 2′-OMe |
| | furanose) |
| Y44 | inverted abasic DNA (2-hydroxymethyl-tetrahydrofurane-5-phosphate) |
| (Agn) | Adenosine-glycol nucleic acid (GNA) |
| (Cgn) | Cytidine-glycol nucleic acid (GNA) |
| (Ggn) | Guanosine-glycol nucleic acid (GNA) |
| (Tgn) | Thymidine-glycol nucleic acid (GNA) S-Isomer |
| P | Phosphate |
| VP | Vinyl-phosphonate |
| dA | 2′-deoxyadenosine-3′-phosphate |
| dAs | 2′-deoxyadenosine-3′-phosphorothioate |
| dC | 2′-deoxycytidine-3′-phosphate |
| dCs | 2′-deoxycytidine-3′-phosphorothioate |
| dG | 2′-deoxyguanosine-3′-phosphate |
| dGs | 2′-deoxyguanosine-3′-phosphorothioate |
| dT | 2′-deoxythimidine-3′-phosphate |
| dTs | 2′-deoxythimidine-3′-phosphorothioate |
| dU | 2′-deoxyuridine |
| dUs | 2′-deoxyuridine-3′-phosphorothioate |
| (C2p) | cytidine-2′-phosphate |
| (G2p) | guanosine-2′-phosphate |
| (U2p) | uridine-2′-phosphate |
| (A2p) | adenosine-2′ -phosphate |
| (Chd) | 2′-O-hexadecyl-cytidine-3′-phosphate |
| (Ahd) | 2′-O-hexadecyl-adenosine-3′-phosphate |
| (Ghd) | 2′-O-hexadecyl-guanosine-3′-phosphate |
| (Uhd) | 2′-O-hexadecyl-uridine-3′-phosphate |
| Ada | [chemical structure] |
| | (2R,3S,4S,5R)-5-(6-amino-9H-purin-9-yl)-4-(docosyloxy)-2- |
| | (hydroxymethyl)tetrahydrofuran-3-ol |
| Cda | [chemical structure] |
| | 4-amino-1-((2R,3R,4R,5R)-3-(docosyloxy)-4-hydroxy-5-(hydroxymethyl)tetrahydrofuran-2- |
| | yl)pyrimidin-2(1H)-one |
| Gda | [chemical structure] |
| | 2-amino-9-((2R,3S,4S,5R)-3-(docosyloxy)-4-hydroxy-5-(hydroxymethyl)tetrahydrofuran-2-yl)-1,9- |
| | dihydro-6H-purin-6-one |
| Uda | [chemical structure] |
| | 1-((2R,3R,4R,5R)-3-(docosyloxy)-4-hydroxy-5-(hydroxymethyl)tetrahydrofuran-2- |
| | yl)pyrimidine-2,4(1H,3H)-dione |

TABLE 2
Unmodified Sense and Antisense Strand Sequences of INHBE dsRNA Agents

| | | SEQ | Range in | | SEQ |
|---|---|---|---|---|---|
| | | ID | INHBE mRNA | Antisense Sequence | ID |
| Duplex Name | Sense Sequence 5′ to 3′ | NO: | NM_031479.5 | 5′ to 3′ | NO: |
| AD-1656008 | UAGCCAGACAUGAGCUGUGAU | 128 | 1-23 | AUCACAGCUCAUGUCUGGCUACU | 262 |
| AD-1656026 | GAGGGUCAAGCACAGCUAUCU | 129 | 19-41 | AGAUAGCUGUGCUUGACCCUCAC | 263 |
| AD-1656043 | AUCCAUCAGAUGAUCUACUUU | 130 | 36-58 | AAAGUAGAUCAUCUGAUGGAUAG | 264 |
| AD-1656054 | GAUCUACUUUCAGCCUUCCUU | 131 | 47-69 | AAGGAAGGCUGAAAGUAGAUCAU | 265 |
| AD-1656074 | GAGUCCCAGACAAUAGAAGAU | 132 | 67-89 | AUCUUCUAUUGUCUGGGACUCAG | 266 |
| AD-1656086 | AUAGAAGACAGGUGGCUGUAU | 133 | 79-101 | AUACAGCCACCUGUCUUCUAUUG | 267 |
| AD-1656097 | GUGGCUGUACCCUUGGCCAAU | 134 | 90-112 | AUUGGCCAAGGGUACAGCCACCU | 268 |
| AD-1656108 | CUUGGCCAAGGGUAGGUGUGU | 135 | 101-123 | ACACACCUACCCUUGGCCAAGGG | 269 |
| AD-1656125 | GUGGCAGUGGUGUCUGCUGUU | 136 | 118-140 | AACAGCAGACACCACUGCCACAC | 270 |
| AD-1656139 | UGCUGUCACUGUGCCCUCAUU | 137 | 132-154 | AAUGAGGGCACAGUGACAGCAGA | 271 |
| AD-1656146 | AGCAAUCAGACUCAACAGACU | 138 | 160-182 | AGUCUGUUGAGUCUGAUUGCUGG | 272 |
| AD-1656164 | ACGGAGCAACUGCCAUCCGAU | 139 | 178-200 | AUCGGAUGGCAGUUGCUCCGUCU | 273 |
| AD-1656185 | GCUCCUGAACCAGGGCCAUUU | 140 | 199-221 | AAAUGGCCCUGGUUCAGGAGCCU | 274 |
| AD-1656196 | AGGGCCAUUCACCAGGAGCAU | 141 | 210-232 | AUGCUCCUGGUGAAUGGCCCUGG | 275 |
| AD-1656220 | GCUCCCUGAUGUCCAGCUCUU | 142 | 234-256 | AAGAGCUGGACAUCAGGGAGCCG | 276 |
| AD-1656233 | CAGCUCUGGCUGGUGCUGCUU | 143 | 247-269 | AAGCAGCACCAGCCAGAGCUGGA | 277 |
| AD-1656254 | UGGGCACUGGUGCGAGCACAU | 144 | 268-290 | AUGUGCUCGCACCAGUGCCCACA | 278 |
| AD-1656260 | AGGGUCUGUGUGUCCCUCCUU | 145 | 294-316 | AAGGAGGGACACACAGACCCUGU | 279 |
| AD-1656265 | CAAGCAGAACGAGCUCUGGUU | 146 | 337-359 | AACCAGAGCUCGUUCUGCUUGGG | 280 |
| AD-1656280 | CUGGUGCUGGAGCUAGCCAAU | 147 | 352-374 | AUUGGCUAGCUCCAGCACCAGAG | 281 |
| AD-1656292 | CUAGCCAAGCAGCAAAUCCUU | 148 | 364-386 | AAGGAUUUGCUGCUUGGCUAGCU | 282 |
| AD-1656307 | AUCCUGGAUGGGUUGCACCUU | 149 | 379-401 | AAGGUGCAACCCAUCCAGGAUUU | 283 |
| AD-1656319 | UUGCACCUGACCAGUCGUCCU | 150 | 391-413 | AGGACGACUGGUCAGGUGCAACC | 284 |
| AD-1656333 | UCGUCCCAGAAUAACUCAUCU | 151 | 405-427 | AGAUGAGUUAUUCUGGGACGACU | 285 |
| AD-1656360 | CCCUCCGGAGACUACAGCCAU | 152 | 452-474 | AUGGCUGUAGUCUCCGGAGGGCU | 286 |
| AD-1656372 | UACAGCCAGGGAGUGUGGCUU | 153 | 464-486 | AAGCCACACUCCCUGGCUGUAGU | 287 |
| AD-1656383 | AGUGUGGCUCCAGGGAAUGGU | 154 | 475-497 | ACCAUUCCCUGGAGCCACACUCC | 288 |
| AD-1656392 | CAUCAGCUUUGCUACUGUCAU | 155 | 504-526 | AUGACAGUAGCAAAGCUGAUGAC | 289 |
| AD-1656406 | CUGUCACAGACUCCACUUCAU | 68 | 518-540 | AUGAAGUGGAGUCUGUGACAGUA | 290 |
| AD-1656417 | UCCACUUCAGCCUACAGCUCU | 156 | 529-551 | AGAGCUGUAGGCUGAAGUGGAGU | 291 |
| AD-1656437 | CCUGCUCACUUUUCACCUGUU | 157 | 549-571 | AACAGGUGAAAAGUGAGCAGGGA | 292 |
| AD-1656449 | UCACCUGUCCACUCCUCGGUU | 158 | 561-583 | AACCGAGGAGUGGACAGGUGAAA | 293 |
| AD-1656468 | UCCCACCACCUGUACCAUGCU | 159 | 580-602 | AGCAUGGUACAGGUGGUGGGACC | 294 |
| AD-1656480 | UACCAUGCCCGCCUGUGGCUU | 160 | 592-614 | AAGCCACAGGCGGGCAUGGUACA | 295 |
| AD-1656492 | CCCUUCCUGGCACUCUUUGCU | 161 | 626-648 | AGCAAAGAGUGCCAGGAAGGGUG | 296 |
| AD-1656504 | CUCUUUGCUUGAGGAUCUUCU | 162 | 638-660 | AGAAGAUCCUCAAGCAAAGAGUG | 297 |
| AD-1656535 | ACUCUCCUGGCUGAGCACCAU | 163 | 694-716 | AUGGUGCUCAGCCAGGAGAGUGC | 298 |
| AD-1656547 | GAGCACCACAUCACCAACCUU | 164 | 706-728 | AAGGUUGGUGAUGUGGUGCUCAG | 299 |
| AD-1656559 | ACCAACCUGGGCUGGCAUACU | 165 | 718-740 | AGUAUGCCAGCCCAGGUUGGUGA | 300 |
| AD-1656570 | CUGGCAUACCUUAACUCUGCU | 166 | 729-751 | AGCAGAGUUAAGGUAUGCCAGCC | 301 |
| AD-1656587 | UGCCCUCUAGUGGCUUGAGGU | 167 | 746-768 | ACCUCAAGCCACUAGAGGGCAGA | 302 |
| AD-1656591 | AGAAGUCUGGUGUCCUGAAAU | 168 | 770-792 | AUUUCAGGACACCAGACUUCUCA | 303 |
| AD-1656602 | GUCCUGAAACUGCAACUAGAU | 169 | 781-803 | AUCUAGUUGCAGUUUCAGGACAC | 304 |
| AD-1656622 | ACAGCACAGUUACUGGACAAU | 170 | 821-843 | AUUGUCCAGUAACUGUGCUGUUG | 305 |
| AD-1656634 | CUGGACAACCGAGGCGGCUCU | 171 | 833-855 | AGAGCCGCCUCGGUUGUCCAGUA | 306 |
| AD-1656647 | GCGGCUCUUGGACACAGCAGU | 172 | 846-868 | ACUGCUGUGUCCAAGAGCCGCCU | 307 |
| AD-1656667 | GACACCAGCAGCCCUUCCUAU | 173 | 866-888 | AUAGGAAGGGCUGCUGGUGUCCU | 308 |
| AD-1656679 | CCUUCCUAGAGCUUAAGAUCU | 174 | 878-900 | AGAUCUUAAGCUCUAGGAAGGGC | 309 |
| AD-1656690 | CUUAAGAUCCGAGCCAAUGAU | 175 | 889-911 | AUCAUUGGCUCGGAUCUUAAGCU | 310 |
| AD-1656701 | AGCCAAUGAGCCUGGAGCAGU | 176 | 900-922 | ACUGCUCCAGGCUCAUUGGCUCG | 311 |
| AD-1656716 | AGGCGAGACCAUUACGUAGAU | 177 | 973-995 | AUCUACGUAAUGGUCUCGCCUGC | 312 |
| AD-1656728 | UACGUAGACUUCCAGGAACUU | 178 | 985-1007 | AAGUUCCUGGAAGUCUACGUAAU | 313 |
| AD-1656740 | CAGGAACUGGGAUGGCGGGAU | 179 | 997-1019 | AUCCCGCCAUCCCAGUUCCUGGA | 314 |
| AD-1656754 | GCGGGACUGGAUACUGCAGCU | 180 | 1011-1033 | AGCUGCAGUAUCCAGUCCCGCCA | 315 |
| AD-1656762 | UACCAGCUGAAUUACUGCAGU | 181 | 1039-1061 | ACUGCAGUAAUUCAGCUGGUACC | 316 |
| AD-1656775 | ACUGCAGUGGGCAGUGCCCUU | 182 | 1052-1074 | AAGGGCACUGCCCACUGCAGUAA | 317 |
| AD-1656792 | CAGGCAUUGCUGCCUCUUUCU | 183 | 1091-1113 | AGAAAGAGGCAGCAAUGCCUGGG | 318 |
| AD-1656808 | UUUCCAUUCUGCCGUCUUCAU | 184 | 1107-1129 | AUGAAGACGGCAGAAUGGAAAGA | 319 |
| AD-1656820 | CGUCUUCAGCCUCCUCAAAGU | 185 | 1119-1141 | ACUUUGAGGAGGCUGAAGACGGC | 320 |
| AD-1656832 | CCUCAAAGCCAACAAUCCUUU | 186 | 1131-1153 | AAAGGAUUGUUGGCUUUGAGGAG | 321 |
| AD-1656849 | CUUGGCCUGCCAGUACCUCCU | 187 | 1148-1170 | AGGAGGUACUGGCAGGCCAAGGA | 322 |
| AD-1656862 | UACCUCCUGUUGUGUCCCUAU | 188 | 1161-1183 | AUAGGGACACAACAGGAGGUACU | 323 |
| AD-1656873 | GUGUCCCUACUGCCCGAAGGU | 189 | 1172-1194 | ACCUUCGGGCAGUAGGGACACAA | 324 |
| AD-1656876 | CUCUCUCUCCUCUACCUGGAU | 190 | 1195-1217 | AUCCAGGUAGAGGAGAGAGAGGG | 325 |
| AD-1656888 | UACCUGGAUCAUAAUGGCAAU | 191 | 1207-1229 | AUUGCCAUUAUGAUCCAGGUAGA | 326 |
| AD-1656900 | AAUGGCAAUGUGGUCAAGACU | 192 | 1219-1241 | AGUCUUGACCACAUUGCCAUUAU | 327 |
| AD-1656915 | AAGACGGAUGUGCCAGAUAUU | 193 | 1234-1256 | AAUAUCUGGCACAUCCGUCUUGA | 328 |
| AD-1656926 | GCCAGAUAUGGUGGUGGAGGU | 194 | 1245-1267 | ACCUCCACCACCAUAUCUGGCAC | 329 |
| AD-1656942 | GAGGCCUGUGGCUGCAGCUAU | 195 | 1261-1283 | AUAGCUGCAGCCACAGGCCUCCA | 330 |
| AD-1656954 | UGCAGCUAGCAAGAGGACCUU | 196 | 1273-1295 | AAGGUCCUCUUGCUAGCUGCAGC | 331 |
| AD-1656958 | CUUUGGAGUGAAGAGACCAAU | 197 | 1297-1319 | AUUGGUCUCUUCACUCCAAAGCC | 332 |
| AD-1656969 | AGAGACCAAGAUGAAGUUUCU | 198 | 1308-1330 | AGAAACUUCAUCUUGGUCUCUUC | 333 |
| AD-1656996 | CAGGGCAUCUGUGACUGGAGU | 199 | 1335-1357 | ACUCCAGUCACAGAUGCCCUGUG | 334 |
| AD-1657013 | GAGGCAUCAGAUUCCUGAUCU | 200 | 1352-1374 | AGAUCAGGAAUCUGAUGCCUCCA | 335 |
| AD-1657022 | ACCCAACAACCACCUGGCAAU | 201 | 1381-1403 | AUUGCCAGGUGGUUGUUGGGUUG | 336 |
| AD-1657037 | GGCAAUAUGACUCACUUGACU | 202 | 1396-1418 | AGUCAAGUGAGUCAUAUUGCCAG | 337 |
| AD-1657045 | GACCCAAAUGGGCACUUUCUU | 203 | 1424-1446 | AAGAAAGUGCCCAUUUGGGUCCC | 338 |
| AD-1657058 | ACUUUCUUGUCUGAGACUCUU | 204 | 1437-1459 | AAGAGUCUCAGACAAGAAAGUGC | 339 |
| AD-1657069 | UGAGACUCUGGCUUAUUCCAU | 205 | 1448-1470 | AUGGAAUAAGCCAGAGUCUCAGA | 340 |
| AD-1657085 | UCCAGGUUGGCUGAUGUGUUU | 206 | 1464-1486 | AAACACAUCAGCCAACCUGGAAU | 341 |
| AD-1657099 | UGUGUUGGGAGAUGGGUAAAU | 207 | 1478-1500 | AUUUACCCAUCUCCCAACACAUC | 342 |
| AD-1657113 | GGUAAAGCGUUUCUUCUAAAU | 208 | 1492-1514 | AUUUAGAAGAAACGCUUUACCCA | 343 |
| AD-1657119 | UACCCAGAAAGCAUGAUUUCU | 209 | 1518-1540 | AGAAAUCAUGCUUUCUGGGUAGA | 344 |
| AD-1657133 | GAUUUCCUGCCCUAAGUCCUU | 210 | 1532-1554 | AAGGACUUAGGGCAGGAAAUCAU | 345 |
| AD-1657147 | AGUCCUGUGAGAAGAUGUCAU | 211 | 1546-1568 | AUGACAUCUUCUCACAGGACUUA | 346 |
| AD-1657164 | UCAGGGACUAGGGAGGGAGGU | 212 | 1563-1585 | ACCUCCCUCCCUAGUCCCUGACA | 347 |
| AD-1657185 | AAUUACUUAGCCUCUCCCAAU | 213 | 1600-1622 | AUUGGGAGAGGCUAAGUAAUUUU | 348 |
| AD-1657202 | CAAGAUGAGAAAGUCCUCAAU | 214 | 1617-1639 | AUUGAGGACUUUCUCAUCUUGGG | 349 |
| AD-1657211 | GGAGGAAGCAGAUAGAUGGUU | 215 | 1646-1668 | AACCAUCUAUCUGCUUCCUCCUC | 350 |
| AD-1657234 | GCAGGCUUGAAGCAGGGUAAU | 216 | 1669-1691 | AUUACCCUGCUUCAAGCCUGCUG | 351 |
| AD-1657245 | GCAGGGUAAGCAGGCUGGCCU | 217 | 1680-1702 | AGGCCAGCCUGCUUACCCUGCUU | 352 |
| AD-1657261 | GGCCCAGGGUAAGGGCUGUUU | 218 | 1696-1718 | AAACAGCCCUUACCCUGGGCCAG | 353 |
| AD-1657274 | GGCUGUUGAGGUACCUUAAGU | 219 | 1709-1731 | ACUUAAGGUACCUCAACAGCCCU | 354 |
| AD-1657286 | ACCUUAAGGGAAGGUCAAGAU | 220 | 1721-1743 | AUCUUGACCUUCCCUUAAGGUAC | 355 |
| AD-1657299 | GUCAAGAGGGAGAUGGGCAAU | 221 | 1734-1756 | AUUGCCCAUCUCCCUCUUGACCU | 356 |
| AD-1657322 | GCUGAGGGAGGAUGCUUAGGU | 222 | 1757-1779 | ACCUAAGCAUCCUCCCUCAGCGC | 357 |
| AD-1657324 | AGAAACAGGAGUCAGGAAAAU | 223 | 1785-1807 | AUUUUCCUGACUCCUGUUUCUGG | 358 |
| AD-1657335 | UCAGGAAAAUGAGGCACUAAU | 224 | 1796-1818 | AUUAGUGCCUCAUUUUCCUGACU | 359 |
| AD-1657347 | GGCACUAAGCCUAAGAAGUUU | 225 | 1808-1830 | AAACUUCUUAGGCUUAGUGCCUC | 360 |
| AD-1657359 | AAGAAGUUCCCUGGUUUUUCU | 226 | 1820-1842 | AGAAAAACCAGGGAACUUCUUAG | 361 |
| AD-1657374 | CACUGGGAGACAAGCAUUUAU | 227 | 1855-1877 | AUAAAUGCUUGUCUCCCAGUGGG | 362 |
| AD-1657385 | AAGCAUUUAUACUUUCUUUCU | 228 | 1866-1888 | AGAAAGAAAGUAUAAAUGCUUGU | 363 |
| AD-1657395 | UUUUGAGAUCGAGUCUCGCUU | 229 | 1899-1921 | AAGCGAGACUCGAUCUCAAAAAA | 364 |
| AD-1657410 | UCUCGCUCUGUCACCAGGCUU | 230 | 1912-1934 | AAGCCUGGUGACAGAGCGAGACU | 365 |
| AD-1657431 | AGUGCAGUGACACGAUCUUGU | 231 | 1934-1956 | ACAAGAUCGUGUCACUGCACUCC | 366 |
| AD-1657446 | GCUCACUGCAACCUCCGUCUU | 232 | 1954-1976 | AAGACGGAGGUUGCAGUGAGCCA | 367 |
| AD-1657457 | CCUCCGUCUCCUGGGUUCAAU | 233 | 1965-1987 | AUUGAACCCAGGAGACGGAGGUU | 368 |
| AD-1657463 | UUCUGCCUCAGCCUCCCGAGU | 234 | 1992-2014 | ACUCGGGAGGCUGAGGCAGAAGA | 369 |
| AD-1657475 | UGGGUUCAAGUGAUUCUUCUU | 235 | 1976-1998 | AAGAAGAAUCACUUGAACCCAGG | 370 |
| AD-1657503 | GAGCAGCUGGGAUUACAGGCU | 236 | 2009-2031 | AGCCUGUAAUCCCAGCUGCUCGG | 371 |
| AD-1657520 | CGCCCACUAAUUUUUGUAUUU | 237 | 2028-2050 | AAAUACAAAAAUUAGUGGGCGCC | 372 |
| AD-1657529 | UGUAUUCUUAGUAGAAACGAU | 238 | 2042-2064 | AUCGUUUCUACUAAGAAUACAAA | 373 |
| AD-1657540 | UAGAAACGAGGUUUCAACAUU | 239 | 2053-2075 | AAUGUUGAAACCUCGUUUCUACU | 374 |
| AD-1657552 | UUCAACAUGUUGGCCAGGAUU | 240 | 2065-2087 | AAUCCUGGCCAACAUGUUGAAAC | 375 |
| AD-1657564 | CCAGGAUGGUCUCAAUCUCUU | 241 | 2078-2100 | AAGAGAUUGAGACCAUCCUGGCC | 376 |
| AD-1657575 | UCAAUCUCUUGACCUCUUGAU | 242 | 2089-2111 | AUCAAGAGGUCAAGAGAUUGAGA | 377 |
| AD-1657586 | ACCUCUUGAUCCACCCGACUU | 243 | 2100-2122 | AAGUCGGGUGGAUCAAGAGGUCA | 378 |
| AD-1657600 | CCGACUUGGCCUCCCGAAGUU | 244 | 2114-2136 | AACUUCGGGAGGCCAAGUCGGGU | 379 |
| AD-1657615 | GAAGUGAUGAGAUUAUAGGCU | 245 | 2129-2151 | AGCCUAUAAUCUCAUCACUUCGG | 380 |
| AD-1657641 | CCUGGCUUAUACUUUCUUAAU | 246 | 2162-2184 | AUUAAGAAAGUAUAAGCCAGGCG | 381 |
| AD-1657653 | GAGAAAGAAAAUCAACAAAUU | 247 | 2189-2211 | AAUUUGUUGAUUUUCUUUCUCCU | 382 |
| AD-1657674 | UGAGUCAUAAAGAAGGGUUAU | 248 | 2210-2232 | AUAACCCUUCUUUAUGACUCACA | 383 |
| AD-1657687 | AGGGUUAGGGUGAUGGUCCAU | 249 | 2223-2245 | AUGGACCAUCACCCUAACCCUUC | 384 |
| AD-1657704 | CCAGAGCAACAGUUCUUCAAU | 250 | 2240-2262 | AUUGAAGAACUGUUGCUCUGGAC | 385 |
| AD-1657716 | UUCUUCAAGUGUACUCUGUAU | 251 | 2252-2274 | AUACAGAGUACACUUGAAGAACU | 386 |
| AD-1657727 | UACUCUGUAGGCUUCUGGGAU | 252 | 2263-2285 | AUCCCAGAAGCCUACAGAGUACA | 387 |
| AD-1657741 | CUGGGAGGUCCCUUUUCAGGU | 253 | 2277-2299 | ACCUGAAAAGGGACCUCCCAGAA | 388 |
| AD-1657744 | GUCCACAAAGUCAAAGCUAUU | 254 | 2300-2322 | AAUAGCUUUGACUUUGUGGACAC | 389 |
| AD-1657760 | CUAACAUGUUAUUUGCCUUUU | 255 | 2333-2355 | AAAAGGCAAAUAACAUGUUAGUA | 390 |
| AD-1657776 | CUUUUGAAUUCUCAUUAUCUU | 256 | 2349-2371 | AAGAUAAUGAGAAUUCAAAAGGC | 391 |
| AD-1657793 | GUAUUGUGGAGUUUUCCAGAU | 257 | 2376-2398 | AUCUGGAAAACUCCACAAUACAA | 392 |
| AD-1657811 | GAGGCCGUGUGACAUGUGAUU | 258 | 2394-2416 | AAUCACAUGUCACACGGCCUCUG | 393 |
| AD-1657822 | ACAUGUGAUUACAUCAUCUUU | 259 | 2405-2427 | AAAGAUGAUGUAAUCACAUGUCA | 394 |
| AD-1657834 | AUCAUCUUUCUGACAUCAUUU | 260 | 2417-2439 | AAAUGAUGUCAGAAAGAUGAUGU | 395 |
| AD-1657845 | GACAUCAUUGUUAAUGGAAUU | 261 | 2428-2450 | AAUUCCAUUAACAAUGAUGUCAG | 396 |

TABLE 3
Modified Sense and Antisense Strand Sequences of INHBE dsRNA Agents

| | | SEQ | | SEQ | | SEQ |
|---|---|---|---|---|---|---|
| | | ID | | ID | | ID |
| Duplex Name | Sense Sequence 5′ to 3′ | NO: | Antisense Sequence 5′ to 3′ | NO: | mRNA target sequence | NO: |
| AD-1656008 | usasgccaGfaCfAfUfgagcugugauL96 | 397 | asUfscacAfgCfUfcaugUfcUfggcuascsu | 532 | AGTAGCCAGACATGAGCTGTGAG | 667 |
| AD-1656026 | gsasggguCfaAfGfCfacagcuaucuL96 | 398 | asGfsauaGfcUfGfugcuUfgAfcccucsasc | 533 | GTGAGGGTCAAGCACAGCTATCC | 668 |
| AD-1656043 | asusccauCfaGfAfUfgaucuacuuuL96 | 399 | asAfsaguAfgAfUfcaucUfgAfuggausasg | 534 | CTATCCATCAGATGATCTACTTT | 669 |
| AD-1656054 | gsasucuaCfuUfUfCfagccuuccuuL96 | 400 | asAfsggaAfgGfCfugaaAfgUfagaucsasu | 535 | ATGATCTACTTTCAGCCTTCCTG | 670 |
| AD-1656074 | gsasguccCfaGfAfCfaauagaagauL96 | 401 | asUfscuuCfuAfUfugucUfgGfgacucsasg | 536 | CTGAGTCCCAGACAATAGAAGAC | 671 |
| AD-1656086 | asusagaaGfaCfAfGfguggcuguauL96 | 402 | asUfsacaGfcCfAfccugUfcUfucuaususg | 537 | CAATAGAAGACAGGTGGCTGTAC | 672 |
| AD-1656097 | gsusggcuGfuAfCfCfcuuggccaauL96 | 403 | asUfsuggCfcAfAfggguAfcAfgccacscsu | 538 | AGGTGGCTGTACCCTTGGCCAAG | 673 |
| AD-1656108 | csusuggcCfaAfGfGfguagguguguL96 | 404 | asCfsacaCfcUfAfcccuUfgGfccaagsgsg | 539 | CCCTTGGCCAAGGGTAGGTGTGG | 674 |
| AD-1656125 | gsusggcaGfuGfGfUfgucugcuguuL96 | 405 | asAfscagCfaGfAfcaccAfcUfgccacsasc | 540 | GTGTGGCAGTGGTGTCTGCTGTC | 675 |
| AD-1656139 | usgscuguCfaCfUfGfugcccucauuL96 | 406 | asAfsugaGfgGfCfacagUfgAfcagcasgsa | 541 | TCTGCTGTCACTGTGCCCTCATT | 676 |
| AD-1656146 | asgscaauCfaGfAfCfucaacagacuL96 | 407 | asGfsucuGfuUfGfagucUfgAfuugcusgsg | 542 | CCAGCAATCAGACTCAACAGACG | 677 |
| AD-1656164 | ascsggagCfaAfCfUfgccauccgauL96 | 408 | asUfscggAfuGfGfcaguUfgCfuccguscsu | 543 | AGACGGAGCAACTGCCATCCGAG | 678 |
| AD-1656185 | gscsuccuGfaAfCfCfagggccauuuL96 | 409 | asAfsaugGfcCfCfugguUfcAfggagescsu | 544 | AGGCTCCTGAACCAGGGCCATTC | 679 |
| AD-1656196 | asgsggccAfuUfCfAfccaggagcauL96 | 410 | asUfsgcuCfcUfGfgugaAfuGfgcccusgsg | 545 | CCAGGGCCATTCACCAGGAGCAT | 680 |
| AD-1656220 | gscsucccUfgAfUfGfuccagcucuuL96 | 411 | asAfsgagCfuGfGfacauCfaGfggagcscsg | 546 | CGGCTCCCTGATGTCCAGCTCTG | 681 |
| AD-1656233 | csasgcucUfgGfCfUfggugcugcuuL96 | 412 | asAfsgcaGfcAfCfcagcCfaGfagcugsgsa | 547 | TCCAGCTCTGGCTGGTGCTGCTG | 682 |
| AD-1656254 | usgsggcaCfuGfGfUfgcgagcacauL96 | 413 | asUfsgugCfuCfGfcaccAfgUfgcccascsa | 548 | TGTGGGCACTGGTGCGAGCACAG | 683 |
| AD-1656260 | asgsggucUfgUfGfUfgucccuccuuL96 | 414 | asAfsggaGfgGfAfcacaCfaGfacccusgsu | 549 | ACAGGGTCTGTGTGTCCCTCCTG | 684 |
| AD-1656265 | csasagcaGfaAfCfGfagcucugguuL96 | 415 | asAfsccaGfaGfCfucguUfcUfgcuugsgsg | 550 | CCCAAGCAGAACGAGCTCTGGTG | 685 |
| AD-1656280 | csusggugCfuGfGfAfgcuagccaauL96 | 416 | asUfsuggCfuAfGfcuccAfgCfaccagsasg | 551 | CTCTGGTGCTGGAGCTAGCCAAG | 686 |
| AD-1656292 | csusagccAfaGfCfAfgcaaauccuuL96 | 417 | asAfsggaUfuUfGfcugcUfuGfgcuagscsu | 552 | AGCTAGCCAAGCAGCAAATCCTG | 687 |
| AD-1656307 | asusccugGfaUfGfGfguugcaccuuL96 | 418 | asAfsgguGfcAfAfcccaUfcCfaggaususu | 553 | AAATCCTGGATGGGTTGCACCTG | 688 |
| AD-1656319 | ususgcacCfuGfAfCfcagucguccuL96 | 419 | asGfsgacGfaCfUfggucAfgGfugcaascsc | 554 | GGTTGCACCTGACCAGTCGTCCC | 689 |
| AD-1656333 | uscsguccCfaGfAfAfuaacucaucuL96 | 420 | asGfsaugAfgUfUfauucUfgGfgacgascsu | 555 | AGTCGTCCCAGAATAACTCATCC | 690 |
| AD-1656360 | cscscuccGfgAfGfAfcuacagccauL96 | 421 | asUfsggcUfgUfAfgucuCfcGfgagggscsu | 556 | AGCCCTCCGGAGACTACAGCCAG | 691 |
| AD-1656372 | usascagcCfaGfGfGfaguguggcuuL96 | 422 | asAfsgccAfcAfCfucccUfgGfcuguasgsu | 557 | ACTACAGCCAGGGAGTGTGGCTC | 692 |
| AD-1656383 | asgsugugGfcUfCfCfagggaaugguL96 | 423 | asCfscauUfcCfCfuggaGfcCfacacuscsc | 558 | GGAGTGTGGCTCCAGGGAATGGG | 693 |
| AD-1656392 | csasucagCfuUfUfGfcuacugucauL96 | 424 | asUfsgacAfgUfAfgcaaAfgCfugaugsasc | 559 | GTCATCAGCTTTGCTACTGTCAC | 694 |
| AD-1656406 | csusgucaCfaGfAfCfuccacuucauL96 | 425 | asUfsgaaGfuGfGfagucUfgUfgacagsusa | 560 | TACTGTCACAGACTCCACTTCAG | 695 |
| AD-1656417 | uscscacuUfcAfGfCfcuacagcucuL96 | 426 | asGfsagcUfgUfAfggcuGfaAfguggasgsu | 561 | ACTCCACTTCAGCCTACAGCTCC | 696 |
| AD-1656437 | cscsugcuCfaCfUfUfuucaccuguuL96 | 427 | asAfscagGfuGfAfaaagUfgAfgcaggsgsa | 562 | TCCCTGCTCACTTTTCACCTGTC | 697 |
| AD-1656449 | uscsaccuGfuCfCfAfcuccucgguuL96 | 428 | asAfsccgAfgGfAfguggAfcAfggugasasa | 563 | TTTCACCTGTCCACTCCTCGGTC | 698 |
| AD-1656468 | uscsccacCfaCfCfUfguaccaugcuL96 | 429 | asGfscauGfgUfAfcaggUfgGfugggascsc | 564 | GGTCCCACCACCTGTACCATGCC | 699 |
| AD-1656480 | usasccauGfcCfCfGfccuguggcuuL96 | 430 | asAfsgccAfcAfGfgcggGfcAfugguascsa | 565 | TGTACCATGCCCGCCTGTGGCTG | 700 |
| AD-1656492 | cscscuucCfuGfGfCfacucuuugcuL96 | 431 | asGfscaaAfgAfGfugccAfgGfaagggsusg | 566 | CACCCTTCCTGGCACTCTTTGCT | 701 |
| AD-1656504 | csuscuuuGfcUfUfGfaggaucuucuL96 | 432 | asGfsaagAfuCfCfucaaGfcAfaagagsusg | 567 | CACTCTTTGCTTGAGGATCTTCC | 702 |
| AD-1656535 | ascsucucCfuGfGfCfugagcaccauL96 | 433 | asUfsgguGfcUfCfagccAfgGfagagusgsc | 568 | GCACTCTCCTGGCTGAGCACCAC | 703 |
| AD-1656547 | gsasgcacCfaCfAfUfcaccaaccuuL96 | 434 | asAfsgguUfgGfUfgaugUfgGfugcucsasg | 569 | CTGAGCACCACATCACCAACCTG | 704 |
| AD-1656559 | ascscaacCfuGfGfGfcuggcauacuL96 | 435 | asGfsuauGfcCfAfgcccAfgGfuuggusgsa | 570 | TCACCAACCTGGGCTGGCATACC | 705 |
| AD-1656570 | csusggcaUfaCfCfUfuaacucugcuL96 | 436 | asGfscagAfgUfUfaaggUfaUfgccagscsc | 571 | GGCTGGCATACCTTAACTCTGCC | 706 |
| AD-1656587 | usgscccuCfuAfGfUfggcuugagguL96 | 437 | asCfscucAfaGfCfcacuAfgAfgggcasgsa | 572 | TCTGCCCTCTAGTGGCTTGAGGG | 707 |
| AD-1656591 | asgsaaguCfuGfGfUfguccugaaauL96 | 438 | asUfsuucAfgGfAfcaccAfgAfcuucuscsa | 573 | TGAGAAGTCTGGTGTCCTGAAAC | 708 |
| AD-1656602 | gsusccugAfaAfCfUfgcaacuagauL96 | 439 | asUfscuaGfuUfGfcaguUfuCfaggacsasc | 574 | GTGTCCTGAAACTGCAACTAGAC | 709 |
| AD-1656622 | ascsagcaCfaGfUfUfacuggacaauL96 | 440 | asUfsuguCfcAfGfuaacUfgUfgcugususg | 575 | CAACAGCACAGTTACTGGACAAC | 710 |
| AD-1656634 | csusggacAfaCfCfGfaggcggcucuL96 | 441 | asGfsagcCfgCfCfucggUfuGfuccagsusa | 576 | TACTGGACAACCGAGGCGGCTCT | 711 |
| AD-1656647 | gscsggcuCfuUfGfGfacacagcaguL96 | 442 | asCfsugcUfgUfGfuccaAfgAfgccgcscsu | 577 | AGGCGGCTCTTGGACACAGCAGG | 712 |
| AD-1656667 | gsascaccAfgCfAfGfcccuuccuauL96 | 443 | asUfsaggAfaGfGfgcugCfuGfgugucscsu | 578 | AGGACACCAGCAGCCCTTCCTAG | 713 |
| AD-1656679 | cscsuuccUfaGfAfGfcuuaagaucuL96 | 444 | asGfsaucUfuAfAfgcucUfaGfgaaggsgsc | 579 | GCCCTTCCTAGAGCTTAAGATCC | 714 |
| AD-1656690 | csusuaagAfuCfCfGfagccaaugauL96 | 445 | asUfscauUfgGfCfucggAfuCfuuaagscsu | 580 | AGCTTAAGATCCGAGCCAATGAG | 715 |
| AD-1656701 | asgsccaaUfgAfGfCfcuggagcaguL96 | 446 | asCfsugcUfcCfAfggcuCfaUfuggcuscsg | 581 | CGAGCCAATGAGCCTGGAGCAGG | 716 |
| AD-1656716 | asgsgcgaGfaCfCfAfuuacguagauL96 | 447 | asUfscuaCfgUfAfauggUfcUfcgccusgsc | 582 | GCAGGCGAGACCATTACGTAGAC | 717 |
| AD-1656728 | usascguaGfaCfUfUfccaggaacuuL96 | 448 | asAfsguuCfcUfGfgaagUfcUfacguasasu | 583 | ATTACGTAGACTTCCAGGAACTG | 718 |
| AD-1656740 | csasggaaCfuGfGfGfauggcgggauL96 | 449 | asUfscccGfcCfAfucccAfgUfuccugsgsa | 584 | TCCAGGAACTGGGATGGCGGGAC | 719 |
| AD-1656754 | gscsgggaCfuGfGfAfuacugcagcuL96 | 450 | asGfscugCfaGfUfauccAfgUfcccgcscsa | 585 | TGGCGGGACTGGATACTGCAGCC | 720 |
| AD-1656762 | usasccagCfuGfAfAfuuacugcaguL96 | 451 | asCfsugcAfgUfAfauucAfgCfugguascsc | 586 | GGTACCAGCTGAATTACTGCAGT | 721 |
| AD-1656775 | ascsugcaGfuGfGfGfcagugcccuuL96 | 452 | asAfsgggCfaCfUfgcccAfcUfgcagusasa | 587 | TTACTGCAGTGGGCAGTGCCCTC | 722 |
| AD-1656792 | csasggcaUfuGfCfUfgccucuuucuL96 | 453 | asGfsaaaGfaGfGfcagcAfaUfgccugsgsg | 588 | CCCAGGCATTGCTGCCTCTTTCC | 723 |
| AD-1656808 | ususuccaUfuCfUfGfccgucuucauL96 | 454 | asUfsgaaGfaCfGfgcagAfaUfggaaasgsa | 589 | TCTTTCCATTCTGCCGTCTTCAG | 724 |
| AD-1656820 | csgsucuuCfaGfCfCfuccucaaaguL96 | 455 | asCfsuuuGfaGfGfaggcUfgAfagacgsgsc | 590 | GCCGTCTTCAGCCTCCTCAAAGC | 725 |
| AD-1656832 | cscsucaaAfgCfCfAfacaauccuuuL96 | 456 | asAfsaggAfuUfGfuuggCfuUfugaggsasg | 591 | CTCCTCAAAGCCAACAATCCTTG | 726 |
| AD-1656849 | csusuggcCfuGfCfCfaguaccuccuL96 | 457 | asGfsgagGfuAfCfuggcAfgGfccaagsgsa | 592 | TCCTTGGCCTGCCAGTACCTCCT | 727 |
| AD-1656862 | usasccucCfuGfUfUfgugucccuauL96 | 458 | asUfsaggGfaCfAfcaacAfgGfagguascsu | 593 | AGTACCTCCTGTTGTGTCCCTAC | 728 |
| AD-1656873 | gsusguccCfuAfCfUfgcccgaagguL96 | 459 | asCfscuuCfgGfGfcaguAfgGfgacacsasa | 594 | TTGTGTCCCTACTGCCCGAAGGC | 729 |
| AD-1656876 | csuscucuCfuCfCfUfcuaccuggauL96 | 460 | asUfsccaGfgUfAfgaggAfgAfgagagsgsg | 595 | CCCTCTCTCTCCTCTACCTGGAT | 730 |
| AD-1656888 | usasccugGfaUfCfAfuaauggcaauL96 | 461 | asUfsugcCfaUfUfaugaUfcCfagguasgsa | 596 | TCTACCTGGATCATAATGGCAAT | 731 |
| AD-1656900 | asasuggcAfaUfGfUfggucaagacuL96 | 462 | asGfsucuUfgAfCfcacaUfuGfccauusasu | 597 | ATAATGGCAATGTGGTCAAGACG | 732 |
| AD-1656915 | asasgacgGfaUfGfUfgccagauauuL96 | 463 | asAfsuauCfuGfGfcacaUfcCfgucuusgsa | 598 | TCAAGACGGATGTGCCAGATATG | 733 |
| AD-1656926 | gscscagaUfaUfGfGfugguggagguL96 | 464 | asCfscucCfaCfCfaccaUfaUfcuggcsasc | 599 | GTGCCAGATATGGTGGTGGAGGC | 734 |
| AD-1656942 | gsasggccUfgUfGfGfcugcagcuauL96 | 465 | asUfsagcUfgCfAfgccaCfaGfgccucscsa | 600 | TGGAGGCCTGTGGCTGCAGCTAG | 735 |
| AD-1656954 | usgscagcUfaGfCfAfagaggaccuuL96 | 466 | asAfsgguCfcUfCfuugcUfaGfcugcasgsc | 601 | GCTGCAGCTAGCAAGAGGACCTG | 736 |
| AD-1656958 | csusuuggAfgUfGfAfagagaccaauL96 | 467 | asUfsuggUfcUfCfuucaCfuCfcaaagscsc | 602 | GGCTTTGGAGTGAAGAGACCAAG | 737 |
| AD-1656969 | asgsagacCfaAfGfAfugaaguuucuL96 | 468 | asGfsaaaCfuUfCfaucuUfgGfucucususc | 603 | GAAGAGACCAAGATGAAGTTTCC | 738 |
| AD-1656996 | csasgggcAfuCfUfGfugacuggaguL96 | 469 | asCfsuccAfgUfCfacagAfuGfcccugsusg | 604 | CACAGGGCATCTGTGACTGGAGG | 739 |
| AD-1657013 | gsasggcaUfcAfGfAfuuccugaucuL96 | 470 | asGfsaucAfgGfAfaucuGfaUfgccucscsa | 605 | TGGAGGCATCAGATTCCTGATCC | 740 |
| AD-1657022 | ascsccaaCfaAfCfCfaccuggcaauL96 | 471 | asUfsugcCfaGfGfugguUfgUfugggususg | 606 | CAACCCAACAACCACCTGGCAAT | 741 |
| AD-1657037 | gsgscaauAfuGfAfCfucacuugacuL96 | 472 | asGfsucaAfgUfGfagucAfuAfuugccsasg | 607 | CTGGCAATATGACTCACTTGACC | 742 |
| AD-1657045 | gsascccaAfaUfGfGfgcacuuucuuL96 | 473 | asAfsgaaAfgUfGfcccaUfuUfgggucscsc | 608 | GGGACCCAAATGGGCACTTTCTT | 743 |
| AD-1657058 | ascsuuucUfuGfUfCfugagacucuuL96 | 474 | asAfsgagUfcUfCfagacAfaGfaaagusgsc | 609 | GCACTTTCTTGTCTGAGACTCTG | 744 |
| AD-1657069 | usgsagacUfcUfGfGfcuuauuccauL96 | 475 | asUfsggaAfuAfAfgccaGfaGfucucasgsa | 610 | TCTGAGACTCTGGCTTATTCCAG | 745 |
| AD-1657085 | uscscaggUfuGfGfCfugauguguuuL96 | 476 | asAfsacaCfaUfCfagccAfaCfcuggasasu | 611 | ATTCCAGGTTGGCTGATGTGTTG | 746 |
| AD-1657099 | usgsuguuGfgGfAfGfauggguaaauL96 | 477 | asUfsuuaCfcCfAfucucCfcAfacacasusc | 612 | GATGTGTTGGGAGATGGGTAAAG | 747 |
| AD-1657113 | gsgsuaaaGfcGfUfUfucuucuaaauL96 | 478 | asUfsuuaGfaAfGfaaacGfcUfuuaccscsa | 613 | TGGGTAAAGCGTTTCTTCTAAAG | 748 |
| AD-1657119 | usascccaGfaAfAfGfcaugauuucuL96 | 479 | asGfsaaaUfcAfUfgcuuUfcUfggguasgsa | 614 | TCTACCCAGAAAGCATGATTTCC | 749 |
| AD-1657133 | gsasuuucCfuGfCfCfcuaaguccuuL96 | 480 | asAfsggaCfuUfAfgggcAfgGfaaaucsasu | 615 | ATGATTTCCTGCCCTAAGTCCTG | 750 |
| AD-1657147 | asgsuccuGfuGfAfGfaagaugucauL96 | 481 | asUfsgacAfuCfUfucucAfcAfggacususa | 616 | TAAGTCCTGTGAGAAGATGTCAG | 751 |
| AD-1657164 | uscsagggAfcUfAfGfggagggagguL96 | 482 | asCfscucCfcUfCfccuaGfuCfccugascsa | 617 | TGTCAGGGACTAGGGAGGGAGGG | 752 |
| AD-1657185 | asasuuacUfuAfGfCfcucucccaauL96 | 483 | asUfsuggGfaGfAfggcuAfaGfuaauususu | 618 | AAAATTACTTAGCCTCTCCCAAG | 753 |
| AD-1657202 | csasagauGfaGfAfAfaguccucaauL96 | 484 | asUfsugaGfgAfCfuuucUfcAfucuugsgsg | 619 | CCCAAGATGAGAAAGTCCTCAAG | 754 |
| AD-1657211 | gsgsaggaAfgCfAfGfauagaugguuL96 | 485 | asAfsccaUfcUfAfucugCfuUfccuccsusc | 620 | GAGGAGGAAGCAGATAGATGGTC | 755 |
| AD-1657234 | gscsaggcUfuGfAfAfgcaggguaauL96 | 486 | asUfsuacCfcUfGfcuucAfaGfccugcsusg | 621 | CAGCAGGCTTGAAGCAGGGTAAG | 756 |
| AD-1657245 | gscsagggUfaAfGfCfaggcuggccuL96 | 487 | asGfsgccAfgCfCfugcuUfaCfccugesusu | 622 | AAGCAGGGTAAGCAGGCTGGCCC | 757 |
| AD-1657261 | gsgscccaGfgGfUfAfagggcuguuuL96 | 488 | asAfsacaGfcCfCfuuacCfcUfgggccsasg | 623 | CTGGCCCAGGGTAAGGGCTGTTG | 758 |
| AD-1657274 | gsgscuguUfgAfGfGfuaccuuaaguL96 | 489 | asCfsuuaAfgGfUfaccuCfaAfcagccscsu | 624 | AGGGCTGTTGAGGTACCTTAAGG | 759 |
| AD-1657286 | ascscuuaAfgGfGfAfaggucaagauL96 | 490 | asUfscuuGfaCfCfuuccCfuUfaaggusasc | 625 | GTACCTTAAGGGAAGGTCAAGAG | 760 |
| AD-1657299 | gsuscaagAfgGfGfAfgaugggcaauL96 | 491 | asUfsugcCfcAfUfcuccCfuCfuugacscsu | 626 | AGGTCAAGAGGGAGATGGGCAAG | 761 |
| AD-1657322 | gscsugagGfgAfGfGfaugcuuagguL96 | 492 | asCfscuaAfgCfAfuccuCfcCfucagesgsc | 627 | GCGCTGAGGGAGGATGCTTAGGG | 762 |
| AD-1657324 | asgsaaacAfgGfAfGfucaggaaaauL96 | 493 | asUfsuuuCfcUfGfacucCfuGfuuucusgsg | 628 | CCAGAAACAGGAGTCAGGAAAAT | 763 |
| AD-1657335 | uscsaggaAfaAfUfGfaggcacuaauL96 | 494 | asUfsuagUfgCfCfucauUfuUfccugascsu | 629 | AGTCAGGAAAATGAGGCACTAAG | 764 |
| AD-1657347 | gsgscacuAfaGfCfCfuaagaaguuuL96 | 495 | asAfsacuUfcUfUfaggcUfuAfgugccsusc | 630 | GAGGCACTAAGCCTAAGAAGTTC | 765 |
| AD-1657359 | asasgaagUfuCfCfCfugguuuuucuL96 | 496 | asGfsaaaAfaCfCfagggAfaCfuucuusasg | 631 | CTAAGAAGTTCCCTGGTTTTTCC | 766 |
| AD-1657374 | csascuggGfaGfAfCfaagcauuuauL96 | 497 | asUfsaaaUfgCfUfugucUfcCfcagugsgsg | 632 | CCCACTGGGAGACAAGCATTTAT | 767 |
| AD-1657385 | asasgcauUfuAfUfAfcuuucuuucuL96 | 498 | asGfsaaaGfaAfAfguauAfaAfugcuusgsu | 633 | ACAAGCATTTATACTTTCTTTCT | 768 |
| AD-1657395 | ususuugaGfaUfCfGfagucucgcuuL96 | 499 | asAfsgcgAfgAfCfucgaUfcUfcaaaasasa | 634 | TTTTTTGAGATCGAGTCTCGCTC | 769 |
| AD-1657410 | uscsucgcUfcUfGfUfcaccaggcuuL96 | 500 | asAfsgccUfgGfUfgacaGfaGfcgagascsu | 635 | AGTCTCGCTCTGTCACCAGGCTG | 770 |
| AD-1657431 | asgsugcaGfuGfAfCfacgaucuuguL96 | 501 | asCfsaagAfuCfGfugucAfcUfgcacuscsc | 636 | GGAGTGCAGTGACACGATCTTGG | 771 |
| AD-1657446 | gscsucacUfgCfAfAfccuccgucuuL96 | 502 | asAfsgacGfgAfGfguugCfaGfugagcscsa | 637 | TGGCTCACTGCAACCTCCGTCTC | 772 |
| AD-1657457 | cscsuccgUfcUfCfCfuggguucaauL96 | 503 | asUfsugaAfcCfCfaggaGfaCfggaggsusu | 638 | AACCTCCGTCTCCTGGGTTCAAG | 773 |
| AD-1657463 | ususcugcCfuCfAfGfccucccgaguL96 | 504 | asCfsucgGfgAfGfgcugAfgGfcagaasgsa | 639 | TCTTCTGCCTCAGCCTCCCGAGC | 774 |
| AD-1657475 | usgsgguuCfaAfGfUfgauucuucuuL96 | 505 | asAfsgaaGfaAfUfcacuUfgAfacccasgsg | 640 | CCTGGGTTCAAGTGATTCTTCTG | 775 |
| AD-1657503 | gsasgcagCfuGfGfGfauuacaggcuL96 | 506 | asGfsccuGfuAfAfucccAfgCfugcucsgsg | 641 | CCGAGCAGCTGGGATTACAGGCG | 776 |
| AD-1657520 | csgscccaCfuAfAfUfuuuuguauuuL96 | 507 | asAfsauaCfaAfAfaauuAfgUfgggcgscsc | 642 | GGCGCCCACTAATTTTTGTATTC | 777 |
| AD-1657529 | usgsuauuCfuUfAfGfuagaaacgauL96 | 508 | asUfscguUfuCfUfacuaAfgAfauacasasa | 643 | TTTGTATTCTTAGTAGAAACGAG | 778 |
| AD-1657540 | usasgaaaCfgAfGfGfuuucaacauuL96 | 509 | asAfsuguUfgAfAfaccuCfgUfuucuascsu | 644 | AGTAGAAACGAGGTTTCAACATG | 779 |
| AD-1657552 | ususcaacAfuGfUfUfggccaggauuL96 | 510 | asAfsuccUfgGfCfcaacAfuGfuugaasasc | 645 | GTTTCAACATGTTGGCCAGGATG | 780 |
| AD-1657564 | cscsaggaUfgGfUfCfucaaucucuuL96 | 511 | asAfsgagAfuUfGfagacCfaUfccuggscsc | 646 | GGCCAGGATGGTCTCAATCTCTT | 781 |
| AD-1657575 | uscsaaucUfcUfUfGfaccucuugauL96 | 512 | asUfscaaGfaGfGfucaaGfaGfauugasgsa | 647 | TCTCAATCTCTTGACCTCTTGAT | 782 |
| AD-1657586 | ascscucuUfgAfUfCfcacccgacuuL96 | 513 | asAfsgucGfgGfUfggauCfaAfgagguscsa | 648 | TGACCTCTTGATCCACCCGACTT | 783 |
| AD-1657600 | cscsgacuUfgGfCfCfucccgaaguuL96 | 514 | asAfscuuCfgGfGfaggcCfaAfgucggsgsu | 649 | ACCCGACTTGGCCTCCCGAAGTG | 784 |
| AD-1657615 | gsasagugAfuGfAfGfauuauaggcuL96 | 515 | asGfsccuAfuAfAfucucAfuCfacuucsgsg | 650 | CCGAAGTGATGAGATTATAGGCG | 785 |
| AD-1657641 | cscsuggcUfuAfUfAfcuuucuuaauL96 | 516 | asUfsuaaGfaAfAfguauAfaGfccaggscsg | 651 | CGCCTGGCTTATACTTTCTTAAT | 786 |
| AD-1657653 | gsasgaaaGfaAfAfAfucaacaaauuL96 | 517 | asAfsuuuGfuUfGfauuuUfcUfuucucscsu | 652 | AGGAGAAAGAAAATCAACAAATG | 787 |
| AD-1657674 | usgsagucAfuAfAfAfgaaggguuauL96 | 518 | asUfsaacCfcUfUfcuuuAfuGfacucascsa | 653 | TGTGAGTCATAAAGAAGGGTTAG | 788 |
| AD-1657687 | asgsgguuAfgGfGfUfgaugguccauL96 | 519 | asUfsggaCfcAfUfcaccCfuAfacccususc | 654 | GAAGGGTTAGGGTGATGGTCCAG | 789 |
| AD-1657704 | cscsagagCfaAfCfAfguucuucaauL96 | 520 | asUfsugaAfgAfAfcuguUfgCfucuggsasc | 655 | GTCCAGAGCAACAGTTCTTCAAG | 790 |
| AD-1657716 | ususcuucAfaGfUfGfuacucuguauL96 | 521 | asUfsacaGfaGfUfacacUfuGfaagaascsu | 656 | AGTTCTTCAAGTGTACTCTGTAG | 791 |
| AD-1657727 | usascucuGfuAfGfGfcuucugggauL96 | 522 | asUfscccAfgAfAfgccuAfcAfgaguascsa | 657 | TGTACTCTGTAGGCTTCTGGGAG | 792 |
| AD-1657741 | csusgggaGfgUfCfCfcuuuucagguL96 | 523 | asCfscugAfaAfAfgggaCfcUfcccagsasa | 658 | TTCTGGGAGGTCCCTTTTCAGGG | 793 |
| AD-1657744 | gsusccacAfaAfGfUfcaaagcuauuL96 | 524 | asAfsuagCfuUfUfgacuUfuGfuggacsasc | 659 | GTGTCCACAAAGTCAAAGCTATT | 794 |
| AD-1657760 | csusaacaUfgUfUfAfuuugccuuuuL96 | 525 | asAfsaagGfcAfAfauaaCfaUfguuagsusa | 660 | TACTAACATGTTATTTGCCTTTT | 795 |
| AD-1657776 | csusuuugAfaUfUfCfucauuaucuuL96 | 526 | asAfsgauAfaUfGfagaaUfuCfaaaagsgsc | 661 | GCCTTTTGAATTCTCATTATCTT | 796 |
| AD-1657793 | gsusauugUfgGfAfGfuuuuccagauL96 | 527 | asUfscugGfaAfAfacucCfaCfaauacsasa | 662 | TTGTATTGTGGAGTTTTCCAGAG | 797 |
| AD-1657811 | gsasggccGfuGfUfGfacaugugauuL96 | 528 | asAfsucaCfaUfGfucacAfcGfgccucsusg | 663 | CAGAGGCCGTGTGACATGTGATT | 798 |
| AD-1657822 | ascsauguGfaUfUfAfcaucaucuuuL96 | 529 | asAfsagaUfgAfUfguaaUfcAfcauguscsa | 664 | TGACATGTGATTACATCATCTTT | 799 |
| AD-1657834 | asuscaucUfuUfCfUfgacaucauuuL96 | 530 | asAfsaugAfuGfUfcagaAfaGfaugausgsu | 665 | ACATCATCTTTCTGACATCATTG | 800 |
| AD-1657845 | gsascaucAfuUfGfUfuaauggaauuL96 | 531 | asAfsuucCfaUfUfaacaAfuGfaugucsasg | 666 | CTGACATCATTGTTAATGGAATG | 801 |

TABLE 4
Unmodified Sense and Antisense Strand Sequences of ACVR1C dsRNA Agents
Comprising anUnsaturated C22 Hydrocarbon Chain Conjugated to Position 6
on the Sense Strand, Counting from the 5′-end of the Sense Strand

| | | SEQ | | | SEQ | |
|---|---|---|---|---|---|---|
| | | ID | Range in | Antisense | ID | Range in |
| Duplex Name | Sense Sequence 5′ to 3′ | NO: | NM_145259.3 | Sequence 5′ to 3′ | NO: | NM_145259.3 |
| AD-1735861 | UUUUUUCAAACUCCAUUCCUA | 802 | 3085-3105 | UAGGAAUGGAGUUUGAAAAAAGA | 1071 | 3083-3105 |
| AD-1735862 | ACUUUCAUCUGUCUUCAGAUA | 803 | 8677-8697 | UAUCUGAAGACAGAUGAAAGUUA | 1072 | 8675-8697 |
| AD-1735863 | CCUCAUAACUUCUCCAGUAAA | 804 | 6745-6765 | UUUACUGGAGAAGUUAUGAGGUG | 1073 | 6743-6765 |
| AD-1735864 | CUCACUAUCUUUCAACAUUAA | 805 | 5871-5891 | UUAAUGUUGAAAGAUAGUGAGGG | 1074 | 5869-5891 |
| AD-1735865 | CUCGUUAAUGCUCUCAUCCAA | 806 | 3562-3582 | UUGGAUGAGAGCAUUAACGAGUA | 1075 | 3560-3582 |
| AD-1735866 | GUUCUUCAUAAUCCACUACUA | 807 | 2292-2312 | UAGUAGUGGAUUAUGAAGAACAG | 1076 | 2290-2312 |
| AD-1735867 | GUUGACUUCAUCCAAUCUCUA | 808 | 1876-1896 | UAGAGAUUGGAUGAAGUCAACUC | 1077 | 1874-1896 |
| AD-1735868 | CUACACAAUGAACUUCUUAAA | 809 | 6692-6712 | UUUAAGAAGUUCAUUGUGUAGAA | 1078 | 6690-6712 |
| AD-1735869 | CACAUCUAGAAUUCUUAAUUA | 810 | 4835-4855 | UAAUUAAGAAUUCUAGAUGUGAC | 1079 | 4833-4855 |
| AD-1735870 | AAAUCUCUCAUAGCUUUCUUA | 811 | 1725-1745 | UAAGAAAGCUAUGAGAGAUUUCU | 1080 | 1723-1745 |
| AD-1735871 | CCUACUAUUGUAGAAUUACUA | 812 | 5093-5113 | UAGUAAUUCUACAAUAGUAGGUG | 1081 | 5091-5113 |
| AD-1735872 | AUCUUCUUUUAGUGCAUUAAA | 813 | 6589-6609 | UUUAAUGCACUAAAAGAAGAUGA | 1082 | 6587-6609 |
| AD-1735873 | CUCAUGUACUCUUCUGAUUCA | 814 | 7977-7997 | UGAAUCAGAAGAGUACAUGAGCU | 1083 | 7975-7997 |
| AD-1735874 | UUUCUCUUUGUACCUUGGAAA | 815 | 6449-6469 | UUUCCAAGGUACAAAGAGAAAGA | 1084 | 6447-6469 |
| AD-1735875 | UGGCUUAUACAUCUUCAGAAA | 816 | 7515-7535 | UUUCUGAAGAUGUAUAAGCCAGA | 1085 | 7513-7535 |
| AD-1735876 | CAAAACAAAACUACUCCUAUA | 817 | 5120-5140 | UAUAGGAGUAGUUUUGUUUUGUU | 1086 | 5118-5140 |
| AD-1735877 | ACUAGCAGAACUCUUAUGAAA | 818 | 6055-6075 | UUUCAUAAGAGUUCUGCUAGUAA | 1087 | 6053-6075 |
| AD-1735878 | CCAAGUCACUCUAUAAUUCCA | 819 | 6635-6655 | UGGAAUUAUAGAGUGACUUGGGA | 1088 | 6633-6655 |
| AD-1735879 | UCCAUUUUUCUUGUCAUUAUA | 820 | 4114-4134 | UAUAAUGACAAGAAAAAUGGAGA | 1089 | 4112-4134 |
| AD-1735880 | CAACACCUCAACUCAUCUUUA | 821 | 1923-1943 | UAAAGAUGAGUUGAGGUGUUGCU | 1090 | 1921-1943 |
| AD-1735881 | ACUCUGAAAGAUCUGAUUUAA | 822 | 716-736 | UUAAAUCAGAUCUUUCAGAGUUU | 1091 | 714-736 |
| AD-1735882 | CUAGUUCUUUUCCGCAAUGAA | 823 | 7946-7966 | UUCAUUGCGGAAAAGAACUAGAA | 1092 | 7944-7966 |
| AD-1735883 | CUUUCACUCUGAAGAAAUCCA | 824 | 4189-4209 | UGGAUUUCUUCAGAGUGAAAGUU | 1093 | 4187-4209 |
| AD-1735884 | UCUAACUUUUCUCUCUUUCUA | 825 | 6525-6545 | UAGAAAGAGAGAAAAGUUAGAUA | 1094 | 6523-6545 |
| AD-1735885 | UCUCAACUUUGUGUCAAAGAA | 826 | 1667-1687 | UUCUUUGACACAAAGUUGAGAUA | 1095 | 1665-1687 |
| AD-1735886 | CUUCAAUAAUCAUUCCUUUAA | 827 | 5445-5465 | UUAAAGGAAUGAUUAUUGAAGAC | 1096 | 5443-5465 |
| AD-1735887 | UAACUGCUCUUCGUAUUAAGA | 828 | 1638-1658 | UCUUAAUACGAAGAGCAGUUAGG | 1097 | 1636-1658 |
| AD-1735888 | UCUUCUGUCAUAGUUCCAACA | 829 | 438-458 | UGUUGGAACUAUGACAGAAGACU | 1098 | 436-458 |
| AD-1735889 | AUCUCAGAACCAUAUCUGUUA | 830 | 2584-2604 | UAACAGAUAUGGUUCUGAGAUUU | 1099 | 2582-2604 |
| AD-1735890 | UGAAUCUAUCUUCAUUUUACA | 831 | 3483-3503 | UGUAAAAUGAAGAUAGAUUCAGU | 1100 | 3481-3503 |
| AD-1735891 | ACCACUAAACUUGUUCCUUUA | 832 | 2326-2346 | UAAAGGAACAAGUUUAGUGGUUC | 1101 | 2324-2346 |
| AD-1735892 | AGUGUUCUUUACUCCUUACAA | 833 | 4578-4598 | UUGUAAGGAGUAAAGAACACUGA | 1102 | 4576-4598 |
| AD-1735893 | CUUUACUCUUAACAGGAUUAA | 834 | 4367-4387 | UUAAUCCUGUUAAGAGUAAAGGA | 1103 | 4365-4387 |
| AD-1735894 | UAUACCUAAGAACAUAUUACA | 835 | 8153-8173 | UGUAAUAUGUUCUUAGGUAUAAG | 1104 | 8151-8173 |
| AD-1735895 | CUUCUACUGAGAUGAUCCAAA | 836 | 3114-3134 | UUUGGAUCAUCUCAGUAGAAGAA | 1105 | 3112-3134 |
| AD-1735896 | CUGUAUUUUCUCAUAGAGUAA | 837 | 3420-3440 | UUACUCUAUGAGAAAAUACAGAA | 1106 | 3418-3440 |
| AD-1735897 | ACUUUUCUCUUUCAGUUGUAA | 838 | 7116-7136 | UUACAACUGAAAGAGAAAAGUAU | 1107 | 7114-7136 |
| AD-1735898 | AUUAAUUUCUAGUCUGUGAAA | 839 | 8493-8513 | UUUCACAGACUAGAAAUUAAUGA | 1108 | 8491-8513 |
| AD-1735899 | CUCUGUAUAAGAGGUUUCACA | 840 | 6726-6746 | UGUGAAACCUCUUAUACAGAGAA | 1109 | 6724-6746 |
| AD-1735900 | GACUUUCAAAGUACUAAUACA | 841 | 8098-8118 | UGUAUUAGUACUUUGAAAGUCAA | 1110 | 8096-8118 |
| AD-1735901 | UUUGCCAUUAUACAAAGUUUA | 842 | 5262-5282 | UAAACUUUGUAUAAUGGCAAACA | 1111 | 5260-5282 |
| AD-1735902 | GAACACUAUCGACAUACCUCA | 843 | 1276-1296 | UGAGGUAUGUCGAUAGUGUUCAG | 1112 | 1274-1296 |
| AD-1735903 | UAGAAUGACAUUUACUAAUAA | 844 | 7818-7838 | UUAUUAGUAAAUGUCAUUCUACG | 1113 | 7816-7838 |
| AD-1735904 | AAGCUACUUAGAAAUGUUUAA | 845 | 5491-5511 | UUAAACAUUUCUAAGUAGCUUGU | 1114 | 5489-5511 |
| AD-1735905 | CCUUAGUACUCUCAGAGAUUA | 846 | 5968-5988 | UAAUCUCUGAGAGUACUAAGGGA | 1115 | 5966-5988 |
| AD-1735906 | UGAAUGCACACUAACGUAAUA | 847 | 6163-6183 | UAUUACGUUAGUGUGCAUUCAAG | 1116 | 6161-6183 |
| AD-1735907 | AAGCCUAAUGAUGAUAAUUAA | 848 | 1695-1715 | UUAAUUAUCAUCAUUAGGCUUUG | 1117 | 1693-1715 |
| AD-1735908 | AAACUUUUUACUAUCCCAUAA | 849 | 3341-3361 | UUAUGGGAUAGUAAAAAGUUUCC | 1118 | 3339-3361 |
| AD-1735909 | CUAGCUGAUACUCUUAAGUAA | 850 | 8268-8288 | UUACUUAAGAGUAUCAGCUAGCU | 1119 | 8266-8288 |
| AD-1735910 | AGCAUGAAAAGAUAACUCUAA | 851 | 1837-1857 | UUAGAGUUAUCUUUUCAUGCUGC | 1120 | 1835-1857 |
| AD-1735911 | UAAGCCAUUAUGCUAUUAGUA | 852 | 7017-7037 | UACUAAUAGCAUAAUGGCUUAGU | 1121 | 7015-7037 |
| AD-1735912 | UCUAGCUUUUAGCUAACAUAA | 853 | 6850-6870 | UUAUGUUAGCUAAAAGCUAGAAU | 1122 | 6848-6870 |
| AD-1735913 | GUGUGAUUCUUCAAACUUCAA | 854 | 316-336 | UUGAAGUUUGAAGAAUCACACAA | 1123 | 314-336 |
| AD-1735914 | UCUCCAGACCUAACAGUUUUA | 855 | 7247-7267 | UAAAACUGUUAGGUCUGGAGAGA | 1124 | 7245-7267 |
| AD-1735915 | CUUUUUUUCAUCUAGCCUUGA | 856 | 5808-5828 | UCAAGGCUAGAUGAAAAAAAGAA | 1125 | 5806-5828 |
| AD-1735916 | CAAAAUAAUUCUUGACAUCUA | 857 | 7552-7572 | UAGAUGUCAAGAAUUAUUUUGAC | 1126 | 7550-7572 |
| AD-1735917 | GCAUCACUUUCUGAAAAUAAA | 858 | 4690-4710 | UUUAUUUUCAGAAAGUGAUGCUG | 1127 | 4688-4710 |
| AD-1735918 | UCUUUUGUGAAACAUACUAUA | 859 | 5563-5583 | UAUAGUAUGUUUCACAAAAGAUG | 1128 | 5561-5583 |
| AD-1735919 | CUAUUUCUUCCAUAGGCUAAA | 860 | 7841-7861 | UUUAGCCUAUGGAAGAAAUAGAA | 1129 | 7839-7861 |
| AD-1735920 | CUUCAAUGAAGUGUUAACAAA | 861 | 2839-2859 | UUUGUUAACACUUCAUUGAAGAG | 1130 | 2837-2859 |
| AD-1735921 | UUUGCCUUCAUUCUACUUUCA | 862 | 2952-2972 | UGAAAGUAGAAUGAAGGCAAAAC | 1131 | 2950-2972 |
| AD-1735922 | AGGUUUUUAAAUGUCCUAAAA | 863 | 8035-8055 | UUUUAGGACAUUUAAAAACCUGA | 1132 | 8033-8055 |
| AD-1735923 | GAAUAUCUUUGAGUCCUUCAA | 864 | 1360-1380 | UUGAAGGACUCAAAGAUAUUCAC | 1133 | 1358-1380 |
| AD-1735924 | GAACACUUCCAAAGAUUAAUA | 865 | 2666-2686 | UAUUAAUCUUUGGAAGUGUUCAG | 1134 | 2664-2686 |
| AD-1735925 | CUAAAUUUUGUCUAACAAAUA | 866 | 7791-7811 | UAUUUGUUAGACAAAAUUUAGGC | 1135 | 7789-7811 |
| AD-1735926 | GUAAACAACUUAAAAUUGCUA | 867 | 5284-5304 | UAGCAAUUUUAAGUUGUUUACUC | 1136 | 5282-5304 |
| AD-1735927 | AAAAUAAUUUACUCACUCAGA | 868 | 6233-6253 | UCUGAGUGAGUAAAUUAUUUUAG | 1137 | 6231-6253 |
| AD-1735928 | GACAUCUAUUCUGUUGGUCUA | 869 | 1388-1408 | UAGACCAACAGAAUAGAUGUCAG | 1138 | 1386-1408 |
| AD-1735929 | UAACUGAGUAGUCUUAUAUUA | 870 | 4267-4287 | UAAUAUAAGACUACUCAGUUAGG | 1139 | 4265-4287 |
| AD-1735930 | UCUGGAAUUUAGCCUUCUAAA | 871 | 5936-5956 | UUUAGAAGGCUAAAUUCCAGACG | 1140 | 5934-5956 |
| AD-1735931 | ACAUGCCUUGAACUCUUGAAA | 872 | 8207-8227 | UUUCAAGAGUUCAAGGCAUGUUU | 1141 | 8205-8227 |
| AD-1735932 | AUCAAGCACUUCUUGCACUUA | 873 | 8782-8802 | UAAGUGCAAGAAGUGCUUGAUUU | 1142 | 8780-8802 |
| AD-1735933 | CUUGCUUUUCAUCUUUAUACA | 874 | 4915-4935 | UGUAUAAAGAUGAAAAGCAAGUG | 1143 | 4913-4935 |
| AD-1735934 | UUUUCUCCCUAUGUAAUAUCA | 875 | 2493-2513 | UGAUAUUACAUAGGGAGAAAAGC | 1144 | 2491-2513 |
| AD-1735935 | UGCUUUCUUCUAUGUCUAAAA | 876 | 4802-4822 | UUUUAGACAUAGAAGAAAGCAUA | 1145 | 4800-4822 |
| AD-1735936 | ACCUGCUUAGCAAAUCGUCUA | 877 | 5224-5244 | UAGACGAUUUGCUAAGCAGGUUC | 1146 | 5222-5244 |
| AD-1735937 | AUAUUCCUCUACCCUUUCACA | 878 | 2895-2915 | UGUGAAAGGGUAGAGGAAUAUCU | 1147 | 2893-2915 |
| AD-1735938 | UCCCACUUUUCUUUGGGUUUA | 879 | 6208-6228 | UAAACCCAAAGAAAAGUGGGAUU | 1148 | 6206-6228 |
| AD-1735939 | AGGCUUCUUGUAUAUACUUAA | 880 | 4442-4462 | UUAAGUAUAUACAAGAAGCCUGC | 1149 | 4440-4462 |
| AD-1735940 | AAACUUGAUCUGUGUUUCAGA | 881 | 8017-8037 | UCUGAAACACAGAUCAAGUUUGA | 1150 | 8015-8037 |
| AD-1735941 | UUUGCUUUAAUGCUAAAUUCA | 882 | 6885-6905 | UGAAUUUAGCAUUAAAGCAAAAG | 1151 | 6883-6905 |
| AD-1735942 | AGACUAGCUGUUAUUUGUAUA | 883 | 6830-6850 | UAUACAAAUAACAGCUAGUCUUU | 1152 | 6828-6850 |
| AD-1735943 | UUCCUACUUUCCCUUGAAUAA | 884 | 2469-2489 | UUAUUCAAGGGAAAGUAGGAAGC | 1153 | 2467-2489 |
| AD-1735944 | CAGAACUGAAUGCUCAAGUCA | 885 | 420-440 | UGACUUGAGCAUUCAGUUCUGGA | 1154 | 418-440 |
| AD-1735945 | UCUUGUUACUAAUUUCUCAUA | 886 | 3945-3965 | UAUGAGAAAUUAGUAACAAGAAC | 1155 | 3943-3965 |
| AD-1735946 | CUCAGUGAUAGCCUUUAUACA | 887 | 8586-8606 | UGUAUAAAGGCUAUCACUGAGUU | 1156 | 8584-8606 |
| AD-1735947 | UUUUAUGCUCCUAAAACAUCA | 888 | 3065-3085 | UGAUGUUUUAGGAGCAUAAAAGA | 1157 | 3063-3085 |
| AD-1735948 | UUCUCCUUAGGUUAUGUUCAA | 889 | 4551-4571 | UUGAACAUAACCUAAGGAGAAUU | 1158 | 4549-4571 |
| AD-1735949 | AUUGCUCAUCGAGACAUAAAA | 890 | 1175-1195 | UUUUAUGUCUCGAUGAGCAAUAG | 1159 | 1173-1195 |
| AD-1735950 | CCUUUGUACAUACACACUUAA | 891 | 2746-2766 | UUAAGUGUGUAUGUACAAAGGAA | 1160 | 2744-2766 |
| AD-1735951 | UUGAACCAAGAGCACAUGAAA | 892 | 2025-2045 | UUUCAUGUGCUCUUGGUUCAAGU | 1161 | 2023-2045 |
| AD-1735952 | UCAGGGAUUUUAAAGUCUAAA | 893 | 3668-3688 | UUUAGACUUUAAAAUCCCUGAGG | 1162 | 3666-3688 |
| AD-1735953 | UACUUGCUUAUAAAGUGAUAA | 894 | 3153-3173 | UUAUCACUUUAUAAGCAAGUACC | 1163 | 3151-3173 |
| AD-1735954 | AUGCAUCUAAACCUACCUUGA | 895 | 6145-6165 | UCAAGGUAGGUUUAGAUGCAUGC | 1164 | 6143-6165 |
| AD-1735955 | UUGGGAAAACACUAUUAUGAA | 896 | 4629-4649 | UUCAUAAUAGUGUUUUCCCAAGU | 1165 | 4627-4649 |
| AD-1735956 | AAACUCCAAAGAGAAAUGAAA | 897 | 8456-8476 | UUUCAUUUCUCUUUGGAGUUUGA | 1166 | 8454-8476 |
| AD-1735957 | AUGGGCAUUUUUCAAAACAUA | 898 | 5758-5778 | UAUGUUUUGAAAAAUGCCCAUAU | 1167 | 5756-5778 |
| AD-1735958 | AUAAUGGAACUUGGACUCAAA | 899 | 996-1016 | UUUGAGUCCAAGUUCCAUUAUCU | 1168 | 994-1016 |
| AD-1735959 | UGUGUAGAUGACGAAACCAAA | 900 | 6008-6028 | UUUGGUUUCGUCAUCUACACAAA | 1169 | 6006-6028 |
| AD-1735960 | UUCUACCUCAAAGAUAAGACA | 901 | 1790-1810 | UGUCUUAUCUUUGAGGUAGAACA | 1170 | 1788-1810 |
| AD-1735961 | AGAAGGCAUAUUGAGUUAUUA | 902 | 2536-2556 | UAAUAACUCAAUAUGCCUUCUAA | 1171 | 2534-2556 |
| AD-1735962 | AUGGAGUUUUUCUGCUAUUUA | 903 | 5629-5649 | UAAAUAGCAGAAAAACUCCAUGU | 1172 | 5627-5649 |
| AD-1735963 | UCAGUUUCUCAUUAGUUUGUA | 904 | 6558-6578 | UACAAACUAAUGAGAAACUGAGG | 1173 | 6556-6578 |
| AD-1735964 | CUGCAUAUAUAAGAACGAAAA | 905 | 3976-3996 | UUUUCGUUCUUAUAUAUGCAGAA | 1174 | 3974-3996 |
| AD-1735965 | UGAGCCAAAAUAUUAAAUUCA | 906 | 7927-7947 | UGAAUUUAAUAUUUUGGCUCAGA | 1175 | 7925-7947 |
| AD-1735966 | AGAAUGAUAUUUCCUGUUUUA | 907 | 4035-4055 | UAAAACAGGAAAUAUCAUUCUUG | 1176 | 4033-4055 |
| AD-1735967 | GUGCUCUAUAUAAAUCUUCCA | 908 | 7385-7405 | UGGAAGAUUUAUAUAGAGCACAA | 1177 | 7383-7405 |
| AD-1735968 | UUUACAGAGAAGCAUCUUAUA | 909 | 7468-7488 | UAUAAGAUGCUUCUCUGUAAAAU | 1178 | 7466-7488 |
| AD-1735969 | GUCUUGAGUUCUGCAUGACAA | 910 | 3761-3781 | UUGUCAUGCAGAACUCAAGACAU | 1179 | 3759-3781 |
| AD-1735970 | CUUCAAAUCUAUAAUUUUACA | 911 | 3017-3037 | UGUAAAAUUAUAGAUUUGAAGGG | 1180 | 3015-3037 |
| AD-1735971 | GAAGCAUAUAGAACUCUAUUA | 912 | 8810-8830 | UAAUAGAGUUCUAUAUGCUUCAC | 1181 | 8808-8830 |
| AD-1735972 | GAGCUGCUUCUAAAUAACAAA | 913 | 5678-5698 | UUUGUUAUUUAGAAGCAGCUCUC | 1182 | 5676-5698 |
| AD-1735973 | UGACUGUAUUUCCUGAUCAUA | 914 | 7197-7217 | UAUGAUCAGGAAAUACAGUCACA | 1183 | 7195-7217 |
| AD-1735974 | GUUCUGAAGGAUAUACUUCUA | 915 | 3402-3422 | UAGAAGUAUAUCCUUCAGAACGC | 1184 | 3400-3422 |
| AD-1735975 | GUGAAGCAUGAUUCAAUACUA | 916 | 1256-1276 | UAGUAUUGAAUCAUGCUUCACAG | 1185 | 1254-1276 |
| AD-1735976 | AAUGCUGCUUCACAGAUUUUA | 917 | 474-494 | UAAAAUCUGUGAAGCAGCAUUCG | 1186 | 472-494 |
| AD-1735977 | UGUGGGUUAUGUUAAUCUGAA | 918 | 7283-7303 | UUCAGAUUAACAUAACCCACAGU | 1187 | 7281-7303 |
| AD-1735978 | GAGUACAGAAGAAUGCUCAUA | 919 | 2926-2946 | UAUGAGCAUUCUUCUGUACUCAC | 1188 | 2924-2946 |
| AD-1735979 | CUGUAUUUCAUCCUAGAUUUA | 920 | 7162-7182 | UAAAUCUAGGAUGAAAUACAGCU | 1189 | 7160-7182 |
| AD-1735980 | AAUCUGGUAAAUGCUGGAAAA | 921 | 695-715 | UUUUCCAGCAUUUACCAGAUUGC | 1190 | 693-715 |
| AD-1735981 | UGCUCAGAUUACCUGAUCGUA | 922 | 3293-3313 | UACGAUCAGGUAAUCUGAGCAAU | 1191 | 3291-3313 |
| AD-1735982 | GACAGCUAUGGAGUUUGCGUA | 923 | 3531-3551 | UACGCAAACUCCAUAGCUGUCAG | 1192 | 3529-3551 |
| AD-1735983 | UAGAACAUGCUCACUUACAAA | 924 | 4391-4411 | UUUGUAAGUGAGCAUGUUCUAUA | 1193 | 4389-4411 |
| AD-1735984 | AUUAUGCUUCAUUUCACUAUA | 925 | 3450-3470 | UAUAGUGAAAUGAAGCAUAAUCA | 1194 | 3448-3470 |
| AD-1735985 | CAACAGCAAGUCAUAAAAGUA | 926 | 8624-8644 | UACUUUUAUGACUUGCUGUUGGU | 1195 | 8622-8644 |
| AD-1735986 | UUGUCUGAAAAUGUCUUUAAA | 927 | 2702-2722 | UUUAAAGACAUUUUCAGACAAUG | 1196 | 2700-2722 |
| AD-1735987 | UGUUGGUUCAAAGGACAAUUA | 928 | 774-794 | UAAUUGUCCUUUGAACCAACAGA | 1197 | 772-794 |
| AD-1735988 | UCUAAACUUUAAUAUAUCGAA | 929 | 2190-2210 | UUCGAUAUAUUAAAGUUUAGAGC | 1198 | 2188-2210 |
| AD-1735989 | AAGUGAAACAUGACUGUCGUA | 930 | 4875-4895 | UACGACAGUCAUGUUUCACUUAA | 1199 | 4873-4895 |
| AD-1735990 | AUCGUCCAUACAGUUUUCAUA | 931 | 7719-7739 | UAUGAAAACUGUAUGGACGAUAU | 1200 | 7717-7739 |
| AD-1735991 | CUUCAGGAAAUAGUAGGAAAA | 932 | 809-829 | UUUUCCUACUAUUUCCUGAAGCA | 1201 | 807-829 |
| AD-1735992 | CACCCUUUCUGUAAGGACUGA | 933 | 6426-6446 | UCAGUCCUUACAGAAAGGGUGGG | 1202 | 6424-6446 |
| AD-1735993 | AAAGAGAUACCUGACAUCCUA | 934 | 2354-2374 | UAGGAUGUCAGGUAUCUCUUUUG | 1203 | 2352-2374 |
| AD-1735994 | AUGAGCAUUAAUGUUUUCUGA | 935 | 2647-2667 | UCAGAAAACAUUAAUGCUCAUUA | 1204 | 2645-2667 |
| AD-1735995 | UGACAUUUUUUCUCAUAGAAA | 936 | 2603-2623 | UUUCUAUGAGAAAAAAUGUCAAC | 1205 | 2601-2623 |
| AD-1735996 | CAGAGAUUAAAUGACUACUAA | 937 | 6032-6052 | UUAGUAGUCAUUUAAUCUCUGAU | 1206 | 6030-6052 |
| AD-1735997 | GCUGUCAAAUGUUAUAUUGUA | 938 | 4463-4483 | UACAAUAUAACAUUUGACAGCAU | 1207 | 4461-4483 |
| AD-1735998 | AAUAUAAUACUACAGCAAAAA | 939 | 7041-7061 | UUUUUGCUGUAGUAUUAUAUUCC | 1208 | 7039-7061 |
| AD-1735999 | GGUGUCUAAAUAUAAUUUCAA | 940 | 4153-4173 | UUGAAAUUAUAUUUAGACACCCU | 1209 | 4151-4173 |
| AD-1736000 | CUCUUUAUACAAAAUGAGAGA | 941 | 7903-7923 | UCUCUCAUUUUGUAUAAAGAGAA | 1210 | 7901-7923 |
| AD-1736001 | GCAGUACCAAAUGAAUAAAAA | 942 | 5410-5430 | UUUUUAUUCAUUUGGUACUGCUA | 1211 | 5408-5430 |
| AD-1736002 | UUGUUGGUACACAAGGUAAAA | 943 | 1149-1169 | UUUUACCUUGUGUACCAACAAUC | 1212 | 1147-1169 |
| AD-1736003 | CUCUUAUUUAACUUAACCGUA | 944 | 5917-5937 | UACGGUUAAGUUAAAUAAGAGUU | 1213 | 5915-5937 |
| AD-1736004 | UGCUUGAUGAUACAAUGAAUA | 945 | 1338-1358 | UAUUCAUUGUAUCAUCAAGCAUU | 1214 | 1336-1358 |
| AD-1736005 | AACUGGGAAAGACAAUUUGAA | 946 | 6920-6940 | UUCAAAUUGUCUUUCCCAGUUAC | 1215 | 6918-6940 |
| AD-1736006 | CUCCUUAUAUGACUAUUUGAA | 947 | 1048-1068 | UUCAAAUAGUCAUAUAAGGAGCC | 1216 | 1046-1068 |
| AD-1736007 | AGUCAUGCUAACCAAUGGAAA | 948 | 367-387 | UUUCCAUUGGUUAGCAUGACUGA | 1217 | 365-387 |
| AD-1736008 | CCUGAAGUCACACAGCUAAUA | 949 | 2391-2411 | UAUUAGCUGUGUGACUUCAGGAC | 1218 | 2389-2411 |
| AD-1736009 | UUGCUGCUGACAACAAAGAUA | 950 | 978-998 | UAUCUUUGUUGUCAGCAGCAAUG | 1219 | 976-998 |
| AD-1736010 | UACUGACUUUGCCUGUAAAGA | 951 | 7757-7777 | UCUUUACAGGCAAAGUCAGUAAU | 1220 | 7755-7777 |
| AD-1736011 | AAUCCCUAUUUUAAAAUUCCA | 952 | 7070-7090 | UGGAAUUUUAAAAUAGGGAUUGU | 1221 | 7068-7090 |
| AD-1736012 | GUGCCUUAGGAGAUUACCCUA | 953 | 7330-7350 | UAGGGUAAUCUCCUAAGGCACUC | 1222 | 7328-7350 |
| AD-1736013 | GACAAUCUAAAUAUAUCAUCA | 954 | 3857-3877 | UGAUGAUAUAUUUAGAUUGUCUG | 1223 | 3855-3877 |
| AD-1736014 | UGUGAUAAUGAACACCGUAAA | 955 | 2438-2458 | UUUACGGUGUUCAUUAUCACAAG | 1224 | 2436-2458 |
| AD-1736015 | UCACCGUUGUAAAGACUUUUA | 956 | 8242-8262 | UAAAAGUCUUUACAACGGUGAUU | 1225 | 8240-8262 |
| AD-1736016 | UUAGAGAAGCUUCCUGACAUA | 957 | 6402-6422 | UAUGUCAGGAAGCUUCUCUAAUC | 1226 | 6400-6422 |
| AD-1736017 | AACAGUAAAGAAAUGCUACUA | 958 | 3252-3272 | UAGUAGCAUUUCUUUACUGUUAU | 1227 | 3250-3272 |
| AD-1736018 | UAUGUUCUGACUUGAGAGUUA | 959 | 4855-4875 | UAACUCUCAAGUCAGAACAUAAA | 1228 | 4853-4875 |
| AD-1736019 | UUAGAGCAUGCUAUCUUUAGA | 960 | 2109-2129 | UCUAAAGAUAGCAUGCUCUAAUU | 1229 | 2107-2129 |
| AD-1736020 | UAGUCUUUGAUUGAAAUAAGA | 961 | 5314-5334 | UCUUAUUUCAAUCAAAGACUAUG | 1230 | 5312-5334 |
| AD-1736021 | UUGGUAAACGAGAUUUAACAA | 962 | 3038-3058 | UUGUUAAAUCUCGUUUACCAAAG | 1231 | 3036-3058 |
| AD-1736022 | GUCUGAAAAUUGCUUUCAUUA | 963 | 3798-3818 | UAAUGAAAGCAAUUUUCAGACCU | 1232 | 3796-3818 |
| AD-1736023 | AUGAACUUGUUGCCUUGUAAA | 964 | 4741-4761 | UUUACAAGGCAACAAGUUCAUGC | 1233 | 4739-4761 |
| AD-1736024 | GGGCAAUAAACUGUAUCAAAA | 965 | 8379-8399 | UUUUGAUACAGUUUAUUGCCCAA | 1234 | 8377-8399 |
| AD-1736025 | ACAUGUUAGCAUAUAAUGUAA | 966 | 3175-3195 | UUACAUUAUAUGCUAACAUGUAC | 1235 | 3173-3195 |
| AD-1736026 | UGUGAGAGUAUAGAAUUUCUA | 967 | 6367-6387 | UAGAAAUUCUAUACUCUCACAGU | 1236 | 6365-6387 |
| AD-1736027 | AUCCUUCAUUUGGCACUAUAA | 968 | 6764-6784 | UUAUAGUGCCAAAUGAAGGAUUA | 1237 | 6762-6784 |
| AD-1736028 | ACAUUUAGAAAGUAGCUUUAA | 969 | 3824-3844 | UUAAAGCUACUUUCUAAAUGUGU | 1238 | 3822-3844 |
| AD-1736029 | AACUGUUCUAUAAAGCAAAGA | 970 | 3364-3384 | UCUUUGCUUUAUAGAACAGUUAA | 1239 | 3362-3384 |
| AD-1736030 | CCUCCAGAGAUGAAAGAUCUA | 971 | 894-914 | UAGAUCUUUCAUCUCUGGAGGAG | 1240 | 892-914 |
| AD-1736031 | UUGUUUAACUAUGACUCCUAA | 972 | 4249-4269 | UUAGGAGUCAUAGUUAAACAACA | 1241 | 4247-4269 |
| AD-1736032 | CUGUUUGACAAUGCUUUGUUA | 973 | 5585-5605 | UAACAAAGCAUUGUCAAACAGAA | 1242 | 5583-5605 |
| AD-1736033 | UGUCCUAAAAGAAAUUUUUCA | 974 | 7227-7247 | UGAAAAAUUUCUUUUAGGACAAC | 1243 | 7225-7247 |
| AD-1736034 | ACAGAUUGAACAAAGAACUUA | 975 | 7572-7592 | UAAGUUCUUUGUUCAAUCUGUAG | 1244 | 7570-7592 |
| AD-1736035 | GUUUAACCUGUCCAAACUUCA | 976 | 6673-6693 | UGAAGUUUGGACAGGUUAAACGA | 1245 | 6671-6693 |
| AD-1736036 | CAAAAUGUUUAACUUUACCAA | 977 | 8606-8626 | UUGGUAAAGUUAAACAUUUUGGU | 1246 | 8604-8626 |
| AD-1736037 | UCCCAUUGUGUAAUAUUUAUA | 978 | 4494-4514 | UAUAAAUAUUACACAAUGGGACU | 1247 | 4492-4514 |
| AD-1736038 | GUUGGGUAAAUAUGCUUAUUA | 979 | 4065-4085 | UAAUAAGCAUAUUUACCCAACAU | 1248 | 4063-4085 |
| AD-1736039 | CAGGGUUGUCUUUGAGUCUGA | 980 | 5187-5207 | UCAGACUCAAAGACAACCCUGAG | 1249 | 5185-5207 |
| AD-1736040 | GCUAAAAUCCAACUGCAAUUA | 981 | 7425-7445 | UAAUUGCAGUUGGAUUUUAGCCC | 1250 | 7423-7445 |
| AD-1736041 | CAGGACUGAAGUGUGUAUGUA | 982 | 291-311 | UACAUACACACUUCAGUCCUGGC | 1251 | 289-311 |
| AD-1736042 | GAGUACCAAUUGCCUUAUUAA | 983 | 1457-1477 | UUAAUAAGGCAAUUGGUACUCCU | 1252 | 1455-1477 |
| AD-1736043 | AAGUGCCUAUGUGAAGUGAUA | 984 | 3886-3906 | UAUCACUUCACAUAGGCACUUUU | 1253 | 3884-3906 |
| AD-1736044 | UAACAAUAAUAGAACUGCCAA | 985 | 7092-7112 | UUGGCAGUUCUAUUAUUGUUAGG | 1254 | 7090-7112 |
| AD-1736045 | GCUGUUCCAUACCAUUGCUUA | 986 | 6978-6998 | UAAGCAAUGGUAUGGAACAGCAG | 1255 | 6976-6998 |
| AD-1736046 | UAGACUGGAGAAGAUUAUUCA | 987 | 7997-8017 | UGAAUAAUCUUCUCCAGUCUAGA | 1256 | 7995-8017 |
| AD-1736047 | UUCCAACAGCAUCACCAAAUA | 988 | 516-536 | UAUUUGGUGAUGCUGUUGGAAGG | 1257 | 514-536 |
| AD-1736048 | UAAUUGGUACAGAUUCUGUUA | 989 | 4779-4799 | UAACAGAAUCUGUACCAAUUACA | 1258 | 4777-4799 |
| AD-1736049 | GAGAAACAUUAUUUGUUGUCA | 990 | 4710-4730 | UGACAACAAAUAAUGUUUCUCUU | 1259 | 4708-4730 |
| AD-1736050 | CGCUCUCAAUUGCUAGUGGUA | 991 | 1107-1127 | UACCACUAGCAAUUGAGAGCGCC | 1260 | 1105-1127 |
| AD-1736051 | CGGUAUCAGAAACAGCAAAUA | 992 | 2873-2893 | UAUUUGCUGUUUCUGAUACCGUC | 1261 | 2871-2893 |
| AD-1736052 | CCCAGACAUAAUUUUAUAUUA | 993 | 7449-7469 | UAAUAUAAAAUUAUGUCUGGGAG | 1262 | 7447-7469 |
| AD-1736053 | UAGUACAUUUUGAGGUAUUUA | 994 | 4215-4235 | UAAAUACCUCAAAAUGUACUAAC | 1263 | 4213-4235 |
| AD-1736054 | AAAUGCUAUUGAUAACAGUAA | 995 | 3211-3231 | UUACUGUUAUCAAUAGCAUUUAC | 1264 | 3209-3231 |
| AD-1736055 | UAGCUGAAUUUGGGACUAUGA | 996 | 6490-6510 | UCAUAGUCCCAAAUUCAGCUAUC | 1265 | 6488-6510 |
| AD-1736056 | AUUGUGGUUUUCAAAGAUAUA | 997 | 5535-5555 | UAUAUCUUUGAAAACCACAAUGG | 1266 | 5533-5555 |
| AD-1736057 | CCUGGUUGCAGUAUCUGAAAA | 998 | 4985-5005 | UUUUCAGAUACUGCAACCAGGUU | 1267 | 4983-5005 |
| AD-1736058 | UAGAAUGGUUGUUGAGCUAAA | 999 | 6297-6317 | UUUAGCUCAACAACCAUUCUACA | 1268 | 6295-6317 |
| AD-1736059 | CUGGCCAUCAUUAUUACUGUA | 1000 | 560-580 | UACAGUAAUAAUGAUGGCCAGCU | 1269 | 558-580 |
| AD-1736060 | UUGACAGAUAAAAUACGAAGA | 1001 | 3735-3755 | UCUUCGUAUUUUAUCUGUCAAUU | 1270 | 3733-3755 |
| AD-1736061 | UCACAAACACAUCAUUACAAA | 1002 | 5473-5493 | UUUGUAAUGAUGUGUUUGUGAAU | 1271 | 5471-5493 |
| AD-1736062 | CCAUGAUUGUAUGAAAAUAGA | 1003 | 4962-4982 | UCUAUUUUCAUACAAUCAUGGAA | 1272 | 4960-4982 |
| AD-1736063 | CACAGAGUAAUGAAUAUUUAA | 1004 | 2978-2998 | UUAAAUAUUCAUUACUCUGUGUC | 1273 | 2976-2998 |
| AD-1736064 | AGCUGCUUAGUGGAAGAUGUA | 1005 | 2222-2242 | UACAUCUUCCACUAAGCAGCUCC | 1274 | 2220-2242 |
| AD-1736065 | UAGCUCUGUGUGCUGAUACCA | 1006 | 5606-5626 | UGGUAUCAGCACACAGAGCUAGA | 1275 | 5604-5626 |
| AD-1736066 | CAUUCGAGAGAAUAUGAGCUA | 1007 | 7144-7164 | UAGCUCAUAUUCUCUCGAAUGUA | 1276 | 7142-7164 |
| AD-1736067 | AUGCAUUUUCUGAAAAUGUAA | 1008 | 8734-8754 | UUACAUUUUCAGAAAAUGCAUAC | 1277 | 8732-8754 |
| AD-1736068 | GUUUCGACCAAGUAUCCCAAA | 1009 | 1537-1557 | UUUGGGAUACUUGGUCGAAACUU | 1278 | 1535-1557 |
| AD-1736069 | UCUUGCUUGCCACAAUAUCGA | 1010 | 3610-3630 | UCGAUAUUGUGGCAAGCAAGAUA | 1279 | 3608-3630 |
| AD-1736070 | GGGUACAAGAGGGAAUACAAA | 1011 | 3629-3649 | UUUGUAUUCCCUCUUGUACCCGA | 1280 | 3627-3649 |
| AD-1736071 | GGUGAUCAAAUCCUGUGUCUA | 1012 | 394-414 | UAGACACAGGAUUUGAUCACCUG | 1281 | 392-414 |
| AD-1736072 | CAGUGGGUUUCUAGGAUAGGA | 1013 | 3779-3799 | UCCUAUCCUAGAAACCCACUGUC | 1282 | 3777-3799 |
| AD-1736073 | AACUAAGUAUUUUUAAGGACA | 1014 | 7869-7889 | UGUCCUUAAAAAUACUUAGUUAC | 1283 | 7867-7889 |
| AD-1736074 | CAUAAUGUGAUUGUUAAAUUA | 1015 | 6951-6971 | UAAUUUAACAAUCACAUUAUGGG | 1284 | 6949-6971 |
| AD-1736075 | GAGAAGAAUUAAGAAAACUCA | 1016 | 2820-2840 | UGAGUUUUCUUAAUUCUUCUCAA | 1285 | 2818-2840 |
| AD-1736076 | GAAGAGAAAUUGAUUGUUUAA | 1017 | 7635-7655 | UUAAACAAUCAAUUUCUCUUCUC | 1286 | 7633-7655 |
| AD-1736077 | AGUGUGAAACUUGUGCCAUAA | 1018 | 1218-1238 | UUAUGGCACAAGUUUCACACUUU | 1287 | 1216-1238 |
| AD-1736078 | CUGAGACACUGAGAAAUGUCA | 1019 | 2372-2392 | UGACAUUUCUCAGUGUCUCAGGA | 1288 | 2370-2392 |
| AD-1736079 | UGGCUUAUAUGUGUUUAAAGA | 1020 | 7488-7508 | UCUUUAAACACAUAUAAGCCAAU | 1289 | 7486-7508 |
| AD-1736080 | UGCAUUUUGACAUUGCAAAAA | 1021 | 8188-8208 | UUUUUGCAAUGUCAAAAUGCAAU | 1290 | 8186-8208 |
| AD-1736081 | UUAGGUUAGAAGUUCCAGAAA | 1022 | 5053-5073 | UUUCUGGAACUUCUAACCUAAUG | 1291 | 5051-5073 |
| AD-1736082 | UGCGACAUGAAAACAUCCUUA | 1023 | 951-971 | UAAGGAUGUUUUCAUGUCGCAGC | 1292 | 949-971 |
| AD-1736083 | GAGAGGAUUUUUUACCAUCUA | 1024 | 4095-4115 | UAGAUGGUAAAAAAUCCUCUCUU | 1293 | 4093-4115 |
| AD-1736084 | GAAGGUGAAGAGAAUUUCAAA | 1025 | 8438-8458 | UUUGAAAUUCUCUUCACCUUCCA | 1294 | 8436-8458 |
| AD-1736085 | UGGUAUCUGAAUAUCAUGAAA | 1026 | 1023-1043 | UUUCAUGAUAUUCAGAUACCAGC | 1295 | 1021-1043 |
| AD-1736086 | UGUUGGUUUAAUUUUUCAACA | 1027 | 7658-7678 | UGUUGAAAAAUUAAACCAACAUG | 1296 | 7656-7678 |
| AD-1736087 | UAGUUGUAAUUUAAAUGUGGA | 1028 | 8419-8439 | UCCACAUUUAAAUUACAACUACU | 1297 | 8417-8439 |
| AD-1736088 | GUGAAUGUUUUUGCCAUUUUA | 1029 | 1763-1783 | UAAAAUGGCAAAAACAUUCACAU | 1298 | 1761-1783 |
| AD-1736089 | CAGAGAUGAUUUUUCUUUUAA | 1030 | 6800-6820 | UUAAAAGAAAAAUCAUCUCUGCC | 1299 | 6798-6820 |
| AD-1736090 | AGAAAAUUAGAUUCAGAUCUA | 1031 | 8058-8078 | UAGAUCUGAAUCUAAUUUUCUGU | 1300 | 8056-8078 |
| AD-1736091 | ACUGGAAAAUUAAGAAAGUAA | 1032 | 5390-5410 | UUACUUUCUUAAUUUUCCAGUGG | 1301 | 5388-5410 |
| AD-1736092 | UAAAGUGGGAAAGAUAAUAAA | 1033 | 8762-8782 | UUUAUUAUCUUUCCCACUUUACA | 1302 | 8760-8782 |
| AD-1736093 | CUAGGCUAAGAAAGAGUUGUA | 1034 | 6278-6298 | UACAACUCUUUCUUAGCCUAGUU | 1303 | 6276-6298 |
| AD-1736094 | GCUGAUAAAAUUAAUGGAUAA | 1035 | 6335-6355 | UUAUCCAUUAAUUUUAUCAGCAC | 1304 | 6333-6355 |
| AD-1736095 | CCUGUAUUUCUUUAGUUGUCA | 1036 | 6653-6673 | UGACAACUAAAGAAAUACAGGAA | 1305 | 6651-6673 |
| AD-1736096 | UUUGUUUUGCUUUUGACAAAA | 1037 | 6996-7016 | UUUUGUCAAAAGCAAAACAAAGC | 1306 | 6994-7016 |
| AD-1736097 | UGGCUGUGAAAAUAUUCUCCA | 1038 | 876-896 | UGGAGAAUAUUUUCACAGCCACA | 1307 | 874-896 |
| AD-1736098 | ACUAUUUUAGGCAUAGCACUA | 1039 | 4897-4917 | UAGUGCUAUGCCUAAAAUAGUGC | 1308 | 4895-4917 |
| AD-1736099 | UUUCAGUACUGUAUAAAGUGA | 1040 | 4651-4671 | UCACUUUAUACAGUACUGAAAAU | 1309 | 4649-4671 |
| AD-1736100 | GUGAUGCAAUCUAUGUUUCCA | 1041 | 2129-2149 | UGGAAACAUAGAUUGCAUCACCU | 1310 | 2127-2149 |
| AD-1736101 | UGUUUGGCAGAUCUCAUCAAA | 1042 | 6613-6633 | UUUGAUGAGAUCUGCCAAACAUU | 1311 | 6611-6633 |
| AD-1736102 | AAGGUUGUUUGUGACCAGAAA | 1043 | 1517-1537 | UUUCUGGUCACAAACAACCUUUC | 1312 | 1515-1537 |
| AD-1736103 | GGAAGGAAAUAUUUUGAGAAA | 1044 | 2794-2814 | UUUCUCAAAAUAUUUCCUUCCUU | 1313 | 2792-2814 |
| AD-1736104 | UUUUGGUAGCGUGACUCUUCA | 1045 | 8132-8152 | UGAAGAGUCACGCUACCAAAAGA | 1314 | 8130-8152 |
| AD-1736105 | UGAACAGGAAAAGAUGUAAAA | 1046 | 2045-2065 | UUUUACAUCUUUUCCUGUUCAUU | 1315 | 2043-2065 |
| AD-1736106 | GGGAACCAAGAGGUAUAUGGA | 1047 | 1309-1329 | UCCAUAUACCUCUUGGUUCCCAC | 1316 | 1307-1329 |
| AD-1736107 | UGGCACUAGGUCCAAAUCUUA | 1048 | 2419-2439 | UAAGAUUUGGACCUAGUGCCAGU | 1317 | 2417-2439 |
| AD-1736108 | CACACCUUCAUAUGGAGAUUA | 1049 | 1131-1151 | UAAUCUCCAUAUGAAGGUGUGCC | 1318 | 1129-1151 |
| AD-1736109 | CUGGUUUACUGGGAAAUAGCA | 1050 | 1406-1426 | UGCUAUUUCCCAGUAAACCAGAC | 1319 | 1404-1426 |
| AD-1736110 | GCCCAAAGGAAUGUAUAUAAA | 1051 | 8316-8336 | UUUAUAUACAUUCCUUUGGGCCU | 1320 | 8314-8336 |
| AD-1736111 | UUAACUGCAAGAGUUUACUGA | 1052 | 7265-7285 | UCAGUAAACUCUUGCAGUUAAAA | 1321 | 7263-7285 |
| AD-1736112 | GAACCACUCUCUGAGUGCAAA | 1053 | 677-697 | UUUGCACUCAGAGAGUGGUUCCU | 1322 | 675-697 |
| AD-1736113 | UUAUCUUUUCAUCCUGGCAUA | 1054 | 7607-7627 | UAUGCCAGGAUGAAAAGAUAAAG | 1323 | 7605-7627 |
| AD-1736114 | GUGAGUGUUGGUAUGCCAACA | 1055 | 1605-1625 | UGUUGGCAUACCAACACUCACGC | 1324 | 1603-1625 |
| AD-1736115 | AGAAUGUAUUUGGCUAAAUAA | 1056 | 5338-5358 | UUAUUUAGCCAAAUACAUUCUCA | 1325 | 5336-5358 |
| AD-1736116 | GAACCCUUUUAUUAAGAGGAA | 1057 | 3317-3337 | UUCCUCUUAAUAAAAGGGUUCCA | 1326 | 3315-3337 |
| AD-1736117 | CUCCUGUCCAUAGCUGCGAUA | 1058 | 590-610 | UAUCGCAGCUAUGGACAGGAGGC | 1327 | 588-610 |
| AD-1736118 | ACUGAGUUGAAAUAAGGAAGA | 1059 | 3501-3521 | UCUUCCUUAUUUCAACUCAGUAA | 1328 | 3499-3521 |
| AD-1736119 | CUGCCAAACAGAAGGAGCAUA | 1060 | 337-357 | UAUGCUCCUUCUGUUUGGCAGGU | 1329 | 335-357 |
| AD-1736120 | GGCAAAGUUGUGAAGCACUCA | 1061 | 1563-1583 | UGAGUGCUUCACAACUUUGCCAC | 1330 | 1561-1583 |
| AD-1736121 | AUAGGAUGAUGAAGUUUAGAA | 1062 | 4413-4433 | UUCUAAACUUCAUCAUCCUAUUU | 1331 | 4411-4433 |
| AD-1736122 | AUUCGUAUCUUAAAAUGGCAA | 1063 | 5513-5533 | UUGCCAUUUUAAGAUACGAAUAC | 1332 | 5511-5533 |
| AD-1736123 | CACAGCUUGGGUAAUAGCGUA | 1064 | 3384-3404 | UACGCUAUUACCCAAGCUGUGCU | 1333 | 3382-3404 |
| AD-1736124 | UUUGCAACAACAUAACACUGA | 1065 | 492-512 | UCAGUGUUAUGUUGUUGCAAAAA | 1334 | 490-512 |
| AD-1736125 | UGCCACCAUGUGACUUAUUGA | 1066 | 5153-5173 | UCAAUAAGUCACAUGGUGGCAAA | 1335 | 5151-5173 |
| AD-1736126 | UCGAUAGAGGAAAUGAGAAAA | 1067 | 1499-1519 | UUUUCUCAUUUCCUCUAUCGAGG | 1336 | 1497-1519 |
| AD-1736127 | UUUUUAAGUUAGCAGGACUUA | 1068 | 2152-2172 | UAAGUCCUGCUAACUUAAAAAGG | 1337 | 2150-2172 |
| AD-1736128 | UGUAAAUAAUUAUCUGCCUAA | 1069 | 8696-8716 | UUAGGCAGAUAAUUAUUUACAUC | 1338 | 8694-8716 |
| AD-1736129 | UGGUUGUACGUGCCUCAAAUA | 1070 | 4010-4030 | UAUUUGAGGCACGUACAACCAUA | 1339 | 4008-4030 |

TABLE 5
Modified Sense and Antisense Strand Sequences of ACVRIC dsRNA Agents Comprising anUnsaturated C22 Hydrocarbon Chain
Conjugated to Position 6 on the Sense Strand, Counting from the 5′-end of the Sense Strand

| | | SEQ | | SEQ | | SEQ |
|---|---|---|---|---|---|---|
| Duplex | | ID | | ID | | ID |
| Name | Sense Strand Sequence 5′ to 3′ | NO: | Antisense Sequence 5′ to 3′ | NO: | mRNA Target Sequence | NO: |
| AD-1735861 | ususuuu(Uda)CfaAfAfCfuccauucc | 1340 | VPusAfsggaAfuGfGfaguuUfgAfaaaaasgsa | 1609 | UCUUUUUUCAAACUCCAUUCCUU | 1878 |
| | susa | | | | | |
| AD-1735862 | ascsuuu(Cda)AfuCfUfGfucuucaga | 1341 | VPusAfsucuGfaAfGfacagAfuGfaaagususa | 1610 | UAACUUUCAUCUGUCUUCAGAUG | 1879 |
| | susa | | | | | |
| AD-1735863 | cscsuca(Uda)AfaCfUfUfcuccaguas | 1342 | VPusUfsuacUfgGfAfgaagUfuAfugaggsusg | 1611 | CACCUCAUAACUUCUCCAGUAAU | 1880 |
| | asa | | | | | |
| AD-1735864 | csuscac(Uda)AfuCfUfUfucaacauu | 1343 | VPusUfsaauGfuUfGfaaagAfuAfgugagsgsg | 1612 | CCCUCACUAUCUUUCAACAUUAU | 1881 |
| | sasa | | | | | |
| AD-1735865 | csuscgu(Uda)AfaUfGfCfucucaucc | 1344 | VPusUfsggaUfgAfGfagcaUfuAfacgagsusa | 1613 | UACUCGUUAAUGCUCUCAUCCAC | 1882 |
| | sasa | | | | | |
| AD-1735866 | gsusucu(Uda)CfaUfAfAfuccacuac | 1345 | VPusAfsguaGfuGfGfauuaUfgAfagaacsasg | 1614 | CUGUUCUUCAUAAUCCACUACUG | 1883 |
| | susa | | | | | |
| AD-1735867 | gsusuga(Cda)UfuCfAfUfccaaucuc | 1346 | VPusAfsgagAfuUfGfgaugAfaGfucaacsusc | 1615 | GAGUUGACUUCAUCCAAUCUCUA | 1884 |
| | susa | | | | | |
| AD-1735868 | csusaca(Cda)AfaUfGfAfacuucuua | 1347 | VPusUfsuaaGfaAfGfuucaUfuGfuguagsasa | 1616 | UUCUACACAAUGAACUUCUUAAC | 1885 |
| | sasa | | | | | |
| AD-1735869 | csascau(Cda)UfaGfAfAfuucuuaau | 1348 | VPusAfsauuAfaGfAfauucUfaGfaugugsasc | 1617 | GUCACAUCUAGAAUUCUUAAUUU | 1886 |
| | susa | | | | | |
| AD-1735870 | asasauc(Uda)CfuCfAfUfagcuuucu | 1349 | VPusAfsagaAfaGfCfuaugAfgAfgauuuscsu | 1618 | AGAAAUCUCUCAUAGCUUUCUUU | 1887 |
| | susa | | | | | |
| AD-1735871 | cscsuac(Uda)AfuUfGfUfagaauuac | 1350 | VPusAfsguaAfuUfCfuacaAfuAfguaggsusg | 1619 | CACCUACUAUUGUAGAAUUACUA | 1888 |
| | susa | | | | | |
| AD-1735872 | asuscuu(Cda)UfuUfUfAfgugcauua | 1351 | VPusUfsuaaUfgCfAfcuaaAfaGfaagausgsa | 1620 | UCAUCUUCUUUUAGUGCAUUAAA | 1889 |
| | sasa | | | | | |
| AD-1735873 | csuscau(Gda)UfaCfUfCfuucugauu | 1352 | VPusGfsaauCfaGfAfagagUfaCfaugagscsu | 1621 | AGCUCAUGUACUCUUCUGAUUCU | 1890 |
| | scsa | | | | | |
| AD-1735874 | ususucu(Cda)UfuUfGfUfaccuugga | 1353 | VPusUfsuccAfaGfGfuacaAfaGfagaaasgsa | 1622 | UCUUUCUCUUUGUACCUUGGAAU | 1891 |
| | sasa | | | | | |
| AD-1735875 | usgsgcu(Uda)AfuAfCfAfucuucaga | 1354 | VPusUfsucuGfaAfGfauguAfuAfagccasgsa | 1623 | UCUGGCUUAUACAUCUUCAGAAA | 1892 |
| | sasa | | | | | |
| AD-1735876 | csasaaa(Cda)AfaAfAfCfuacuccuas | 1355 | VPusAfsuagGfaGfUfaguuUfuGfuuuugsusu | 1624 | AACAAAACAAAACUACUCCUAUU | 1893 |
| | usa | | | | | |
| AD-1735877 | ascsuag(Cda)AfgAfAfCfucuuauga | 1356 | VPusUfsucaUfaAfGfaguuCfuGfcuagusasa | 1625 | UUACUAGCAGAACUCUUAUGAAA | 1894 |
| | sasa | | | | | |
| AD-1735878 | cscsaag(Uda)CfaCfUfCfuauaauucs | 1357 | VPusGfsgaaUfuAfUfagagUfgAfcuuggsgsa | 1626 | UCCCAAGUCACUCUAUAAUUCCU | 1895 |
| | csa | | | | | |
| AD-1735879 | uscscau(Uda)UfuUfCfUfugucauua | 1358 | VPusAfsuaaUfgAfCfaagaAfaAfauggasgsa | 1627 | UCUCCAUUUUUCUUGUCAUUAUG | 1896 |
| | susa | | | | | |
| AD-1735880 | csasaca(Cda)CfuCfAfAfcucaucuus | 1359 | VPusAfsaagAfuGfAfguugAfgGfuguugscsu | 1628 | AGCAACACCUCAACUCAUCUUUU | 1897 |
| | usa | | | | | |
| AD-1735881 | ascsucu(Gda)AfaAfGfAfucugauuu | 1360 | VPusUfsaaaUfcAfGfaucuUfuCfagagususu | 1629 | AAACUCUGAAAGAUCUGAUUUAU | 1898 |
| | sasa | | | | | |
| AD-1735882 | csusagu(Uda)CfuUfUfUfccgcaaug | 1361 | VPusUfscauUfgCfGfgaaaAfgAfacuagsasa | 1630 | UUCUAGUUCUUUUCCGCAAUGAC | 1899 |
| | sasa | | | | | |
| AD-1735883 | csusuuc(Ada)CfuCfUfGfaagaaauc | 1362 | VPusGfsgauUfuCfUfucagAfgUfgaaagsusu | 1631 | AACUUUCACUCUGAAGAAAUCCG | 1900 |
| | scsa | | | | | |
| AD-1735884 | uscsuaa(Cda)UfuUfUfCfucucuuuc | 1363 | VPusAfsgaaAfgAfGfagaaAfaGfuuagasusa | 1632 | UAUCUAACUUUUCUCUCUUUCUC | 1901 |
| | susa | | | | | |
| AD-1735885 | uscsuca(Ada)CfuUfUfGfugucaaag | 1364 | VPusUfscuuUfgAfCfacaaAfgUfugagasusa | 1633 | UAUCUCAACUUUGUGUCAAAGAA | 1902 |
| | sasa | | | | | |
| AD-1735886 | csusuca(Ada)UfaAfUfCfauuccuuu | 1365 | VPusUfsaaaGfgAfAfugauUfaUfugaagsasc | 1634 | GUCUUCAAUAAUCAUUCCUUUAA | 1903 |
| | sasa | | | | | |
| AD-1735887 | usasacu(Gda)CfuCfUfUfcguauuaa | 1366 | VPusCfsuuaAfuAfCfgaagAfgCfaguuasgsg | 1635 | CCUAACUGCUCUUCGUAUUAAGA | 1904 |
| | sgsa | | | | | |
| AD-1735888 | uscsuuc(Uda)GfuCfAfUfaguuccaa | 1367 | VPusGfsuugGfaAfCfuaugAfcAfgaagascsu | 1636 | AGUCUUCUGUCAUAGUUCCAACA | 1905 |
| | scsa | | | | | |
| AD-1735889 | asuscuc(Ada)GfaAfCfCfauaucugu | 1368 | VPusAfsacaGfaUfAfugguUfcUfgagaususu | 1637 | AAAUCUCAGAACCAUAUCUGUUG | 1906 |
| | susa | | | | | |
| AD-1735890 | usgsaau(Cda)UfaUfCfUfucauuuua | 1369 | VPusGfsuaaAfaUfGfaagaUfaGfauucasgsu | 1638 | ACUGAAUCUAUCUUCAUUUUACU | 1907 |
| | scsa | | | | | |
| AD-1735891 | ascscac(Uda)AfaAfCfUfuguuccuu | 1370 | VPusAfsaagGfaAfCfaaguUfuAfguggususc | 1639 | GAACCACUAAACUUGUUCCUUUC | 1908 |
| | susa | | | | | |
| AD-1735892 | asgsugu(Uda)CfuUfUfAfcuccuuac | 1371 | VPusUfsguaAfgGfAfguaaAfgAfacacusgsa | 1640 | UCAGUGUUCUUUACUCCUUACAG | 1909 |
| | sasa | | | | | |
| AD-1735893 | csusuua(Cda)UfcUfUfAfacaggauu | 1372 | VPusUfsaauCfcUfGfuuaaGfaGfuaaagsgsa | 1641 | UCCUUUACUCUUAACAGGAUUAU | 1910 |
| | sasa | | | | | |
| AD-1735894 | usasuac(Cda)UfaAfGfAfacauauua | 1373 | VPusGfsuaaUfaUfGfuucuUfaGfguauasasg | 1642 | CUUAUACCUAAGAACAUAUUACA | 1911 |
| | scsa | | | | | |
| AD-1735895 | csusucu(Ada)CfuGfAfGfaugaucca | 1374 | VPusUfsuggAfuCfAfucucAfgUfagaagsasa | 1643 | UUCUUCUACUGAGAUGAUCCAAG | 1912 |
| | sasa | | | | | |
| AD-1735896 | csusgua(Uda)UfuUfCfUfcauagagu | 1375 | VPusUfsacuCfuAfUfgagaAfaAfuacagsasa | 1644 | UUCUGUAUUUUCUCAUAGAGUAC | 1913 |
| | sasa | | | | | |
| AD-1735897 | ascsuuu(Uda)CfuCfUfUfucaguugu | 1376 | VPusUfsacaAfcUfGfaaagAfgAfaaagusasu | 1645 | AUACUUUUCUCUUUCAGUUGUAG | 1914 |
| | sasa | | | | | |
| AD-1735898 | asusuaa(Uda)UfuCfUfAfgucuguga | 1377 | VPusUfsucaCfaGfAfcuagAfaAfuuaausgsa | 1646 | UCAUUAAUUUCUAGUCUGUGAAA | 1915 |
| | sasa | | | | | |
| AD-1735899 | csuscug(Uda)AfuAfAfGfagguuuca | 1378 | VPusGfsugaAfaCfCfucuuAfuAfcagagsasa | 1647 | UUCUCUGUAUAAGAGGUUUCACC | 1916 |
| | scsa | | | | | |
| AD-1735900 | gsascuu(Uda)CfaAfAfGfuacuaaua | 1379 | VPusGfsuauUfaGfUfacuuUfgAfaagucsasa | 1648 | UUGACUUUCAAAGUACUAAUACU | 1917 |
| | scsa | | | | | |
| AD-1735901 | ususugc(Cda)AfuUfAfUfacaaaguu | 1380 | VPusAfsaacUfuUfGfuauaAfuGfgcaaascsa | 1649 | UGUUUGCCAUUAUACAAAGUUUG | 1918 |
| | susa | | | | | |
| AD-1735902 | gsasaca(Cda)UfaUfCfGfacauaccus | 1381 | VPusGfsaggUfaUfGfucgaUfaGfuguucsasg | 1650 | CUGAACACUAUCGACAUACCUCA | 1919 |
| | csa | | | | | |
| AD-1735903 | usasgaa(Uda)GfaCfAfUfuuacuaau | 1382 | VPusUfsauuAfgUfAfaaugUfcAfuucuascsg | 1651 | CGUAGAAUGACAUUUACUAAUAU | 1920 |
| | sasa | | | | | |
| AD-1735904 | asasgcu(Ada)CfuUfAfGfaaauguuu | 1383 | VPusUfsaaaCfaUfUfucuaAfgUfagcuusgsu | 1652 | ACAAGCUACUUAGAAAUGUUUAG | 1921 |
| | sasa | | | | | |
| AD-1735905 | cscsuua(Gda)UfaCfUfCfucagagau | 1384 | VPusAfsaucUfcUfGfagagUfaCfuaaggsgsa | 1653 | UCCCUUAGUACUCUCAGAGAUUA | 1922 |
| | susa | | | | | |
| AD-1735906 | usgsaau(Gda)CfaCfAfCfuaacguaas | 1385 | VPusAfsuuaCfgUfUfagugUfgCfauucasasg | 1654 | CUUGAAUGCACACUAACGUAAUG | 923 |
| | usa | | | | | |
| AD-1735907 | asasgcc(Uda)AfaUfGfAfugauaauu | 1386 | VPusUfsaauUfaUfCfaucaUfuAfggcuususg | 1655 | CAAAGCCUAAUGAUGAUAAUUAU | 924 |
| | sasa | | | | | |
| AD-1735908 | asasacu(Uda)UfuUfAfCfuaucccau | 1387 | VPusUfsaugGfgAfUfaguaAfaAfaguuuscsc | 1656 | GGAAACUUUUUACUAUCCCAUAU | 1925 |
| | sasa | | | | | |
| AD-1735909 | csusagc(Uda)GfaUfAfCfucuuaagu | 1388 | VPusUfsacuUfaAfGfaguaUfcAfgcuagscsu | 1657 | AGCUAGCUGAUACUCUUAAGUAU | 1926 |
| | sasa | | | | | |
| AD-1735910 | asgscau(Gda)AfaAfAfGfauaacucu | 1389 | VPusUfsagaGfuUfAfucuuUfuCfaugcusgsc | 1658 | GCAGCAUGAAAAGAUAACUCUAA | 1927 |
| | sasa | | | | | |
| AD-1735911 | usasagc(Cda)AfuUfAfUfgcuauuag | 1390 | VPusAfscuaAfuAfGfcauaAfuGfgcuuasgsu | 1659 | ACUAAGCCAUUAUGCUAUUAGUU | 1928 |
| | susa | | | | | |
| AD-1735912 | uscsuag(Cda)UfuUfUfAfgcuaacau | 1391 | VPusUfsaugUfuAfGfcuaaAfaGfcuagasasu | 1660 | AUUCUAGCUUUUAGCUAACAUAU | 1929 |
| | sasa | | | | | |
| AD-1735913 | gsusgug(Ada)UfuCfUfUfcaaacuuc | 1392 | VPusUfsgaaGfuUfUfgaagAfaUfcacacsasa | 1661 | UUGUGUGAUUCUUCAAACUUCAC | 1930 |
| | sasa | | | | | |
| AD-1735914 | uscsucc(Ada)GfaCfCfUfaacaguuu | 1393 | VPusAfsaaaCfuGfUfuaggUfcUfggagasgsa | 1662 | UCUCUCCAGACCUAACAGUUUUA | 1931 |
| | susa | | | | | |
| AD-1735915 | csusuuu(Uda)UfuCfAfUfcuagccuu | 1394 | VPusCfsaagGfcUfAfgaugAfaAfaaaagsasa | 1663 | UUCUUUUUUUCAUCUAGCCUUGC | 1932 |
| | sgsa | | | | | |
| AD-1735916 | csasaaa(Uda)AfaUfUfCfuugacaucs | 1395 | VPusAfsgauGfuCfAfagaaUfuAfuuuugsasc | 1664 | GUCAAAAUAAUUCUUGACAUCUA | 1933 |
| | usa | | | | | |
| AD-1735917 | gscsauc(Ada)CfuUfUfCfugaaaaua | 1396 | VPusUfsuauUfuUfCfagaaAfgUfgaugcsusg | 1665 | CAGCAUCACUUUCUGAAAAUAAG | 1934 |
| | sasa | | | | | |
| AD-1735918 | uscsuuu(Uda)GfuGfAfAfacauacua | 1397 | VPusAfsuagUfaUfGfuuucAfcAfaaagasusg | 1666 | CAUCUUUUGUGAAACAUACUAUU | 1935 |
| | susa | | | | | |
| AD-1735919 | csusauu(Uda)CfuUfCfCfauaggcua | 1398 | VPusUfsuagCfcUfAfuggaAfgAfaauagsasa | 1667 | UUCUAUUUCUUCCAUAGGCUAAA | 1936 |
| | sasa | | | | | |
| AD-1735920 | csusuca(Ada)UfgAfAfGfuguuaaca | 1399 | VPusUfsuguUfaAfCfacuuCfaUfugaagsasg | 1668 | CUCUUCAAUGAAGUGUUAACAAC | 1937 |
| | sasa | | | | | |
| AD-1735921 | ususugc(Cda)UfuCfAfUfucuacuuu | 1400 | VPusGfsaaaGfuAfGfaaugAfaGfgcaaasasc | 1669 | GUUUUGCCUUCAUUCUACUUUCU | 1938 |
| | scsa | | | | | |
| AD-1735922 | asgsguu(Uda)UfuAfAfAfuguccuaa | 1401 | VPusUfsuuaGfgAfCfauuuAfaAfaaccusgsa | 1670 | UCAGGUUUUUAAAUGUCCUAAAA | 1939 |
| | sasa | | | | | |
| AD-1735923 | gsasaua(Uda)CfuUfUfGfaguccuuc | 1402 | VPusUfsgaaGfgAfCfucaaAfgAfuauucsasc | 1671 | GUGAAUAUCUUUGAGUCCUUCAA | 1940 |
| | sasa | | | | | |
| AD-1735924 | gsasaca(Cda)UfuCfCfAfaagauuaas | 1403 | VPusAfsuuaAfuCfUfuuggAfaGfuguucsasg | 1672 | CUGAACACUUCCAAAGAUUAAUC | 1941 |
| | usa | | | | | |
| AD-1735925 | csusaaa(Uda)UfuUfGfUfcuaacaaas | 1404 | VPusAfsuuuGfuUfAfgacaAfaAfuuuagsgsc | 1673 | GCCUAAAUUUUGUCUAACAAAUG | 1942 |
| | usa | | | | | |
| AD-1735926 | gsusaaa(Cda)AfaCfUfUfaaaauugcs | 1405 | VPusAfsgcaAfuUfUfuaagUfuGfuuuacsusc | 1674 | GAGUAAACAACUUAAAAUUGCUU | 1943 |
| | usa | | | | | |
| AD-1735927 | asasaau(Ada)AfuUfUfAfcucacuca | 1406 | VPusCfsugaGfuGfAfguaaAfuUfauuuusasg | 1675 | CUAAAAUAAUUUACUCACUCAGA | 1944 |
| | sgsa | | | | | |
| AD-1735928 | gsascau(Cda)UfaUfUfCfuguugguc | 1407 | VPusAfsgacCfaAfCfagaaUfaGfaugucsasg | 1676 | CUGACAUCUAUUCUGUUGGUCUG | 1945 |
| | susa | | | | | |
| AD-1735929 | usasacu(Gda)AfgUfAfGfucuuauau | 1408 | VPusAfsauaUfaAfGfacuaCfuCfaguuasgsg | 1677 | CCUAACUGAGUAGUCUUAUAUUU | 1946 |
| | susa | | | | | |
| AD-1735930 | uscsugg(Ada)AfuUfUfAfgccuucua | 1409 | VPusUfsuagAfaGfGfcuaaAfuUfccagascsg | 1678 | CGUCUGGAAUUUAGCCUUCUAAU | 1947 |
| | sasa | | | | | |
| AD-1735931 | ascsaug(Cda)CfuUfGfAfacucuuga | 1410 | VPusUfsucaAfgAfGfuucaAfgGfcaugususu | 1679 | AAACAUGCCUUGAACUCUUGAAC | 1948 |
| | sasa | | | | | |
| AD-1735932 | asuscaa(Gda)CfaCfUfUfcuugcacus | 1411 | VPusAfsaguGfcAfAfgaagUfgCfuugaususu | 1680 | AAAUCAAGCACUUCUUGCACUUG | 1949 |
| | usa | | | | | |
| AD-1735933 | csusugc(Uda)UfuUfCfAfucuuuaua | 1412 | VPusGfsuauAfaAfGfaugaAfaAfgcaagsusg | 1681 | CACUUGCUUUUCAUCUUUAUACU | 1950 |
| | scsa | | | | | |
| AD-1735934 | ususuuc(Uda)CfcCfUfAfuguaauau | 1413 | VPusGfsauaUfuAfCfauagGfgAfgaaaasgsc | 1682 | GCUUUUCUCCCUAUGUAAUAUCU | 1951 |
| | scsa | | | | | |
| AD-1735935 | usgscuu(Uda)CfuUfCfUfaugucuaa | 1414 | VPusUfsuuaGfaCfAfuagaAfgAfaagcasusa | 1683 | UAUGCUUUCUUCUAUGUCUAAAA | 1952 |
| | sasa | | | | | |
| AD-1735936 | ascscug(Cda)UfuAfGfCfaaaucguc | 1415 | VPusAfsgacGfaUfUfugcuAfaGfcaggususc | 1684 | GAACCUGCUUAGCAAAUCGUCUG | 1953 |
| | susa | | | | | |
| AD-1735937 | asusauu(Cda)CfuCfUfAfcccuuuca | 1416 | VPusGfsugaAfaGfGfguagAfgGfaauauscsu | 1685 | AGAUAUUCCUCUACCCUUUCACA | 1954 |
| | scsa | | | | | |
| AD-1735938 | uscscca(Cda)UfuUfUfCfuuuggguu | 1417 | VPusAfsaacCfcAfAfagaaAfaGfugggasusu | 1686 | AAUCCCACUUUUCUUUGGGUUUC | 1955 |
| | susa | | | | | |
| AD-1735939 | asgsgcu(Uda)CfuUfGfUfauauacuu | 1418 | VPusUfsaagUfaUfAfuacaAfgAfagccusgsc | 1687 | GCAGGCUUCUUGUAUAUACUUAU | 1956 |
| | sasa | | | | | |
| AD-1735940 | asasacu(Uda)GfaUfCfUfguguuuca | 1419 | VPusCfsugaAfaCfAfcagaUfcAfaguuusgsa | 1688 | UCAAACUUGAUCUGUGUUUCAGG | 1957 |
| | sgsa | | | | | |
| AD-1735941 | ususugc(Uda)UfuAfAfUfgcuaaauu | 1420 | VPusGfsaauUfuAfGfcauuAfaAfgcaaasasg | 1689 | CUUUUGCUUUAAUGCUAAAUUCC | 1958 |
| | scsa | | | | | |
| AD-1735942 | asgsacu(Ada)GfcUfGfUfuauuugua | 1421 | VPusAfsuacAfaAfUfaacaGfcUfagucususu | 1690 | AAAGACUAGCUGUUAUUUGUAUU | 1959 |
| | susa | | | | | |
| AD-1735943 | ususccu(Ada)CfuUfUfCfccuugaau | 1422 | VPusUfsauuCfaAfGfggaaAfgUfaggaasgsc | 1691 | GCUUCCUACUUUCCCUUGAAUAG | 1960 |
| | sasa | | | | | |
| AD-1735944 | csasgaa(Cda)UfgAfAfUfgcucaagu | 1423 | VPusGfsacuUfgAfGfcauuCfaGfuucugsgsa | 1692 | UCCAGAACUGAAUGCUCAAGUCU | 1961 |
| | scsa | | | | | |
| AD-1735945 | uscsuug(Uda)UfaCfUfAfauuucuca | 1424 | VPusAfsugaGfaAfAfuuagUfaAfcaagasasc | 1693 | GUUCUUGUUACUAAUUUCUCAUA | 1962 |
| | susa | | | | | |
| AD-1735946 | csuscag(Uda)GfaUfAfGfccuuuaua | 1425 | VPusGfsuauAfaAfGfgcuaUfcAfcugagsusu | 1694 | AACUCAGUGAUAGCCUUUAUACC | 1963 |
| | scsa | | | | | |
| AD-1735947 | ususuua(Uda)GfcUfCfCfuaaaacau | 1426 | VPusGfsaugUfuUfUfaggaGfcAfuaaaasgsa | 1695 | UCUUUUAUGCUCCUAAAACAUCU | 1964 |
| | scsa | | | | | |
| AD-1735948 | ususcuc(Cda)UfuAfGfGfuuauguuc | 1427 | VPusUfsgaaCfaUfAfaccuAfaGfgagaasusu | 1696 | AAUUCUCCUUAGGUUAUGUUCAG | 1965 |
| | sasa | | | | | |
| AD-1735949 | asusugc(Uda)CfaUfCfGfagacauaas | 1428 | VPusUfsuuaUfgUfCfucgaUfgAfgcaausasg | 1697 | CUAUUGCUCAUCGAGACAUAAAA | 1966 |
| | asa | | | | | |
| AD-1735950 | cscsuuu(Gda)UfaCfAfUfacacacuu | 1429 | VPusUfsaagUfgUfGfuaugUfaCfaaaggsasa | 1698 | UUCCUUUGUACAUACACACUUAG | 1967 |
| | sasa | | | | | |
| AD-1735951 | ususgaa(Cda)CfaAfGfAfgcacauga | 1430 | VPusUfsucaUfgUfGfcucuUfgGfuucaasgsu | 1699 | ACUUGAACCAAGAGCACAUGAAU | 1968 |
| | sasa | | | | | |
| AD-1735952 | uscsagg(Gda)AfuUfUfUfaaagucua | 1431 | VPusUfsuagAfcUfUfuaaaAfuCfccugasgsg | 1700 | CCUCAGGGAUUUUAAAGUCUAAU | 1969 |
| | sasa | | | | | |
| AD-1735953 | usascuu(Gda)CfuUfAfUfaaagugau | 1432 | VPusUfsaucAfcUfUfuauaAfgCfaaguascsc | 1701 | GGUACUUGCUUAUAAAGUGAUAG | 1970 |
| | sasa | | | | | |
| AD-1735954 | asusgca(Uda)CfuAfAfAfccuaccuu | 1433 | VPusCfsaagGfuAfGfguuuAfgAfugcausgsc | 1702 | GCAUGCAUCUAAACCUACCUUGA | 1971 |
| | sgsa | | | | | |
| AD-1735955 | ususggg(Ada)AfaAfCfAfcuauuaug | 1434 | VPusUfscauAfaUfAfguguUfuUfcccaasgsu | 1703 | ACUUGGGAAAACACUAUUAUGAA | 1972 |
| | sasa | | | | | |
| AD-1735956 | asasacu(Cda)CfaAfAfGfagaaaugas | 1435 | VPusUfsucaUfuUfCfucuuUfgGfaguuusgsa | 1704 | UCAAACUCCAAAGAGAAAUGAAU | 1973 |
| | asa | | | | | |
| AD-1735957 | asusggg(Cda)AfuUfUfUfucaaaaca | 1436 | VPusAfsuguUfuUfGfaaaaAfuGfcccausasu | 1705 | AUAUGGGCAUUUUUCAAAACAUU | 1974 |
| | susa | | | | | |
| AD-1735958 | asusaau(Gda)GfaAfCfUfuggacuca | 1437 | VPusUfsugaGfuCfCfaaguUfcCfauuauscsu | 1706 | AGAUAAUGGAACUUGGACUCAAC | 1975 |
| | sasa | | | | | |
| AD-1735959 | usgsugu(Ada)GfaUfGfAfcgaaacca | 1438 | VPusUfsuggUfuUfCfgucaUfcUfacacasasa | 1707 | UUUGUGUAGAUGACGAAACCAAG | 1976 |
| | sasa | | | | | |
| AD-1735960 | ususcua(Cda)CfuCfAfAfagauaaga | 1439 | VPusGfsucuUfaUfCfuuugAfgGfuagaascsa | 1708 | UGUUCUACCUCAAAGAUAAGACA | 1977 |
| | scsa | | | | | |
| AD-1735961 | asgsaag(Gda)CfaUfAfUfugaguuau | 1440 | VPusAfsauaAfcUfCfaauaUfgCfcuucusasa | 1709 | UUAGAAGGCAUAUUGAGUUAUUU | 1978 |
| | susa | | | | | |
| AD-1735962 | asusgga(Gda)UfuUfUfUfcugcuauu | 1441 | VPusAfsaauAfgCfAfgaaaAfaCfuccausgsu | 1710 | ACAUGGAGUUUUUCUGCUAUUUU | 1979 |
| | susa | | | | | |
| AD-1735963 | uscsagu(Uda)UfcUfCfAfuuaguuug | 1442 | VPusAfscaaAfcUfAfaugaGfaAfacugasgsg | 1711 | CCUCAGUUUCUCAUUAGUUUGUC | 1980 |
| | susa | | | | | |
| AD-1735964 | csusgca(Uda)AfuAfUfAfagaacgaa | 1443 | VPusUfsuucGfuUfCfuuauAfuAfugcagsasa | 1712 | UUCUGCAUAUAUAAGAACGAAAU | 1981 |
| | sasa | | | | | |
| AD-1735965 | usgsagc(Cda)AfaAfAfUfauuaaauu | 1444 | VPusGfsaauUfuAfAfuauuUfuGfgcucasgsa | 1713 | UCUGAGCCAAAAUAUUAAAUUCU | 1982 |
| | scsa | | | | | |
| AD-1735966 | asgsaau(Gda)AfuAfUfUfuccuguuu | 1445 | VPusAfsaaaCfaGfGfaaauAfuCfauucususg | 1714 | CAAGAAUGAUAUUUCCUGUUUUA | 1983 |
| | susa | | | | | |
| AD-1735967 | gsusgcu(Cda)UfaUfAfUfaaaucuuc | 1446 | VPusGfsgaaGfaUfUfuauaUfaGfagcacsasa | 1715 | UUGUGCUCUAUAUAAAUCUUCCC | 1984 |
| | scsa | | | | | |
| AD-1735968 | ususuac(Ada)GfaGfAfAfgcaucuua | 1447 | VPusAfsuaaGfaUfGfcuucUfcUfguaaasasu | 1716 | AUUUUACAGAGAAGCAUCUUAUU | 1985 |
| | susa | | | | | |
| AD-1735969 | gsuscuu(Gda)AfgUfUfCfugcaugac | 1448 | VPusUfsgucAfuGfCfagaaCfuCfaagacsasu | 1717 | AUGUCUUGAGUUCUGCAUGACAG | 1986 |
| | sasa | | | | | |
| AD-1735970 | csusuca(Ada)AfuCfUfAfuaauuuua | 1449 | VPusGfsuaaAfaUfUfauagAfuUfugaagsgsg | 1718 | CCCUUCAAAUCUAUAAUUUUACU | 1987 |
| | scsa | | | | | |
| AD-1735971 | gsasagc(Ada)UfaUfAfGfaacucuau | 1450 | VPusAfsauaGfaGfUfucuaUfaUfgcuucsasc | 1719 | GUGAAGCAUAUAGAACUCUAUUU | 1988 |
| | susa | | | | | |
| AD-1735972 | gsasgcu(Gda)CfuUfCfUfaaauaacas | 1451 | VPusUfsuguUfaUfUfuagaAfgCfagcucsusc | 1720 | GAGAGCUGCUUCUAAAUAACAAA | 1989 |
| | asa | | | | | |
| AD-1735973 | usgsacu(Gda)UfaUfUfUfccugauca | 1452 | VPusAfsugaUfcAfGfgaaaUfaCfagucascsa | 1721 | UGUGACUGUAUUUCCUGAUCAUU | 1990 |
| | susa | | | | | |
| AD-1735974 | gsusucu(Gda)AfaGfGfAfuauacuuc | 1453 | VPusAfsgaaGfuAfUfauccUfuCfagaacsgsc | 1722 | GCGUUCUGAAGGAUAUACUUCUG | 1991 |
| | susa | | | | | |
| AD-1735975 | gsusgaa(Gda)CfaUfGfAfuucaauac | 1454 | VPusAfsguaUfuGfAfaucaUfgCfuucacsasg | 1723 | CUGUGAAGCAUGAUUCAAUACUG | 1992 |
| | susa | | | | | |
| AD-1735976 | asasugc(Uda)GfcUfUfCfacagauuu | 1455 | VPusAfsaaaUfcUfGfugaaGfcAfgcauuscsg | 1724 | CGAAUGCUGCUUCACAGAUUUUU | 1993 |
| | susa | | | | | |
| AD-1735977 | usgsugg(Gda)UfuAfUfGfuuaaucu | 1456 | VPusUfscagAfuUfAfacauAfaCfccacasgsu | 1725 | ACUGUGGGUUAUGUUAAUCUGAA | 1994 |
| | gsasa | | | | | |
| AD-1735978 | gsasgua(Cda)AfgAfAfGfaaugcuca | 1457 | VPusAfsugaGfcAfUfucuuCfuGfuacucsasc | 1726 | GUGAGUACAGAAGAAUGCUCAUG | 1995 |
| | susa | | | | | |
| AD-1735979 | csusgua(Uda)UfuCfAfUfccuagauu | 1458 | VPusAfsaauCfuAfGfgaugAfaAfuacagscsu | 1727 | AGCUGUAUUUCAUCCUAGAUUUU | 1996 |
| | susa | | | | | |
| AD-1735980 | asasucu(Gda)GfuAfAfAfugcuggaa | 1459 | VPusUfsuucCfaGfCfauuuAfcCfagauusgsc | 1728 | GCAAUCUGGUAAAUGCUGGAAAA | 1997 |
| | sasa | | | | | |
| AD-1735981 | usgscuc(Ada)GfaUfUfAfccugaucg | 1460 | VPusAfscgaUfcAfGfguaaUfcUfgagcasasu | 1729 | AUUGCUCAGAUUACCUGAUCGUG | 1998 |
| | susa | | | | | |
| AD-1735982 | gsascag(Cda)UfaUfGfGfaguuugcg | 1461 | VPusAfscgcAfaAfCfuccaUfaGfcugucsasg | 1730 | CUGACAGCUAUGGAGUUUGCGUG | 1999 |
| | susa | | | | | |
| AD-1735983 | usasgaa(Cda)AfuGfCfUfcacuuacas | 1462 | VPusUfsuguAfaGfUfgagcAfuGfuucuasusa | 1731 | UAUAGAACAUGCUCACUUACAAA | 2000 |
| | asa | | | | | |
| AD-1735984 | asusuau(Gda)CfuUfCfAfuuucacua | 1463 | VPusAfsuagUfgAfAfaugaAfgCfauaauscsa | 1732 | UGAUUAUGCUUCAUUUCACUAUG | 2001 |
| | susa | | | | | |
| AD-1735985 | csasaca(Gda)CfaAfGfUfcauaaaags | 1464 | VPusAfscuuUfuAfUfgacuUfgCfuguugsgsu | 1733 | ACCAACAGCAAGUCAUAAAAGUA | 2002 |
| | usa | | | | | |
| AD-1735986 | ususguc(Uda)GfaAfAfAfugucuuua | 1465 | VPusUfsuaaAfgAfCfauuuUfcAfgacaasusg | 1734 | CAUUGUCUGAAAAUGUCUUUAAG | 2003 |
| | sasa | | | | | |
| AD-1735987 | usgsuug(Gda)UfuCfAfAfaggacaau | 1466 | VPusAfsauuGfuCfCfuuugAfaCfcaacasgsa | 1735 | UCUGUUGGUUCAAAGGACAAUUG | 2004 |
| | susa | | | | | |
| AD-1735988 | uscsuaa(Ada)CfuUfUfAfauauaucg | 1467 | VPusUfscgaUfaUfAfuuaaAfgUfuuagasgsc | 1736 | GCUCUAAACUUUAAUAUAUCGAA | 2005 |
| | sasa | | | | | |
| AD-1735989 | asasgug(Ada)AfaCfAfUfgacugucg | 1468 | VPusAfscgaCfaGfUfcaugUfuUfcacuusasa | 1737 | UUAAGUGAAACAUGACUGUCGUG | 2006 |
| | susa | | | | | |
| AD-1735990 | asuscgu(Cda)CfaUfAfCfaguuuuca | 1469 | VPusAfsugaAfaAfCfuguaUfgGfacgausasu | 1738 | AUAUCGUCCAUACAGUUUUCAUU | 2007 |
| | susa | | | | | |
| AD-1735991 | csusuca(Gda)GfaAfAfUfaguaggaa | 1470 | VPusUfsuucCfuAfCfuauuUfcCfugaagscsa | 1739 | UGCUUCAGGAAAUAGUAGGAAAA | 2008 |
| | sasa | | | | | |
| AD-1735992 | csasccc(Uda)UfuCfUfGfuaaggacu | 1471 | VPusCfsaguCfcUfUfacagAfaAfgggugsgsg | 1740 | CCCACCCUUUCUGUAAGGACUGU | 2009 |
| | sgsa | | | | | |
| AD-1735993 | asasaga(Gda)AfuAfCfCfugacauccs | 1472 | VPusAfsggaUfgUfCfagguAfuCfucuuususg | 1741 | CAAAAGAGAUACCUGACAUCCUG | 2010 |
| | usa | | | | | |
| AD-1735994 | asusgag(Cda)AfuUfAfAfuguuuucu | 1473 | VPusCfsagaAfaAfCfauuaAfuGfcucaususa | 1742 | UAAUGAGCAUUAAUGUUUUCUGA | 2011 |
| | sgsa | | | | | |
| AD-1735995 | usgsaca(Uda)UfuUfUfUfcucauaga | 1474 | VPusUfsucuAfuGfAfgaaaAfaAfugucasasc | 1743 | GUUGACAUUUUUUCUCAUAGAAA | 2012 |
| | sasa | | | | | |
| AD-1735996 | csasgag(Ada)UfuAfAfAfugacuacu | 1475 | VPusUfsaguAfgUfCfauuuAfaUfcucugsasu | 1744 | AUCAGAGAUUAAAUGACUACUAG | 2013 |
| | sasa | | | | | |
| AD-1735997 | gscsugu(Cda)AfaAfUfGfuuauauug | 1476 | VPusAfscaaUfaUfAfacauUfuGfacagcsasu | 1745 | AUGCUGUCAAAUGUUAUAUUGUU | 2014 |
| | susa | | | | | |
| AD-1735998 | asasuau(Ada)AfuAfCfUfacagcaaas | 1477 | VPusUfsuuuGfcUfGfuaguAfuUfauauuscsc | 1746 | GGAAUAUAAUACUACAGCAAAAU | 2015 |
| | asa | | | | | |
| AD-1735999 | gsgsugu(Cda)UfaAfAfUfauaauuuc | 1478 | VPusUfsgaaAfuUfAfuauuUfaGfacaccscsu | 1747 | AGGGUGUCUAAAUAUAAUUUCAU | 2016 |
| | sasa | | | | | |
| AD-1736000 | csuscuu(Uda)AfuAfCfAfaaaugaga | 1479 | VPusCfsucuCfaUfUfuuguAfuAfaagagsasa | 1748 | UUCUCUUUAUACAAAAUGAGAGU | 2017 |
| | sgsa | | | | | |
| AD-1736001 | gscsagu(Ada)CfcAfAfAfugaauaaa | 1480 | VPusUfsuuuAfuUfCfauuuGfgUfacugcsusa | 1749 | UAGCAGUACCAAAUGAAUAAAAG | 2018 |
| | sasa | | | | | |
| AD-1736002 | ususguu(Gda)GfuAfCfAfcaagguaa | 1481 | VPusUfsuuaCfcUfUfguguAfcCfaacaasusc | 1750 | GAUUGUUGGUACACAAGGUAAAC | 2019 |
| | sasa | | | | | |
| AD-1736003 | csuscuu(Ada)UfuUfAfAfcuuaaccg | 1482 | VPusAfscggUfuAfAfguuaAfaUfaagagsusu | 1751 | AACUCUUAUUUAACUUAACCGUC | 2020 |
| | susa | | | | | |
| AD-1736004 | usgscuu(Gda)AfuGfAfUfacaaugaa | 1483 | VPusAfsuucAfuUfGfuaucAfuCfaagcasusu | 1752 | AAUGCUUGAUGAUACAAUGAAUG | 2021 |
| | susa | | | | | |
| AD-1736005 | asascug(Gda)GfaAfAfGfacaauuug | 1484 | VPusUfscaaAfuUfGfucuuUfcCfcaguusasc | 1753 | GUAACUGGGAAAGACAAUUUGAA | 2022 |
| | sasa | | | | | |
| AD-1736006 | csusccu(Uda)AfuAfUfGfacuauuug | 1485 | VPusUfscaaAfuAfGfucauAfuAfaggagscsc | 1754 | GGCUCCUUAUAUGACUAUUUGAA | 2023 |
| | sasa | | | | | |
| AD-1736007 | asgsuca(Uda)GfcUfAfAfccaaugga | 1486 | VPusUfsuccAfuUfGfguuaGfcAfugacusgsa | 1755 | UCAGUCAUGCUAACCAAUGGAAA | 2024 |
| | sasa | | | | | |
| AD-1736008 | cscsuga(Ada)GfuCfAfCfacagcuaas | 1487 | VPusAfsuuaGfcUfGfugugAfcUfucaggsasc | 1756 | GUCCUGAAGUCACACAGCUAAUG | 2025 |
| | usa | | | | | |
| AD-1736009 | ususgcu(Gda)CfuGfAfCfaacaaaga | 1488 | VPusAfsucuUfuGfUfugucAfgCfagcaasusg | 1757 | CAUUGCUGCUGACAACAAAGAUA | 2026 |
| | susa | | | | | |
| AD-1736010 | usascug(Ada)CfuUfUfGfccuguaaa | 1489 | VPusCfsuuuAfcAfGfgcaaAfgUfcaguasasu | 1758 | AUUACUGACUUUGCCUGUAAAGA | 2027 |
| | sgsa | | | | | |
| AD-1736011 | asasucc(Cda)UfaUfUfUfuaaaauucs | 1490 | VPusGfsgaaUfuUfUfaaaaUfaGfggauusgsu | 1759 | ACAAUCCCUAUUUUAAAAUUCCC | 2028 |
| | csa | | | | | |
| AD-1736012 | gsusgcc(Uda)UfaGfGfAfgauuaccc | 1491 | VPusAfsgggUfaAfUfcuccUfaAfggcacsusc | 1760 | GAGUGCCUUAGGAGAUUACCCUU | 2029 |
| | susa | | | | | |
| AD-1736013 | gsascaa(Uda)CfuAfAfAfuauaucau | 1492 | VPusGfsaugAfuAfUfauuuAfgAfuugucsusg | 1761 | CAGACAAUCUAAAUAUAUCAUCA | 2030 |
| | scsa | | | | | |
| AD-1736014 | usgsuga(Uda)AfaUfGfAfacaccgua | 1493 | VPusUfsuacGfgUfGfuucaUfuAfucacasasg | 1762 | CUUGUGAUAAUGAACACCGUAAG | 2031 |
| | sasa | | | | | |
| AD-1736015 | uscsacc(Gda)UfuGfUfAfaagacuuu | 1494 | VPusAfsaaaGfuCfUfuuacAfaCfggugasusu | 1763 | AAUCACCGUUGUAAAGACUUUUU | 2032 |
| | susa | | | | | |
| AD-1736016 | ususaga(Gda)AfaGfCfUfuccugaca | 1495 | VPusAfsuguCfaGfGfaagcUfuCfucuaasusc | 1764 | GAUUAGAGAAGCUUCCUGACAUC | 2033 |
| | susa | | | | | |
| AD-1736017 | asascag(Uda)AfaAfGfAfaaugcuac | 1496 | VPusAfsguaGfcAfUfuucuUfuAfcuguusasu | 1765 | AUAACAGUAAAGAAAUGCUACUU | 2034 |
| | susa | | | | | |
| AD-1736018 | usasugu(Uda)CfuGfAfCfuugagagu | 1497 | VPusAfsacuCfuCfAfagucAfgAfacauasasa | 1766 | UUUAUGUUCUGACUUGAGAGUUA | 2035 |
| | susa | | | | | |
| AD-1736019 | ususaga(Gda)CfaUfGfCfuaucuuua | 1498 | VPusCfsuaaAfgAfUfagcaUfgCfucuaasusu | 1767 | AAUUAGAGCAUGCUAUCUUUAGG | 2036 |
| | sgsa | | | | | |
| AD-1736020 | usasguc(Uda)UfuGfAfUfugaaauaa | 1499 | VPusCfsuuaUfuUfCfaaucAfaAfgacuasusg | 1768 | CAUAGUCUUUGAUUGAAAUAAGU | 2037 |
| | sgsa | | | | | |
| AD-1736021 | ususggu(Ada)AfaCfGfAfgauuuaac | 1500 | VPusUfsguuAfaAfUfcucgUfuUfaccaasasg | 1769 | CUUUGGUAAACGAGAUUUAACAU | 2038 |
| | sasa | | | | | |
| AD-1736022 | gsuscug(Ada)AfaAfUfUfgcuuucau | 1501 | VPusAfsaugAfaAfGfcaauUfuUfcagacscsu | 1770 | AGGUCUGAAAAUUGCUUUCAUUU | 2039 |
| | susa | | | | | |
| AD-1736023 | asusgaa(Cda)UfuGfUfUfgccuugua | 1502 | VPusUfsuacAfaGfGfcaacAfaGfuucausgsc | 1771 | GCAUGAACUUGUUGCCUUGUAAA | 2040 |
| | sasa | | | | | |
| AD-1736024 | gsgsgca(Ada)UfaAfAfCfuguaucaa | 1503 | VPusUfsuugAfuAfCfaguuUfaUfugcccsasa | 1772 | UUGGGCAAUAAACUGUAUCAAAA | 2041 |
| | sasa | | | | | |
| AD-1736025 | ascsaug(Uda)UfaGfCfAfuauaaugu | 1504 | VPusUfsacaUfuAfUfaugcUfaAfcaugusasc | 1773 | GUACAUGUUAGCAUAUAAUGUAU | 2042 |
| | sasa | | | | | |
| AD-1736026 | usgsuga(Gda)AfgUfAfUfagaauuuc | 1505 | VPusAfsgaaAfuUfCfuauaCfuCfucacasgsu | 1774 | ACUGUGAGAGUAUAGAAUUUCUU | 2043 |
| | susa | | | | | |
| AD-1736027 | asusccu(Uda)CfaUfUfUfggcacuau | 1506 | VPusUfsauaGfuGfCfcaaaUfgAfaggaususa | 1775 | UAAUCCUUCAUUUGGCACUAUAG | 2044 |
| | sasa | | | | | |
| AD-1736028 | ascsauu(Uda)AfgAfAfAfguagcuuu | 1507 | VPusUfsaaaGfcUfAfcuuuCfuAfaaugusgsu | 1776 | ACACAUUUAGAAAGUAGCUUUAU | 2045 |
| | sasa | | | | | |
| AD-1736029 | asascug(Uda)UfcUfAfUfaaagcaaas | 1508 | VPusCfsuuuGfcUfUfuauaGfaAfcaguusasa | 1777 | UUAACUGUUCUAUAAAGCAAAGC | 2046 |
| | gsa | | | | | |
| AD-1736030 | cscsucc(Ada)GfaGfAfUfgaaagauc | 1509 | VPusAfsgauCfuUfUfcaucUfcUfggaggsasg | 1778 | CUCCUCCAGAGAUGAAAGAUCUU | 2047 |
| | susa | | | | | |
| AD-1736031 | ususguu(Uda)AfaCfUfAfugacuccu | 1510 | VPusUfsaggAfgUfCfauagUfuAfaacaascsa | 1779 | UGUUGUUUAACUAUGACUCCUAA | 2048 |
| | sasa | | | | | |
| AD-1736032 | csusguu(Uda)GfaCfAfAfugcuuugu | 1511 | VPusAfsacaAfaGfCfauugUfcAfaacagsasa | 1780 | UUCUGUUUGACAAUGCUUUGUUC | 2049 |
| | susa | | | | | |
| AD-1736033 | usgsucc(Uda)AfaAfAfGfaaauuuuu | 1512 | VPusGfsaaaAfaUfUfucuuUfuAfggacasasc | 1781 | GUUGUCCUAAAAGAAAUUUUUCU | 2050 |
| | scsa | | | | | |
| AD-1736034 | ascsaga(Uda)UfgAfAfCfaaagaacus | 1513 | VPusAfsaguUfcUfUfuguuCfaAfucugusasg | 1782 | CUACAGAUUGAACAAAGAACUUA | 2051 |
| | usa | | | | | |
| AD-1736035 | gsusuua(Ada)CfcUfGfUfccaaacuu | 1514 | VPusGfsaagUfuUfGfgacaGfgUfuaaacsgsa | 1783 | UCGUUUAACCUGUCCAAACUUCU | 2052 |
| | scsa | | | | | |
| AD-1736036 | csasaaa(Uda)GfuUfUfAfacuuuacc | 1515 | VPusUfsgguAfaAfGfuuaaAfcAfuuuugsgsu | 1784 | ACCAAAAUGUUUAACUUUACCAA | 2053 |
| | sasa | | | | | |
| AD-1736037 | uscscca(Uda)UfgUfGfUfaauauuua | 1516 | VPusAfsuaaAfuAfUfuacaCfaAfugggascsu | 1785 | AGUCCCAUUGUGUAAUAUUUAUU | 2054 |
| | susa | | | | | |
| AD-1736038 | gsusugg(Gda)UfaAfAfUfaugcuuau | 1517 | VPusAfsauaAfgCfAfuauuUfaCfccaacsasu | 1786 | AUGUUGGGUAAAUAUGCUUAUUG | 2055 |
| | susa | | | | | |
| AD-1736039 | csasggg(Uda)UfgUfCfUfuugagucu | 1518 | VPusCfsagaCfuCfAfaagaCfaAfcccugsasg | 1787 | CUCAGGGUUGUCUUUGAGUCUGC | 2056 |
| | sgsa | | | | | |
| AD-1736040 | gscsuaa(Ada)AfuCfCfAfacugcaau | 1519 | VPusAfsauuGfcAfGfuuggAfuUfuuagcscsc | 1788 | GGGCUAAAAUCCAACUGCAAUUG | 2057 |
| | susa | | | | | |
| AD-1736041 | csasgga(Cda)UfgAfAfGfuguguaug | 1520 | VPusAfscauAfcAfCfacuuCfaGfuccugsgsc | 1789 | GCCAGGACUGAAGUGUGUAUGUC | 2058 |
| | susa | | | | | |
| AD-1736042 | gsasgua(Cda)CfaAfUfUfgccuuauu | 1521 | VPusUfsaauAfaGfGfcaauUfgGfuacucscsu | 1790 | AGGAGUACCAAUUGCCUUAUUAU | 2059 |
| | sasa | | | | | |
| AD-1736043 | asasgug(Cda)CfuAfUfGfugaaguga | 1522 | VPusAfsucaCfuUfCfacauAfgGfcacuususu | 1791 | AAAAGUGCCUAUGUGAAGUGAUU | 2060 |
| | susa | | | | | |
| AD-1736044 | usasaca(Ada)UfaAfUfAfgaacugcc | 1523 | VPusUfsggcAfgUfUfcuauUfaUfuguuasgsg | 1792 | CCUAACAAUAAUAGAACUGCCAG | 2061 |
| | sasa | | | | | |
| AD-1736045 | gscsugu(Uda)CfcAfUfAfccauugcu | 1524 | VPusAfsagcAfaUfGfguauGfgAfacagcsasg | 1793 | CUGCUGUUCCAUACCAUUGCUUU | 2062 |
| | susa | | | | | |
| AD-1736046 | usasgac(Uda)GfgAfGfAfagauuauu | 1525 | VPusGfsaauAfaUfCfuucuCfcAfgucuasgsa | 1794 | UCUAGACUGGAGAAGAUUAUUCA | 2063 |
| | scsa | | | | | |
| AD-1736047 | ususcca(Ada)CfaGfCfAfucaccaaas | 1526 | VPusAfsuuuGfgUfGfaugcUfgUfuggaasgsg | 1795 | CCUUCCAACAGCAUCACCAAAUG | 2064 |
| | usa | | | | | |
| AD-1736048 | usasauu(Gda)GfuAfCfAfgauucugu | 1527 | VPusAfsacaGfaAfUfcuguAfcCfaauuascsa | 1796 | UGUAAUUGGUACAGAUUCUGUUG | 2065 |
| | susa | | | | | |
| AD-1736049 | gsasgaa(Ada)CfaUfUfAfuuuguugu | 1528 | VPusGfsacaAfcAfAfauaaUfgUfuucucsusu | 1797 | AAGAGAAACAUUAUUUGUUGUCA | 2066 |
| | scsa | | | | | |
| AD-1736050 | csgscuc(Uda)CfaAfUfUfgcuagugg | 1529 | VPusAfsccaCfuAfGfcaauUfgAfgagcgscsc | 1798 | GGCGCUCUCAAUUGCUAGUGGUC | 2067 |
| | susa | | | | | |
| AD-1736051 | csgsgua(Uda)CfaGfAfAfacagcaaas | 1530 | VPusAfsuuuGfcUfGfuuucUfgAfuaccgsusc | 1799 | GACGGUAUCAGAAACAGCAAAUA | 2068 |
| | usa | | | | | |
| AD-1736052 | cscscag(Ada)CfaUfAfAfuuuuauau | 1531 | VPusAfsauaUfaAfAfauuaUfgUfcugggsasg | 1800 | CUCCCAGACAUAAUUUUAUAUUU | 2069 |
| | susa | | | | | |
| AD-1736053 | usasgua(Cda)AfuUfUfUfgagguauu | 1532 | VPusAfsaauAfcCfUfcaaaAfuGfuacuasasc | 1801 | GUUAGUACAUUUUGAGGUAUUUU | 2070 |
| | susa | | | | | |
| AD-1736054 | asasaug(Cda)UfaUfUfGfauaacagu | 1533 | VPusUfsacuGfuUfAfucaaUfaGfcauuusasc | 1802 | GUAAAUGCUAUUGAUAACAGUAA | 2071 |
| | sasa | | | | | |
| AD-1736055 | usasgcu(Gda)AfaUfUfUfgggacuau | 1534 | VPusCfsauaGfuCfCfcaaaUfuCfagcuasusc | 1803 | GAUAGCUGAAUUUGGGACUAUGU | 2072 |
| | sgsa | | | | | |
| AD-1736056 | asusugu(Gda)GfuUfUfUfcaaagaua | 1535 | VPusAfsuauCfuUfUfgaaaAfcCfacaausgsg | 1804 | CCAUUGUGGUUUUCAAAGAUAUU | 2073 |
| | susa | | | | | |
| AD-1736057 | cscsugg(Uda)UfgCfAfGfuaucugaa | 1536 | VPusUfsuucAfgAfUfacugCfaAfccaggsusu | 1805 | AACCUGGUUGCAGUAUCUGAAAA | 2074 |
| | sasa | | | | | |
| AD-1736058 | usasgaa(Uda)GfgUfUfGfuugagcua | 1537 | VPusUfsuagCfuCfAfacaaCfcAfuucuascsa | 1806 | UGUAGAAUGGUUGUUGAGCUAAG | 2075 |
| | sasa | | | | | |
| AD-1736059 | csusggc(Cda)AfuCfAfUfuauuacug | 1538 | VPusAfscagUfaAfUfaaugAfuGfgccagscsu | 1807 | AGCUGGCCAUCAUUAUUACUGUG | 2076 |
| | susa | | | | | |
| AD-1736060 | ususgac(Ada)GfaUfAfAfaauacgaa | 1539 | VPusCfsuucGfuAfUfuuuaUfcUfgucaasusu | 1808 | AAUUGACAGAUAAAAUACGAAGU | 2077 |
| | sgsa | | | | | |
| AD-1736061 | uscsaca(Ada)AfcAfCfAfucauuacas | 1540 | VPusUfsuguAfaUfGfauguGfuUfugugasasu | 1809 | AUUCACAAACACAUCAUUACAAG | 2078 |
| | asa | | | | | |
| AD-1736062 | cscsaug(Ada)UfuGfUfAfugaaaaua | 1541 | VPusCfsuauUfuUfCfauacAfaUfcauggsasa | 1810 | UUCCAUGAUUGUAUGAAAAUAGU | 2079 |
| | sgsa | | | | | |
| AD-1736063 | csascag(Ada)GfuAfAfUfgaauauuu | 1542 | VPusUfsaaaUfaUfUfcauuAfcUfcugugsusc | 1811 | GACACAGAGUAAUGAAUAUUUAA | 2080 |
| | sasa | | | | | |
| AD-1736064 | asgscug(Cda)UfuAfGfUfggaagaug | 1543 | VPusAfscauCfuUfCfcacuAfaGfcagcuscsc | 1812 | GGAGCUGCUUAGUGGAAGAUGUA | 2081 |
| | susa | | | | | |
| AD-1736065 | usasgcu(Cda)UfgUfGfUfgcugauac | 1544 | VPusGfsguaUfcAfGfcacaCfaGfagcuasgsa | 1813 | UCUAGCUCUGUGUGCUGAUACCU | 2082 |
| | scsa | | | | | |
| AD-1736066 | csasuuc(Gda)AfgAfGfAfauaugagc | 1545 | VPusAfsgcuCfaUfAfuucuCfuCfgaaugsusa | 1814 | UACAUUCGAGAGAAUAUGAGCUG | 2083 |
| | susa | | | | | |
| AD-1736067 | asusgca(Uda)UfuUfCfUfgaaaaugu | 1546 | VPusUfsacaUfuUfUfcagaAfaAfugcausasc | 1815 | GUAUGCAUUUUCUGAAAAUGUAU | 2084 |
| | sasa | | | | | |
| AD-1736068 | gsusuuc(Gda)AfcCfAfAfguauccca | 1547 | VPusUfsuggGfaUfAfcuugGfuCfgaaacsusu | 1816 | AAGUUUCGACCAAGUAUCCCAAA | 2085 |
| | sasa | | | | | |
| AD-1736069 | uscsuug(Cda)UfuGfCfCfacaauauc | 1548 | VPusCfsgauAfuUfGfuggcAfaGfcaagasusa | 1817 | UAUCUUGCUUGCCACAAUAUCGG | 2086 |
| | sgsa | | | | | |
| AD-1736070 | gsgsgua(Cda)AfaGfAfGfggaauaca | 1549 | VPusUfsuguAfuUfCfccucUfuGfuacccsgsa | 1818 | UCGGGUACAAGAGGGAAUACAAA | 2087 |
| | sasa | | | | | |
| AD-1736071 | gsgsuga(Uda)CfaAfAfUfccuguguc | 1550 | VPusAfsgacAfcAfGfgauuUfgAfucaccsusg | 1819 | CAGGUGAUCAAAUCCUGUGUCUC | 2088 |
| | susa | | | | | |
| AD-1736072 | csasgug(Gda)GfuUfUfCfuaggauag | 1551 | VPusCfscuaUfcCfUfagaaAfcCfcacugsusc | 1820 | GACAGUGGGUUUCUAGGAUAGGU | 2089 |
| | sgsa | | | | | |
| AD-1736073 | asascua(Ada)GfuAfUfUfuuuaagga | 1552 | VPusGfsuccUfuAfAfaaauAfcUfuaguusasc | 1821 | GUAACUAAGUAUUUUUAAGGACA | 2090 |
| | scsa | | | | | |
| AD-1736074 | csasuaa(Uda)GfuGfAfUfuguuaaau | 1553 | VPusAfsauuUfaAfCfaaucAfcAfuuaugsgsg | 1822 | CCCAUAAUGUGAUUGUUAAAUUU | 2091 |
| | susa | | | | | |
| AD-1736075 | gsasgaa(Gda)AfaUfUfAfagaaaacu | 1554 | VPusGfsaguUfuUfCfuuaaUfuCfuucucsasa | 1823 | UUGAGAAGAAUUAAGAAAACUCU | 2092 |
| | scsa | | | | | |
| AD-1736076 | gsasaga(Gda)AfaAfUfUfgauuguuu | 1555 | VPusUfsaaaCfaAfUfcaauUfuCfucuucsusc | 1824 | GAGAAGAGAAAUUGAUUGUUUAU | 2093 |
| | sasa | | | | | |
| AD-1736077 | asgsugu(Gda)AfaAfCfUfugugccau | 1556 | VPusUfsaugGfcAfCfaaguUfuCfacacususu | 1825 | AAAGUGUGAAACUUGUGCCAUAG | 2094 |
| | sasa | | | | | |
| AD-1736078 | csusgag(Ada)CfaCfUfGfagaaaugu | 1557 | VPusGfsacaUfuUfCfucagUfgUfcucagsgsa | 1826 | UCCUGAGACACUGAGAAAUGUCC | 2095 |
| | scsa | | | | | |
| AD-1736079 | usgsgcu(Uda)AfuAfUfGfuguuuaaa | 1558 | VPusCfsuuuAfaAfCfacauAfuAfagccasasu | 1827 | AUUGGCUUAUAUGUGUUUAAAGA | 2096 |
| | sgsa | | | | | |
| AD-1736080 | usgscau(Uda)UfuGfAfCfauugcaaa | 1559 | VPusUfsuuuGfcAfAfugucAfaAfaugcasasu | 1828 | AUUGCAUUUUGACAUUGCAAAAC | 2097 |
| | sasa | | | | | |
| AD-1736081 | ususagg(Uda)UfaGfAfAfguuccaga | 1560 | VPusUfsucuGfgAfAfcuucUfaAfccuaasusg | 1829 | CAUUAGGUUAGAAGUUCCAGAAU | 2098 |
| | sasa | | | | | |
| AD-1736082 | usgscga(Cda)AfuGfAfAfaacauccu | 1561 | VPusAfsaggAfuGfUfuuucAfuGfucgcasgsc | 1830 | GCUGCGACAUGAAAACAUCCUUG | 2099 |
| | susa | | | | | |
| AD-1736083 | gsasgag(Gda)AfuUfUfUfuuaccauc | 1562 | VPusAfsgauGfgUfAfaaaaAfuCfcucucsusu | 1831 | AAGAGAGGAUUUUUUACCAUCUC | 2100 |
| | susa | | | | | |
| AD-1736084 | gsasagg(Uda)GfaAfGfAfgaauuuca | 1563 | VPusUfsugaAfaUfUfcucuUfcAfccuucscsa | 1832 | UGGAAGGUGAAGAGAAUUUCAAA | 2101 |
| | sasa | | | | | |
| AD-1736085 | usgsgua(Uda)CfuGfAfAfuaucauga | 1564 | VPusUfsucaUfgAfUfauucAfgAfuaccasgsc | 1833 | GCUGGUAUCUGAAUAUCAUGAAC | 2102 |
| | sasa | | | | | |
| AD-1736086 | usgsuug(Gda)UfuUfAfAfuuuuuca | 1565 | VPusGfsuugAfaAfAfauuaAfaCfcaacasusg | 1834 | CAUGUUGGUUUAAUUUUUCAACC | 2103 |
| | ascsa | | | | | |
| AD-1736087 | usasguu(Gda)UfaAfUfUfuaaaugug | 1566 | VPusCfscacAfuUfUfaaauUfaCfaacuascsu | 1835 | AGUAGUUGUAAUUUAAAUGUGGA | 2104 |
| | sgsa | | | | | |
| AD-1736088 | gsusgaa(Uda)GfuUfUfUfugccauuu | 1567 | VPusAfsaaaUfgGfCfaaaaAfcAfuucacsasu | 1836 | AUGUGAAUGUUUUUGCCAUUUUU | 2105 |
| | susa | | | | | |
| AD-1736089 | csasgag(Ada)UfgAfUfUfuuucuuuu | 1568 | VPusUfsaaaAfgAfAfaaauCfaUfcucugscsc | 1837 | GGCAGAGAUGAUUUUUCUUUUAA | 2106 |
| | sasa | | | | | |
| AD-1736090 | asgsaaa(Ada)UfuAfGfAfuucagauc | 1569 | VPusAfsgauCfuGfAfaucuAfaUfuuucusgsu | 1838 | ACAGAAAAUUAGAUUCAGAUCUC | 2107 |
| | susa | | | | | |
| AD-1736091 | ascsugg(Ada)AfaAfUfUfaagaaagu | 1570 | VPusUfsacuUfuCfUfuaauUfuUfccagusgsg | 1839 | CCACUGGAAAAUUAAGAAAGUAG | 2108 |
| | sasa | | | | | |
| AD-1736092 | usasaag(Uda)GfgGfAfAfagauaaua | 1571 | VPusUfsuauUfaUfCfuuucCfcAfcuuuascsa | 1840 | UGUAAAGUGGGAAAGAUAAUAAA | 2109 |
| | sasa | | | | | |
| AD-1736093 | csusagg(Cda)UfaAfGfAfaagaguug | 1572 | VPusAfscaaCfuCfUfuucuUfaGfccuagsusu | 1841 | AACUAGGCUAAGAAAGAGUUGUA | 2110 |
| | susa | | | | | |
| AD-1736094 | gscsuga(Uda)AfaAfAfUfuaauggau | 1573 | VPusUfsaucCfaUfUfaauuUfuAfucagcsasc | 1842 | GUGCUGAUAAAAUUAAUGGAUAA | 2111 |
| | sasa | | | | | |
| AD-1736095 | cscsugu(Ada)UfuUfCfUfuuaguugu | 1574 | VPusGfsacaAfcUfAfaagaAfaUfacaggsasa | 1843 | UUCCUGUAUUUCUUUAGUUGUCG | 2112 |
| | scsa | | | | | |
| AD-1736096 | ususugu(Uda)UfuGfCfUfuuugacaa | 1575 | VPusUfsuugUfcAfAfaagcAfaAfacaaasgsc | 1844 | GCUUUGUUUUGCUUUUGACAAAC | 2113 |
| | sasa | | | | | |
| AD-1736097 | usgsgcu(Gda)UfgAfAfAfauauucuc | 1576 | VPusGfsgagAfaUfAfuuuuCfaCfagccascsa | 1845 | UGUGGCUGUGAAAAUAUUCUCCU | 2114 |
| | scsa | | | | | |
| AD-1736098 | ascsuau(Uda)UfuAfGfGfcauagcac | 1577 | VPusAfsgugCfuAfUfgccuAfaAfauagusgsc | 1846 | GCACUAUUUUAGGCAUAGCACUU | 2115 |
| | susa | | | | | |
| AD-1736099 | ususuca(Gda)UfaCfUfGfuauaaagu | 1578 | VPusCfsacuUfuAfUfacagUfaCfugaaasasu | 1847 | AUUUUCAGUACUGUAUAAAGUGG | 2116 |
| | sgsa | | | | | |
| AD-1736100 | gsusgau(Gda)CfaAfUfCfuauguuuc | 1579 | VPusGfsgaaAfcAfUfagauUfgCfaucacscsu | 1848 | AGGUGAUGCAAUCUAUGUUUCCC | 2117 |
| | scsa | | | | | |
| AD-1736101 | usgsuuu(Gda)GfcAfGfAfucucauca | 1580 | VPusUfsugaUfgAfGfaucuGfcCfaaacasusu | 1849 | AAUGUUUGGCAGAUCUCAUCAAU | 2118 |
| | sasa | | | | | |
| AD-1736102 | asasggu(Uda)GfuUfUfGfugaccaga | 1581 | VPusUfsucuGfgUfCfacaaAfcAfaccuususc | 1850 | GAAAGGUUGUUUGUGACCAGAAG | 2119 |
| | sasa | | | | | |
| AD-1736103 | gsgsaag(Gda)AfaAfUfAfuuuugaga | 1582 | VPusUfsucuCfaAfAfauauUfuCfcuuccsusu | 1851 | AAGGAAGGAAAUAUUUUGAGAAU | 2120 |
| | sasa | | | | | |
| AD-1736104 | ususuug(Gda)UfaGfCfGfugacucuu | 1583 | VPusGfsaagAfgUfCfacgcUfaCfcaaaasgsa | 1852 | UCUUUUGGUAGCGUGACUCUUCU | 2121 |
| | scsa | | | | | |
| AD-1736105 | usgsaac(Ada)GfgAfAfAfagauguaa | 1584 | VPusUfsuuaCfaUfCfuuuuCfcUfguucasusu | 1853 | AAUGAACAGGAAAAGAUGUAAAA | 2122 |
| | sasa | | | | | |
| AD-1736106 | gsgsgaa(Cda)CfaAfGfAfgguauaug | 1585 | VPusCfscauAfuAfCfcucuUfgGfuucccsasc | 1854 | GUGGGAACCAAGAGGUAUAUGGC | 2123 |
| | sgsa | | | | | |
| AD-1736107 | usgsgca(Cda)UfaGfGfUfccaaaucu | 1586 | VPusAfsagaUfuUfGfgaccUfaGfugccasgsu | 1855 | ACUGGCACUAGGUCCAAAUCUUG | 2124 |
| | susa | | | | | |
| AD-1736108 | csascac(Cda)UfuCfAfUfauggagau | 1587 | VPusAfsaucUfcCfAfuaugAfaGfgugugscsc | 1856 | GGCACACCUUCAUAUGGAGAUUG | 2125 |
| | susa | | | | | |
| AD-1736109 | csusggu(Uda)UfaCfUfGfggaaauag | 1588 | VPusGfscuaUfuUfCfccagUfaAfaccagsasc | 1857 | GUCUGGUUUACUGGGAAAUAGCC | 2126 |
| | scsa | | | | | |
| AD-1736110 | gscscca(Ada)AfgGfAfAfuguauaua | 1589 | VPusUfsuauAfuAfCfauucCfuUfugggcscsu | 1858 | AGGCCCAAAGGAAUGUAUAUAAG | 2127 |
| | sasa | | | | | |
| AD-1736111 | ususaac(Uda)GfcAfAfGfaguuuacu | 1590 | VPusCfsaguAfaAfCfucuuGfcAfguuaasasa | 1859 | UUUUAACUGCAAGAGUUUACUGU | 2128 |
| | sgsa | | | | | |
| AD-1736112 | gsasacc(Ada)CfuCfUfCfugagugca | 1591 | VPusUfsugcAfcUfCfagagAfgUfgguucscsu | 1860 | AGGAACCACUCUCUGAGUGCAAU | 2129 |
| | sasa | | | | | |
| AD-1736113 | ususauc(Uda)UfuUfCfAfuccuggca | 1592 | VPusAfsugcCfaGfGfaugaAfaAfgauaasasg | 1861 | CUUUAUCUUUUCAUCCUGGCAUU | 2130 |
| | susa | | | | | |
| AD-1736114 | gsusgag(Uda)GfuUfGfGfuaugccaa | 1593 | VPusGfsuugGfcAfUfaccaAfcAfcucacsgsc | 1862 | GCGUGAGUGUUGGUAUGCCAACG | 2131 |
| | scsa | | | | | |
| AD-1736115 | asgsaau(Gda)UfaUfUfUfggcuaaau | 1594 | VPusUfsauuUfaGfCfcaaaUfaCfauucuscsa | 1863 | UGAGAAUGUAUUUGGCUAAAUAA | 2132 |
| | sasa | | | | | |
| AD-1736116 | gsasacc(Cda)UfuUfUfAfuuaagagg | 1595 | VPusUfsccuCfuUfAfauaaAfaGfgguucscsa | 1864 | UGGAACCCUUUUAUUAAGAGGAG | 2133 |
| | sasa | | | | | |
| AD-1736117 | csusccu(Gda)UfcCfAfUfagcugcga | 1596 | VPusAfsucgCfaGfCfuaugGfaCfaggagsgsc | 1865 | GCCUCCUGUCCAUAGCUGCGAUG | 2134 |
| | susa | | | | | |
| AD-1736118 | ascsuga(Gda)UfuGfAfAfauaaggaa | 1597 | VPusCfsuucCfuUfAfuuucAfaCfucagusasa | 1866 | UUACUGAGUUGAAAUAAGGAAGG | 2135 |
| | sgsa | | | | | |
| AD-1736119 | csusgcc(Ada)AfaCfAfGfaaggagca | 1598 | VPusAfsugcUfcCfUfucugUfuUfggcagsgsu | 1867 | ACCUGCCAAACAGAAGGAGCAUG | 2136 |
| | susa | | | | | |
| AD-1736120 | gsgscaa(Ada)GfuUfGfUfgaagcacu | 1599 | VPusGfsaguGfcUfUfcacaAfcUfuugccsasc | 1868 | GUGGCAAAGUUGUGAAGCACUCC | 2137 |
| | scsa | | | | | |
| AD-1736121 | asusagg(Ada)UfgAfUfGfaaguuuag | 1600 | VPusUfscuaAfaCfUfucauCfaUfccuaususu | 1869 | AAAUAGGAUGAUGAAGUUUAGAG | 2138 |
| | sasa | | | | | |
| AD-1736122 | asusucg(Uda)AfuCfUfUfaaaauggc | 1601 | VPusUfsgccAfuUfUfuaagAfuAfcgaausasc | 1870 | GUAUUCGUAUCUUAAAAUGGCAC | 2139 |
| | sasa | | | | | |
| AD-1736123 | csascag(Cda)UfuGfGfGfuaauagcg | 1602 | VPusAfscgcUfaUfUfacccAfaGfcugugscsu | 1871 | AGCACAGCUUGGGUAAUAGCGUU | 2140 |
| | susa | | | | | |
| AD-1736124 | ususugc(Ada)AfcAfAfCfauaacacu | 1603 | VPusCfsaguGfuUfAfuguuGfuUfgcaaasasa | 1872 | UUUUUGCAACAACAUAACACUGC | 2141 |
| | sgsa | | | | | |
| AD-1736125 | usgscca(Cda)CfaUfGfUfgacuuauu | 1604 | VPusCfsaauAfaGfUfcacaUfgGfuggcasasa | 1873 | UUUGCCACCAUGUGACUUAUUGG | 2142 |
| | sgsa | | | | | |
| AD-1736126 | uscsgau(Ada)GfaGfGfAfaaugagaa | 1605 | VPusUfsuucUfcAfUfuuccUfcUfaucgasgsg | 1874 | CCUCGAUAGAGGAAAUGAGAAAG | 2143 |
| | sasa | | | | | |
| AD-1736127 | ususuuu(Ada)AfgUfUfAfgcaggacu | 1606 | VPusAfsaguCfcUfGfcuaaCfuUfaaaaasgsg | 1875 | CCUUUUUAAGUUAGCAGGACUUU | 2144 |
| | susa | | | | | |
| AD-1736128 | usgsuaa(Ada)UfaAfUfUfaucugccu | 1607 | VPusUfsaggCfaGfAfuaauUfaUfuuacasusc | 1876 | GAUGUAAAUAAUUAUCUGCCUAA | 2145 |
| | sasa | | | | | |
| AD-1736129 | usgsguu(Gda)UfaCfGfUfgccucaaa | 1608 | VPusAfsuuuGfaGfGfcacgUfaCfaaccasusa | 1877 | UAUGGUUGUACGUGCCUCAAAUA | 2146 |
| | susa | | | | | |

TABLE 6
Unmodified Sense and Antisense Strand Sequences of ACVR1C dsRNA Agents Comprising a GalNAc
Derivative Targeting Ligand

| | | SEQ | Range in | | SEQ | Range in |
|---|---|---|---|---|---|---|
| Duplex | Sense Sequence | ID | NM_ | Antisense Sequence | ID | NM_ |
| Name | 5′ to 3′ | NO: | 145259.3 | 5′ to 3′ | NO: | 145259.3 |
| AD-1736131 | UUUUUUCAAACUCCAUUCCUA | 802 | 3085-3105 | UAGGAAUGGAGUUUGAAAAAAGA | 1071 | 3083-3105 |
| AD-1736132 | ACUUUCAUCUGUCUUCAGAUA | 803 | 8677-8697 | UAUCUGAAGACAGAUGAAAGUUA | 1072 | 8675-8697 |
| AD-1736133 | CCUCAUAACUUCUCCAGUAAA | 804 | 6745-6765 | UUUACUGGAGAAGUUAUGAGGUG | 1073 | 6743-6765 |
| AD-1736134 | CUCACUAUCUUUCAACAUUAA | 805 | 5871-5891 | UUAAUGUUGAAAGAUAGUGAGGG | 1074 | 5869-5891 |
| AD-1736135 | CUCGUUAAUGCUCUCAUCCAA | 806 | 3562-3582 | UUGGAUGAGAGCAUUAACGAGUA | 1075 | 3560-3582 |
| AD-1736136 | GUUCUUCAUAAUCCACUACUA | 807 | 2292-2312 | UAGUAGUGGAUUAUGAAGAACAG | 1076 | 2290-2312 |
| AD-1736137 | GUUGACUUCAUCCAAUCUCUA | 808 | 1876-1896 | UAGAGAUUGGAUGAAGUCAACUC | 1077 | 1874-1896 |
| AD-1736138 | CUACACAAUGAACUUCUUAAA | 809 | 6692-6712 | UUUAAGAAGUUCAUUGUGUAGAA | 1078 | 6690-6712 |
| AD-1736139 | CACAUCUAGAAUUCUUAAUUA | 810 | 4835-4855 | UAAUUAAGAAUUCUAGAUGUGAC | 1079 | 4833-4855 |
| AD-1736140 | AAAUCUCUCAUAGCUUUCUUA | 811 | 1725-1745 | UAAGAAAGCUAUGAGAGAUUUCU | 1080 | 1723-1745 |
| AD-1736141 | CCUACUAUUGUAGAAUUACUA | 812 | 5093-5113 | UAGUAAUUCUACAAUAGUAGGUG | 1081 | 5091-5113 |
| AD-1736142 | AUCUUCUUUUAGUGCAUUAAA | 813 | 6589-6609 | UUUAAUGCACUAAAAGAAGAUGA | 1082 | 6587-6609 |
| AD-1736143 | CUCAUGUACUCUUCUGAUUCA | 814 | 7977-7997 | UGAAUCAGAAGAGUACAUGAGCU | 1083 | 7975-7997 |
| AD-1736144 | UUUCUCUUUGUACCUUGGAAA | 815 | 6449-6469 | UUUCCAAGGUACAAAGAGAAAGA | 1084 | 6447-6469 |
| AD-1736145 | UGGCUUAUACAUCUUCAGAAA | 816 | 7515-7535 | UUUCUGAAGAUGUAUAAGCCAGA | 1085 | 7513-7535 |
| AD-1736146 | CAAAACAAAACUACUCCUAUA | 817 | 5120-5140 | UAUAGGAGUAGUUUUGUUUUGUU | 1086 | 5118-5140 |
| AD-1736147 | ACUAGCAGAACUCUUAUGAAA | 818 | 6055-6075 | UUUCAUAAGAGUUCUGCUAGUAA | 1087 | 6053-6075 |
| AD-1736148 | CCAAGUCACUCUAUAAUUCCA | 819 | 6635-6655 | UGGAAUUAUAGAGUGACUUGGGA | 1088 | 6633-6655 |
| AD-1736149 | UCCAUUUUUCUUGUCAUUAUA | 820 | 4114-4134 | UAUAAUGACAAGAAAAAUGGAGA | 1089 | 4112-4134 |
| AD-1736150 | CAACACCUCAACUCAUCUUUA | 821 | 1923-1943 | UAAAGAUGAGUUGAGGUGUUGCU | 1090 | 1921-1943 |
| AD-1736151 | ACUCUGAAAGAUCUGAUUUAA | 822 | 716-736 | UUAAAUCAGAUCUUUCAGAGUUU | 1091 | 714-736 |
| AD-1736152 | CUAGUUCUUUUCCGCAAUGAA | 823 | 7946-7966 | UUCAUUGCGGAAAAGAACUAGAA | 1092 | 7944-7966 |
| AD-1736153 | CUUUCACUCUGAAGAAAUCCA | 824 | 4189-4209 | UGGAUUUCUUCAGAGUGAAAGUU | 1093 | 4187-4209 |
| AD-1736154 | UCUAACUUUUCUCUCUUUCUA | 825 | 6525-6545 | UAGAAAGAGAGAAAAGUUAGAUA | 1094 | 6523-6545 |
| AD-1736155 | UCUCAACUUUGUGUCAAAGAA | 826 | 1667-1687 | UUCUUUGACACAAAGUUGAGAUA | 1095 | 1665-1687 |
| AD-1736156 | CUUCAAUAAUCAUUCCUUUAA | 827 | 5445-5465 | UUAAAGGAAUGAUUAUUGAAGAC | 1096 | 5443-5465 |
| AD-1736157 | UAACUGCUCUUCGUAUUAAGA | 828 | 1638-1658 | UCUUAAUACGAAGAGCAGUUAGG | 1097 | 1636-1658 |
| AD-1736158 | UCUUCUGUCAUAGUUCCAACA | 829 | 438-458 | UGUUGGAACUAUGACAGAAGACU | 1098 | 436-458 |
| AD-1736159 | AUCUCAGAACCAUAUCUGUUA | 830 | 2584-2604 | UAACAGAUAUGGUUCUGAGAUUU | 1099 | 2582-2604 |
| AD-1736160 | UGAAUCUAUCUUCAUUUUACA | 831 | 3483-3503 | UGUAAAAUGAAGAUAGAUUCAGU | 1100 | 3481-3503 |
| AD-1736161 | ACCACUAAACUUGUUCCUUUA | 832 | 2326-2346 | UAAAGGAACAAGUUUAGUGGUUC | 1101 | 2324-2346 |
| AD-1736162 | AGUGUUCUUUACUCCUUACAA | 833 | 4578-4598 | UUGUAAGGAGUAAAGAACACUGA | 1102 | 4576-4598 |
| AD-1736163 | CUUUACUCUUAACAGGAUUAA | 834 | 4367-4387 | UUAAUCCUGUUAAGAGUAAAGGA | 1103 | 4365-4387 |
| AD-1736164 | UAUACCUAAGAACAUAUUACA | 835 | 8153-8173 | UGUAAUAUGUUCUUAGGUAUAAG | 1104 | 8151-8173 |
| AD-1736165 | CUUCUACUGAGAUGAUCCAAA | 836 | 3114-3134 | UUUGGAUCAUCUCAGUAGAAGAA | 1105 | 3112-3134 |
| AD-1736166 | CUGUAUUUUCUCAUAGAGUAA | 837 | 3420-3440 | UUACUCUAUGAGAAAAUACAGAA | 1106 | 3418-3440 |
| AD-1736167 | ACUUUUCUCUUUCAGUUGUAA | 838 | 7116-7136 | UUACAACUGAAAGAGAAAAGUAU | 1107 | 7114-7136 |
| AD-1736168 | AUUAAUUUCUAGUCUGUGAAA | 839 | 8493-8513 | UUUCACAGACUAGAAAUUAAUGA | 1108 | 8491-8513 |
| AD-1736169 | CUCUGUAUAAGAGGUUUCACA | 840 | 6726-6746 | UGUGAAACCUCUUAUACAGAGAA | 1109 | 6724-6746 |
| AD-1736170 | GACUUUCAAAGUACUAAUACA | 841 | 8098-8118 | UGUAUUAGUACUUUGAAAGUCAA | 1110 | 8096-8118 |
| AD-1736171 | UUUGCCAUUAUACAAAGUUUA | 842 | 5262-5282 | UAAACUUUGUAUAAUGGCAAACA | 1111 | 5260-5282 |
| AD-1736172 | GAACACUAUCGACAUACCUCA | 843 | 1276-1296 | UGAGGUAUGUCGAUAGUGUUCAG | 1112 | 1274-1296 |
| AD-1736173 | UAGAAUGACAUUUACUAAUAA | 844 | 7818-7838 | UUAUUAGUAAAUGUCAUUCUACG | 1113 | 7816-7838 |
| AD-1736174 | AAGCUACUUAGAAAUGUUUAA | 845 | 5491-5511 | UUAAACAUUUCUAAGUAGCUUGU | 1114 | 5489-5511 |
| AD-1736175 | CCUUAGUACUCUCAGAGAUUA | 846 | 5968-5988 | UAAUCUCUGAGAGUACUAAGGGA | 1115 | 5966-5988 |
| AD-1736176 | UGAAUGCACACUAACGUAAUA | 847 | 6163-6183 | UAUUACGUUAGUGUGCAUUCAAG | 1116 | 6161-6183 |
| AD-1736177 | AAGCCUAAUGAUGAUAAUUAA | 848 | 1695-1715 | UUAAUUAUCAUCAUUAGGCUUUG | 1117 | 1693-1715 |
| AD-1736178 | AAACUUUUUACUAUCCCAUAA | 849 | 3341-3361 | UUAUGGGAUAGUAAAAAGUUUCC | 1118 | 3339-3361 |
| AD-1736179 | CUAGCUGAUACUCUUAAGUAA | 850 | 8268-8288 | UUACUUAAGAGUAUCAGCUAGCU | 1119 | 8266-8288 |
| AD-1736180 | AGCAUGAAAAGAUAACUCUAA | 851 | 1837-1857 | UUAGAGUUAUCUUUUCAUGCUGC | 1120 | 1835-1857 |
| AD-1736181 | UAAGCCAUUAUGCUAUUAGUA | 852 | 7017-7037 | UACUAAUAGCAUAAUGGCUUAGU | 1121 | 7015-7037 |
| AD-1736182 | UCUAGCUUUUAGCUAACAUAA | 853 | 6850-6870 | UUAUGUUAGCUAAAAGCUAGAAU | 1122 | 6848-6870 |
| AD-1736183 | GUGUGAUUCUUCAAACUUCAA | 854 | 316-336 | UUGAAGUUUGAAGAAUCACACAA | 1123 | 314-336 |
| AD-1736184 | UCUCCAGACCUAACAGUUUUA | 855 | 7247-7267 | UAAAACUGUUAGGUCUGGAGAGA | 1124 | 7245-7267 |
| AD-1736185 | CUUUUUUUCAUCUAGCCUUGA | 856 | 5808-5828 | UCAAGGCUAGAUGAAAAAAAGAA | 1125 | 5806-5828 |
| AD-1736186 | CAAAAUAAUUCUUGACAUCUA | 857 | 7552-7572 | UAGAUGUCAAGAAUUAUUUUGAC | 1126 | 7550-7572 |
| AD-1736187 | GCAUCACUUUCUGAAAAUAAA | 858 | 4690-4710 | UUUAUUUUCAGAAAGUGAUGCUG | 1127 | 4688-4710 |
| AD-1736188 | UCUUUUGUGAAACAUACUAUA | 859 | 5563-5583 | UAUAGUAUGUUUCACAAAAGAUG | 1128 | 5561-5583 |
| AD-1736189 | CUAUUUCUUCCAUAGGCUAAA | 860 | 7841-7861 | UUUAGCCUAUGGAAGAAAUAGAA | 1129 | 7839-7861 |
| AD-1736190 | CUUCAAUGAAGUGUUAACAAA | 861 | 2839-2859 | UUUGUUAACACUUCAUUGAAGAG | 1130 | 2837-2859 |
| AD-1736191 | UUUGCCUUCAUUCUACUUUCA | 862 | 2952-2972 | UGAAAGUAGAAUGAAGGCAAAAC | 1131 | 2950-2972 |
| AD-1736192 | AGGUUUUUAAAUGUCCUAAAA | 863 | 8035-8055 | UUUUAGGACAUUUAAAAACCUGA | 1132 | 8033-8055 |
| AD-1736193 | GAAUAUCUUUGAGUCCUUCAA | 864 | 1360-1380 | UUGAAGGACUCAAAGAUAUUCAC | 1133 | 1358-1380 |
| AD-1736194 | GAACACUUCCAAAGAUUAAUA | 865 | 2666-2686 | UAUUAAUCUUUGGAAGUGUUCAG | 1134 | 2664-2686 |
| AD-1736195 | CUAAAUUUUGUCUAACAAAUA | 866 | 7791-7811 | UAUUUGUUAGACAAAAUUUAGGC | 1135 | 7789-7811 |
| AD-1736196 | GUAAACAACUUAAAAUUGCUA | 867 | 5284-5304 | UAGCAAUUUUAAGUUGUUUACUC | 1136 | 5282-5304 |
| AD-1736197 | AAAAUAAUUUACUCACUCAGA | 868 | 6233-6253 | UCUGAGUGAGUAAAUUAUUUUAG | 1137 | 6231-6253 |
| AD-1736198 | GACAUCUAUUCUGUUGGUCUA | 869 | 1388-1408 | UAGACCAACAGAAUAGAUGUCAG | 1138 | 1386-1408 |
| AD-1736199 | UAACUGAGUAGUCUUAUAUUA | 870 | 4267-4287 | UAAUAUAAGACUACUCAGUUAGG | 1139 | 4265-4287 |
| AD-1736200 | UCUGGAAUUUAGCCUUCUAAA | 871 | 5936-5956 | UUUAGAAGGCUAAAUUCCAGACG | 1140 | 5934-5956 |
| AD-1736201 | ACAUGCCUUGAACUCUUGAAA | 872 | 8207-8227 | UUUCAAGAGUUCAAGGCAUGUUU | 1141 | 8205-8227 |
| AD-1736202 | AUCAAGCACUUCUUGCACUUA | 873 | 8782-8802 | UAAGUGCAAGAAGUGCUUGAUUU | 1142 | 8780-8802 |
| AD-1736203 | CUUGCUUUUCAUCUUUAUACA | 874 | 4915-4935 | UGUAUAAAGAUGAAAAGCAAGUG | 1143 | 4913-4935 |
| AD-1736204 | UUUUCUCCCUAUGUAAUAUCA | 875 | 2493-2513 | UGAUAUUACAUAGGGAGAAAAGC | 1144 | 2491-2513 |
| AD-1736205 | UGCUUUCUUCUAUGUCUAAAA | 876 | 4802-4822 | UUUUAGACAUAGAAGAAAGCAUA | 1145 | 4800-4822 |
| AD-1736206 | ACCUGCUUAGCAAAUCGUCUA | 877 | 5224-5244 | UAGACGAUUUGCUAAGCAGGUUC | 1146 | 5222-5244 |
| AD-1736207 | AUAUUCCUCUACCCUUUCACA | 878 | 2895-2915 | UGUGAAAGGGUAGAGGAAUAUCU | 1147 | 2893-2915 |
| AD-1736208 | UCCCACUUUUCUUUGGGUUUA | 879 | 6208-6228 | UAAACCCAAAGAAAAGUGGGAUU | 1148 | 6206-6228 |
| AD-1736209 | AGGCUUCUUGUAUAUACUUAA | 880 | 4442-4462 | UUAAGUAUAUACAAGAAGCCUGC | 1149 | 4440-4462 |
| AD-1736210 | AAACUUGAUCUGUGUUUCAGA | 881 | 8017-8037 | UCUGAAACACAGAUCAAGUUUGA | 1150 | 8015-8037 |
| AD-1736211 | UUUGCUUUAAUGCUAAAUUCA | 882 | 6885-6905 | UGAAUUUAGCAUUAAAGCAAAAG | 1151 | 6883-6905 |
| AD-1736212 | AGACUAGCUGUUAUUUGUAUA | 883 | 6830-6850 | UAUACAAAUAACAGCUAGUCUUU | 1152 | 6828-6850 |
| AD-1736213 | UUCCUACUUUCCCUUGAAUAA | 884 | 2469-2489 | UUAUUCAAGGGAAAGUAGGAAGC | 1153 | 2467-2489 |
| AD-1736214 | CAGAACUGAAUGCUCAAGUCA | 885 | 420-440 | UGACUUGAGCAUUCAGUUCUGGA | 1154 | 418-440 |
| AD-1736215 | UCUUGUUACUAAUUUCUCAUA | 886 | 3945-3965 | UAUGAGAAAUUAGUAACAAGAAC | 1155 | 3943-3965 |
| AD-1736216 | CUCAGUGAUAGCCUUUAUACA | 887 | 8586-8606 | UGUAUAAAGGCUAUCACUGAGUU | 1156 | 8584-8606 |
| AD-1736217 | UUUUAUGCUCCUAAAACAUCA | 888 | 3065-3085 | UGAUGUUUUAGGAGCAUAAAAGA | 1157 | 3063-3085 |
| AD-1736218 | UUCUCCUUAGGUUAUGUUCAA | 889 | 4551-4571 | UUGAACAUAACCUAAGGAGAAUU | 1158 | 4549-4571 |
| AD-1736219 | AUUGCUCAUCGAGACAUAAAA | 890 | 1175-1195 | UUUUAUGUCUCGAUGAGCAAUAG | 1159 | 1173-1195 |
| AD-1736220 | CCUUUGUACAUACACACUUAA | 891 | 2746-2766 | UUAAGUGUGUAUGUACAAAGGAA | 1160 | 2744-2766 |
| AD-1736221 | UUGAACCAAGAGCACAUGAAA | 892 | 2025-2045 | UUUCAUGUGCUCUUGGUUCAAGU | 1161 | 2023-2045 |
| AD-1736222 | UCAGGGAUUUUAAAGUCUAAA | 893 | 3668-3688 | UUUAGACUUUAAAAUCCCUGAGG | 1162 | 3666-3688 |
| AD-1736223 | UACUUGCUUAUAAAGUGAUAA | 894 | 3153-3173 | UUAUCACUUUAUAAGCAAGUACC | 1163 | 3151-3173 |
| AD-1736224 | AUGCAUCUAAACCUACCUUGA | 895 | 6145-6165 | UCAAGGUAGGUUUAGAUGCAUGC | 1164 | 6143-6165 |
| AD-1736225 | UUGGGAAAACACUAUUAUGAA | 896 | 4629-4649 | UUCAUAAUAGUGUUUUCCCAAGU | 1165 | 4627-4649 |
| AD-1736226 | AAACUCCAAAGAGAAAUGAAA | 897 | 8456-8476 | UUUCAUUUCUCUUUGGAGUUUGA | 1166 | 8454-8476 |
| AD-1736227 | AUGGGCAUUUUUCAAAACAUA | 898 | 5758-5778 | UAUGUUUUGAAAAAUGCCCAUAU | 1167 | 5756-5778 |
| AD-1736228 | AUAAUGGAACUUGGACUCAAA | 899 | 996-1016 | UUUGAGUCCAAGUUCCAUUAUCU | 1168 | 994-1016 |
| AD-1736229 | UGUGUAGAUGACGAAACCAAA | 900 | 6008-6028 | UUUGGUUUCGUCAUCUACACAAA | 1169 | 6006-6028 |
| AD-1736230 | UUCUACCUCAAAGAUAAGACA | 901 | 1790-1810 | UGUCUUAUCUUUGAGGUAGAACA | 1170 | 1788-1810 |
| AD-1736231 | AGAAGGCAUAUUGAGUUAUUA | 902 | 2536-2556 | UAAUAACUCAAUAUGCCUUCUAA | 1171 | 2534-2556 |
| AD-1736232 | AUGGAGUUUUUCUGCUAUUUA | 903 | 5629-5649 | UAAAUAGCAGAAAAACUCCAUGU | 1172 | 5627-5649 |
| AD-1736233 | UCAGUUUCUCAUUAGUUUGUA | 904 | 6558-6578 | UACAAACUAAUGAGAAACUGAGG | 1173 | 6556-6578 |
| AD-1736234 | CUGCAUAUAUAAGAACGAAAA | 905 | 3976-3996 | UUUUCGUUCUUAUAUAUGCAGAA | 1174 | 3974-3996 |
| AD-1736235 | UGAGCCAAAAUAUUAAAUUCA | 906 | 7927-7947 | UGAAUUUAAUAUUUUGGCUCAGA | 1175 | 7925-7947 |
| AD-1736236 | AGAAUGAUAUUUCCUGUUUUA | 907 | 4035-4055 | UAAAACAGGAAAUAUCAUUCUUG | 1176 | 4033-4055 |
| AD-1736237 | GUGCUCUAUAUAAAUCUUCCA | 908 | 7385-7405 | UGGAAGAUUUAUAUAGAGCACAA | 1177 | 7383-7405 |
| AD-1736238 | UUUACAGAGAAGCAUCUUAUA | 909 | 7468-7488 | UAUAAGAUGCUUCUCUGUAAAAU | 1178 | 7466-7488 |
| AD-1736239 | GUCUUGAGUUCUGCAUGACAA | 910 | 3761-3781 | UUGUCAUGCAGAACUCAAGACAU | 1179 | 3759-3781 |
| AD-1736240 | CUUCAAAUCUAUAAUUUUACA | 911 | 3017-3037 | UGUAAAAUUAUAGAUUUGAAGGG | 1180 | 3015-3037 |
| AD-1736241 | GAAGCAUAUAGAACUCUAUUA | 912 | 8810-8830 | UAAUAGAGUUCUAUAUGCUUCAC | 1181 | 8808-8830 |
| AD-1736242 | GAGCUGCUUCUAAAUAACAAA | 913 | 5678-5698 | UUUGUUAUUUAGAAGCAGCUCUC | 1182 | 5676-5698 |
| AD-1736243 | UGACUGUAUUUCCUGAUCAUA | 914 | 7197-7217 | UAUGAUCAGGAAAUACAGUCACA | 1183 | 7195-7217 |
| AD-1736244 | GUUCUGAAGGAUAUACUUCUA | 915 | 3402-3422 | UAGAAGUAUAUCCUUCAGAACGC | 1184 | 3400-3422 |
| AD-1736245 | GUGAAGCAUGAUUCAAUACUA | 916 | 1256-1276 | UAGUAUUGAAUCAUGCUUCACAG | 1185 | 1254-1276 |
| AD-1736246 | AAUGCUGCUUCACAGAUUUUA | 917 | 474-494 | UAAAAUCUGUGAAGCAGCAUUCG | 1186 | 472-494 |
| AD-1736247 | UGUGGGUUAUGUUAAUCUGAA | 918 | 7283-7303 | UUCAGAUUAACAUAACCCACAGU | 1187 | 7281-7303 |
| AD-1736248 | GAGUACAGAAGAAUGCUCAUA | 919 | 2926-2946 | UAUGAGCAUUCUUCUGUACUCAC | 1188 | 2924-2946 |
| AD-1736249 | CUGUAUUUCAUCCUAGAUUUA | 920 | 7162-7182 | UAAAUCUAGGAUGAAAUACAGCU | 1189 | 7160-7182 |
| AD-1736250 | AAUCUGGUAAAUGCUGGAAAA | 921 | 695-715 | UUUUCCAGCAUUUACCAGAUUGC | 1190 | 693-715 |
| AD-1736251 | UGCUCAGAUUACCUGAUCGUA | 922 | 3293-3313 | UACGAUCAGGUAAUCUGAGCAAU | 1191 | 3291-3313 |
| AD-1736252 | GACAGCUAUGGAGUUUGCGUA | 923 | 3531-3551 | UACGCAAACUCCAUAGCUGUCAG | 1192 | 3529-3551 |
| AD-1736253 | UAGAACAUGCUCACUUACAAA | 924 | 4391-4411 | UUUGUAAGUGAGCAUGUUCUAUA | 1193 | 4389-4411 |
| AD-1736254 | AUUAUGCUUCAUUUCACUAUA | 925 | 3450-3470 | UAUAGUGAAAUGAAGCAUAAUCA | 1194 | 3448-3470 |
| AD-1736255 | CAACAGCAAGUCAUAAAAGUA | 926 | 8624-8644 | UACUUUUAUGACUUGCUGUUGGU | 1195 | 8622-8644 |
| AD-1736256 | UUGUCUGAAAAUGUCUUUAAA | 927 | 2702-2722 | UUUAAAGACAUUUUCAGACAAUG | 1196 | 2700-2722 |
| AD-1736257 | UGUUGGUUCAAAGGACAAUUA | 928 | 774-794 | UAAUUGUCCUUUGAACCAACAGA | 1197 | 772-794 |
| AD-1736258 | UCUAAACUUUAAUAUAUCGAA | 929 | 2190-2210 | UUCGAUAUAUUAAAGUUUAGAGC | 1198 | 2188-2210 |
| AD-1736259 | AAGUGAAACAUGACUGUCGUA | 930 | 4875-4895 | UACGACAGUCAUGUUUCACUUAA | 1199 | 4873-4895 |
| AD-1736260 | AUCGUCCAUACAGUUUUCAUA | 931 | 7719-7739 | UAUGAAAACUGUAUGGACGAUAU | 1200 | 7717-7739 |
| AD-1736261 | CUUCAGGAAAUAGUAGGAAAA | 932 | 809-829 | UUUUCCUACUAUUUCCUGAAGCA | 1201 | 807-829 |
| AD-1736262 | CACCCUUUCUGUAAGGACUGA | 933 | 6426-6446 | UCAGUCCUUACAGAAAGGGUGGG | 1202 | 6424-6446 |
| AD-1736263 | AAAGAGAUACCUGACAUCCUA | 934 | 2354-2374 | UAGGAUGUCAGGUAUCUCUUUUG | 1203 | 2352-2374 |
| AD-1736264 | AUGAGCAUUAAUGUUUUCUGA | 935 | 2647-2667 | UCAGAAAACAUUAAUGCUCAUUA | 1204 | 2645-2667 |
| AD-1736265 | UGACAUUUUUUCUCAUAGAAA | 936 | 2603-2623 | UUUCUAUGAGAAAAAAUGUCAAC | 1205 | 2601-2623 |
| AD-1736266 | CAGAGAUUAAAUGACUACUAA | 937 | 6032-6052 | UUAGUAGUCAUUUAAUCUCUGAU | 1206 | 6030-6052 |
| AD-1736267 | GCUGUCAAAUGUUAUAUUGUA | 938 | 4463-4483 | UACAAUAUAACAUUUGACAGCAU | 1207 | 4461-4483 |
| AD-1736268 | AAUAUAAUACUACAGCAAAAA | 939 | 7041-7061 | UUUUUGCUGUAGUAUUAUAUUCC | 1208 | 7039-7061 |
| AD-1736269 | GGUGUCUAAAUAUAAUUUCAA | 940 | 4153-4173 | UUGAAAUUAUAUUUAGACACCCU | 1209 | 4151-4173 |
| AD-1736270 | CUCUUUAUACAAAAUGAGAGA | 941 | 7903-7923 | UCUCUCAUUUUGUAUAAAGAGAA | 1210 | 7901-7923 |
| AD-1736271 | GCAGUACCAAAUGAAUAAAAA | 942 | 5410-5430 | UUUUUAUUCAUUUGGUACUGCUA | 1211 | 5408-5430 |
| AD-1736272 | UUGUUGGUACACAAGGUAAAA | 943 | 1149-1169 | UUUUACCUUGUGUACCAACAAUC | 1212 | 1147-1169 |
| AD-1736273 | CUCUUAUUUAACUUAACCGUA | 944 | 5917-5937 | UACGGUUAAGUUAAAUAAGAGUU | 1213 | 5915-5937 |
| AD-1736274 | UGCUUGAUGAUACAAUGAAUA | 945 | 1338-1358 | UAUUCAUUGUAUCAUCAAGCAUU | 1214 | 1336-1358 |
| AD-1736275 | AACUGGGAAAGACAAUUUGAA | 946 | 6920-6940 | UUCAAAUUGUCUUUCCCAGUUAC | 1215 | 6918-6940 |
| AD-1736276 | CUCCUUAUAUGACUAUUUGAA | 947 | 1048-1068 | UUCAAAUAGUCAUAUAAGGAGCC | 1216 | 1046-1068 |
| AD-1736277 | AGUCAUGCUAACCAAUGGAAA | 948 | 367-387 | UUUCCAUUGGUUAGCAUGACUGA | 1217 | 365-387 |
| AD-1736278 | CCUGAAGUCACACAGCUAAUA | 949 | 2391-2411 | UAUUAGCUGUGUGACUUCAGGAC | 1218 | 2389-2411 |
| AD-1736279 | UUGCUGCUGACAACAAAGAUA | 950 | 978-998 | UAUCUUUGUUGUCAGCAGCAAUG | 1219 | 976-998 |
| AD-1736280 | UACUGACUUUGCCUGUAAAGA | 951 | 7757-7777 | UCUUUACAGGCAAAGUCAGUAAU | 1220 | 7755-7777 |
| AD-1736281 | AAUCCCUAUUUUAAAAUUCCA | 952 | 7070-7090 | UGGAAUUUUAAAAUAGGGAUUGU | 1221 | 7068-7090 |
| AD-1736282 | GUGCCUUAGGAGAUUACCCUA | 953 | 7330-7350 | UAGGGUAAUCUCCUAAGGCACUC | 1222 | 7328-7350 |
| AD-1736283 | GACAAUCUAAAUAUAUCAUCA | 954 | 3857-3877 | UGAUGAUAUAUUUAGAUUGUCUG | 1223 | 3855-3877 |
| AD-1736284 | UGUGAUAAUGAACACCGUAAA | 955 | 2438-2458 | UUUACGGUGUUCAUUAUCACAAG | 1224 | 2436-2458 |
| AD-1736285 | UCACCGUUGUAAAGACUUUUA | 956 | 8242-8262 | UAAAAGUCUUUACAACGGUGAUU | 1225 | 8240-8262 |
| AD-1736286 | UUAGAGAAGCUUCCUGACAUA | 957 | 6402-6422 | UAUGUCAGGAAGCUUCUCUAAUC | 1226 | 6400-6422 |
| AD-1736287 | AACAGUAAAGAAAUGCUACUA | 958 | 3252-3272 | UAGUAGCAUUUCUUUACUGUUAU | 1227 | 3250-3272 |
| AD-1736288 | UAUGUUCUGACUUGAGAGUUA | 959 | 4855-4875 | UAACUCUCAAGUCAGAACAUAAA | 1228 | 4853-4875 |
| AD-1736289 | UUAGAGCAUGCUAUCUUUAGA | 960 | 2109-2129 | UCUAAAGAUAGCAUGCUCUAAUU | 1229 | 2107-2129 |
| AD-1736290 | UAGUCUUUGAUUGAAAUAAGA | 961 | 5314-5334 | UCUUAUUUCAAUCAAAGACUAUG | 1230 | 5312-5334 |
| AD-1736291 | UUGGUAAACGAGAUUUAACAA | 962 | 3038-3058 | UUGUUAAAUCUCGUUUACCAAAG | 1231 | 3036-3058 |
| AD-1736292 | GUCUGAAAAUUGCUUUCAUUA | 963 | 3798-3818 | UAAUGAAAGCAAUUUUCAGACCU | 1232 | 3796-3818 |
| AD-1736293 | AUGAACUUGUUGCCUUGUAAA | 964 | 4741-4761 | UUUACAAGGCAACAAGUUCAUGC | 1233 | 4739-4761 |
| AD-1736294 | GGGCAAUAAACUGUAUCAAAA | 965 | 8379-8399 | UUUUGAUACAGUUUAUUGCCCAA | 1234 | 8377-8399 |
| AD-1736295 | ACAUGUUAGCAUAUAAUGUAA | 966 | 3175-3195 | UUACAUUAUAUGCUAACAUGUAC | 1235 | 3173-3195 |
| AD-1736296 | UGUGAGAGUAUAGAAUUUCUA | 967 | 6367-6387 | UAGAAAUUCUAUACUCUCACAGU | 1236 | 6365-6387 |
| AD-1736297 | AUCCUUCAUUUGGCACUAUAA | 968 | 6764-6784 | UUAUAGUGCCAAAUGAAGGAUUA | 1237 | 6762-6784 |
| AD-1736298 | ACAUUUAGAAAGUAGCUUUAA | 969 | 3824-3844 | UUAAAGCUACUUUCUAAAUGUGU | 1238 | 3822-3844 |
| AD-1736299 | AACUGUUCUAUAAAGCAAAGA | 970 | 3364-3384 | UCUUUGCUUUAUAGAACAGUUAA | 1239 | 3362-3384 |
| AD-1736300 | CCUCCAGAGAUGAAAGAUCUA | 971 | 894-914 | UAGAUCUUUCAUCUCUGGAGGAG | 1240 | 892-914 |
| AD-1736301 | UUGUUUAACUAUGACUCCUAA | 972 | 4249-4269 | UUAGGAGUCAUAGUUAAACAACA | 1241 | 4247-4269 |
| AD-1736302 | CUGUUUGACAAUGCUUUGUUA | 973 | 5585-5605 | UAACAAAGCAUUGUCAAACAGAA | 1242 | 5583-5605 |
| AD-1736303 | UGUCCUAAAAGAAAUUUUUCA | 974 | 7227-7247 | UGAAAAAUUUCUUUUAGGACAAC | 1243 | 7225-7247 |
| AD-1736304 | ACAGAUUGAACAAAGAACUUA | 975 | 7572-7592 | UAAGUUCUUUGUUCAAUCUGUAG | 1244 | 7570-7592 |
| AD-1736305 | GUUUAACCUGUCCAAACUUCA | 976 | 6673-6693 | UGAAGUUUGGACAGGUUAAACGA | 1245 | 6671-6693 |
| AD-1736306 | CAAAAUGUUUAACUUUACCAA | 977 | 8606-8626 | UUGGUAAAGUUAAACAUUUUGGU | 1246 | 8604-8626 |
| AD-1736307 | UCCCAUUGUGUAAUAUUUAUA | 978 | 4494-4514 | UAUAAAUAUUACACAAUGGGACU | 1247 | 4492-4514 |
| AD-1736308 | GUUGGGUAAAUAUGCUUAUUA | 979 | 4065-4085 | UAAUAAGCAUAUUUACCCAACAU | 1248 | 4063-4085 |
| AD-1736309 | CAGGGUUGUCUUUGAGUCUGA | 980 | 5187-5207 | UCAGACUCAAAGACAACCCUGAG | 1249 | 5185-5207 |
| AD-1736310 | GCUAAAAUCCAACUGCAAUUA | 981 | 7425-7445 | UAAUUGCAGUUGGAUUUUAGCCC | 1250 | 7423-7445 |
| AD-1736311 | CAGGACUGAAGUGUGUAUGUA | 982 | 291-311 | UACAUACACACUUCAGUCCUGGC | 1251 | 289-311 |
| AD-1736312 | GAGUACCAAUUGCCUUAUUAA | 983 | 1457-1477 | UUAAUAAGGCAAUUGGUACUCCU | 1252 | 1455-1477 |
| AD-1736313 | AAGUGCCUAUGUGAAGUGAUA | 984 | 3886-3906 | UAUCACUUCACAUAGGCACUUUU | 1253 | 3884-3906 |
| AD-1736314 | UAACAAUAAUAGAACUGCCAA | 985 | 7092-7112 | UUGGCAGUUCUAUUAUUGUUAGG | 1254 | 7090-7112 |
| AD-1736315 | GCUGUUCCAUACCAUUGCUUA | 986 | 6978-6998 | UAAGCAAUGGUAUGGAACAGCAG | 1255 | 6976-6998 |
| AD-1736316 | UAGACUGGAGAAGAUUAUUCA | 987 | 7997-8017 | UGAAUAAUCUUCUCCAGUCUAGA | 1256 | 7995-8017 |
| AD-1736317 | UUCCAACAGCAUCACCAAAUA | 988 | 516-536 | UAUUUGGUGAUGCUGUUGGAAGG | 1257 | 514-536 |
| AD-1736318 | UAAUUGGUACAGAUUCUGUUA | 989 | 4779-4799 | UAACAGAAUCUGUACCAAUUACA | 1258 | 4777-4799 |
| AD-1736319 | GAGAAACAUUAUUUGUUGUCA | 990 | 4710-4730 | UGACAACAAAUAAUGUUUCUCUU | 1259 | 4708-4730 |
| AD-1736320 | CGCUCUCAAUUGCUAGUGGUA | 991 | 1107-1127 | UACCACUAGCAAUUGAGAGCGCC | 1260 | 1105-1127 |
| AD-1736321 | CGGUAUCAGAAACAGCAAAUA | 992 | 2873-2893 | UAUUUGCUGUUUCUGAUACCGUC | 1261 | 2871-2893 |
| AD-1736322 | CCCAGACAUAAUUUUAUAUUA | 993 | 7449-7469 | UAAUAUAAAAUUAUGUCUGGGAG | 1262 | 7447-7469 |
| AD-1736323 | UAGUACAUUUUGAGGUAUUUA | 994 | 4215-4235 | UAAAUACCUCAAAAUGUACUAAC | 1263 | 4213-4235 |
| AD-1736324 | AAAUGCUAUUGAUAACAGUAA | 995 | 3211-3231 | UUACUGUUAUCAAUAGCAUUUAC | 1264 | 3209-3231 |
| AD-1736325 | UAGCUGAAUUUGGGACUAUGA | 996 | 6490-6510 | UCAUAGUCCCAAAUUCAGCUAUC | 1265 | 6488-6510 |
| AD-1736326 | AUUGUGGUUUUCAAAGAUAUA | 997 | 5535-5555 | UAUAUCUUUGAAAACCACAAUGG | 1266 | 5533-5555 |
| AD-1736327 | CCUGGUUGCAGUAUCUGAAAA | 998 | 4985-5005 | UUUUCAGAUACUGCAACCAGGUU | 1267 | 4983-5005 |
| AD-1736328 | UAGAAUGGUUGUUGAGCUAAA | 999 | 6297-6317 | UUUAGCUCAACAACCAUUCUACA | 1268 | 6295-6317 |
| AD-1736329 | CUGGCCAUCAUUAUUACUGUA | 1000 | 560-580 | UACAGUAAUAAUGAUGGCCAGCU | 1269 | 558-580 |
| AD-1736330 | UUGACAGAUAAAAUACGAAGA | 1001 | 3735-3755 | UCUUCGUAUUUUAUCUGUCAAUU | 1270 | 3733-3755 |
| AD-1736331 | UCACAAACACAUCAUUACAAA | 1002 | 5473-5493 | UUUGUAAUGAUGUGUUUGUGAAU | 1271 | 5471-5493 |
| AD-1736332 | CCAUGAUUGUAUGAAAAUAGA | 1003 | 4962-4982 | UCUAUUUUCAUACAAUCAUGGAA | 1272 | 4960-4982 |
| AD-1736333 | CACAGAGUAAUGAAUAUUUAA | 1004 | 2978-2998 | UUAAAUAUUCAUUACUCUGUGUC | 1273 | 2976-2998 |
| AD-1736334 | AGCUGCUUAGUGGAAGAUGUA | 1005 | 2222-2242 | UACAUCUUCCACUAAGCAGCUCC | 1274 | 2220-2242 |
| AD-1736335 | UAGCUCUGUGUGCUGAUACCA | 1006 | 5606-5626 | UGGUAUCAGCACACAGAGCUAGA | 1275 | 5604-5626 |
| AD-1736336 | CAUUCGAGAGAAUAUGAGCUA | 1007 | 7144-7164 | UAGCUCAUAUUCUCUCGAAUGUA | 1276 | 7142-7164 |
| AD-1736337 | AUGCAUUUUCUGAAAAUGUAA | 1008 | 8734-8754 | UUACAUUUUCAGAAAAUGCAUAC | 1277 | 8732-8754 |
| AD-1736338 | GUUUCGACCAAGUAUCCCAAA | 1009 | 1537-1557 | UUUGGGAUACUUGGUCGAAACUU | 1278 | 1535-1557 |
| AD-1736339 | UCUUGCUUGCCACAAUAUCGA | 1010 | 3610-3630 | UCGAUAUUGUGGCAAGCAAGAUA | 1279 | 3608-3630 |
| AD-1736340 | GGGUACAAGAGGGAAUACAAA | 1011 | 3629-3649 | UUUGUAUUCCCUCUUGUACCCGA | 1280 | 3627-3649 |
| AD-1736341 | GGUGAUCAAAUCCUGUGUCUA | 1012 | 394-414 | UAGACACAGGAUUUGAUCACCUG | 1281 | 392-414 |
| AD-1736342 | CAGUGGGUUUCUAGGAUAGGA | 1013 | 3779-3799 | UCCUAUCCUAGAAACCCACUGUC | 1282 | 3777-3799 |
| AD-1736343 | AACUAAGUAUUUUUAAGGACA | 1014 | 7869-7889 | UGUCCUUAAAAAUACUUAGUUAC | 1283 | 7867-7889 |
| AD-1736344 | CAUAAUGUGAUUGUUAAAUUA | 1015 | 6951-6971 | UAAUUUAACAAUCACAUUAUGGG | 1284 | 6949-6971 |
| AD-1736345 | GAGAAGAAUUAAGAAAACUCA | 1016 | 2820-2840 | UGAGUUUUCUUAAUUCUUCUCAA | 1285 | 2818-2840 |
| AD-1736346 | GAAGAGAAAUUGAUUGUUUAA | 1017 | 7635-7655 | UUAAACAAUCAAUUUCUCUUCUC | 1286 | 7633-7655 |
| AD-1736347 | AGUGUGAAACUUGUGCCAUAA | 1018 | 1218-1238 | UUAUGGCACAAGUUUCACACUUU | 1287 | 1216-1238 |
| AD-1736348 | CUGAGACACUGAGAAAUGUCA | 1019 | 2372-2392 | UGACAUUUCUCAGUGUCUCAGGA | 1288 | 2370-2392 |
| AD-1736349 | UGGCUUAUAUGUGUUUAAAGA | 1020 | 7488-7508 | UCUUUAAACACAUAUAAGCCAAU | 1289 | 7486-7508 |
| AD-1736350 | UGCAUUUUGACAUUGCAAAAA | 1021 | 8188-8208 | UUUUUGCAAUGUCAAAAUGCAAU | 1290 | 8186-8208 |
| AD-1736351 | UUAGGUUAGAAGUUCCAGAAA | 1022 | 5053-5073 | UUUCUGGAACUUCUAACCUAAUG | 1291 | 5051-5073 |
| AD-1736352 | UGCGACAUGAAAACAUCCUUA | 1023 | 951-971 | UAAGGAUGUUUUCAUGUCGCAGC | 1292 | 949-971 |
| AD-1736353 | GAGAGGAUUUUUUACCAUCUA | 1024 | 4095-4115 | UAGAUGGUAAAAAAUCCUCUCUU | 1293 | 4093-4115 |
| AD-1736354 | GAAGGUGAAGAGAAUUUCAAA | 1025 | 8438-8458 | UUUGAAAUUCUCUUCACCUUCCA | 1294 | 8436-8458 |
| AD-1736355 | UGGUAUCUGAAUAUCAUGAAA | 1026 | 1023-1043 | UUUCAUGAUAUUCAGAUACCAGC | 1295 | 1021-1043 |
| AD-1736356 | UGUUGGUUUAAUUUUUCAACA | 1027 | 7658-7678 | UGUUGAAAAAUUAAACCAACAUG | 1296 | 7656-7678 |
| AD-1736357 | UAGUUGUAAUUUAAAUGUGGA | 1028 | 8419-8439 | UCCACAUUUAAAUUACAACUACU | 1297 | 8417-8439 |
| AD-1736358 | GUGAAUGUUUUUGCCAUUUUA | 1029 | 1763-1783 | UAAAAUGGCAAAAACAUUCACAU | 1298 | 1761-1783 |
| AD-1736359 | CAGAGAUGAUUUUUCUUUUAA | 1030 | 6800-6820 | UUAAAAGAAAAAUCAUCUCUGCC | 1299 | 6798-6820 |
| AD-1736360 | AGAAAAUUAGAUUCAGAUCUA | 1031 | 8058-8078 | UAGAUCUGAAUCUAAUUUUCUGU | 1300 | 8056-8078 |
| AD-1736361 | ACUGGAAAAUUAAGAAAGUAA | 1032 | 5390-5410 | UUACUUUCUUAAUUUUCCAGUGG | 1301 | 5388-5410 |
| AD-1736362 | UAAAGUGGGAAAGAUAAUAAA | 1033 | 8762-8782 | UUUAUUAUCUUUCCCACUUUACA | 1302 | 8760-8782 |
| AD-1736363 | CUAGGCUAAGAAAGAGUUGUA | 1034 | 6278-6298 | UACAACUCUUUCUUAGCCUAGUU | 1303 | 6276-6298 |
| AD-1736364 | GCUGAUAAAAUUAAUGGAUAA | 1035 | 6335-6355 | UUAUCCAUUAAUUUUAUCAGCAC | 1304 | 6333-6355 |
| AD-1736365 | CCUGUAUUUCUUUAGUUGUCA | 1036 | 6653-6673 | UGACAACUAAAGAAAUACAGGAA | 1305 | 6651-6673 |
| AD-1736366 | UUUGUUUUGCUUUUGACAAAA | 1037 | 6996-7016 | UUUUGUCAAAAGCAAAACAAAGC | 1306 | 6994-7016 |
| AD-1736367 | UGGCUGUGAAAAUAUUCUCCA | 1038 | 876-896 | UGGAGAAUAUUUUCACAGCCACA | 1307 | 874-896 |
| AD-1736368 | ACUAUUUUAGGCAUAGCACUA | 1039 | 4897-4917 | UAGUGCUAUGCCUAAAAUAGUGC | 1308 | 4895-4917 |
| AD-1736369 | UUUCAGUACUGUAUAAAGUGA | 1040 | 4651-4671 | UCACUUUAUACAGUACUGAAAAU | 1309 | 4649-4671 |
| AD-1736370 | GUGAUGCAAUCUAUGUUUCCA | 1041 | 2129-2149 | UGGAAACAUAGAUUGCAUCACCU | 1310 | 2127-2149 |
| AD-1736371 | UGUUUGGCAGAUCUCAUCAAA | 1042 | 6613-6633 | UUUGAUGAGAUCUGCCAAACAUU | 1311 | 6611-6633 |
| AD-1736372 | AAGGUUGUUUGUGACCAGAAA | 1043 | 1517-1537 | UUUCUGGUCACAAACAACCUUUC | 1312 | 1515-1537 |
| AD-1736373 | GGAAGGAAAUAUUUUGAGAAA | 1044 | 2794-2814 | UUUCUCAAAAUAUUUCCUUCCUU | 1313 | 2792-2814 |
| AD-1736374 | UUUUGGUAGCGUGACUCUUCA | 1045 | 8132-8152 | UGAAGAGUCACGCUACCAAAAGA | 1314 | 8130-8152 |
| AD-1736375 | UGAACAGGAAAAGAUGUAAAA | 1046 | 2045-2065 | UUUUACAUCUUUUCCUGUUCAUU | 1315 | 2043-2065 |
| AD-1736376 | GGGAACCAAGAGGUAUAUGGA | 1047 | 1309-1329 | UCCAUAUACCUCUUGGUUCCCAC | 1316 | 1307-1329 |
| AD-1736377 | UGGCACUAGGUCCAAAUCUUA | 1048 | 2419-2439 | UAAGAUUUGGACCUAGUGCCAGU | 1317 | 2417-2439 |
| AD-1736378 | CACACCUUCAUAUGGAGAUUA | 1049 | 1131-1151 | UAAUCUCCAUAUGAAGGUGUGCC | 1318 | 1129-1151 |
| AD-1736379 | CUGGUUUACUGGGAAAUAGCA | 1050 | 1406-1426 | UGCUAUUUCCCAGUAAACCAGAC | 1319 | 1404-1426 |
| AD-1736380 | GCCCAAAGGAAUGUAUAUAAA | 1051 | 8316-8336 | UUUAUAUACAUUCCUUUGGGCCU | 1320 | 8314-8336 |
| AD-1736381 | UUAACUGCAAGAGUUUACUGA | 1052 | 7265-7285 | UCAGUAAACUCUUGCAGUUAAAA | 1321 | 7263-7285 |
| AD-1736382 | GAACCACUCUCUGAGUGCAAA | 1053 | 677-697 | UUUGCACUCAGAGAGUGGUUCCU | 1322 | 675-697 |
| AD-1736383 | UUAUCUUUUCAUCCUGGCAUA | 1054 | 7607-7627 | UAUGCCAGGAUGAAAAGAUAAAG | 1323 | 7605-7627 |
| AD-1736384 | GUGAGUGUUGGUAUGCCAACA | 1055 | 1605-1625 | UGUUGGCAUACCAACACUCACGC | 1324 | 1603-1625 |
| AD-1736385 | AGAAUGUAUUUGGCUAAAUAA | 1056 | 5338-5358 | UUAUUUAGCCAAAUACAUUCUCA | 1325 | 5336-5358 |
| AD-1736386 | GAACCCUUUUAUUAAGAGGAA | 1057 | 3317-3337 | UUCCUCUUAAUAAAAGGGUUCCA | 1326 | 3315-3337 |
| AD-1736387 | CUCCUGUCCAUAGCUGCGAUA | 1058 | 590-610 | UAUCGCAGCUAUGGACAGGAGGC | 1327 | 588-610 |
| AD-1736388 | ACUGAGUUGAAAUAAGGAAGA | 1059 | 3501-3521 | UCUUCCUUAUUUCAACUCAGUAA | 1328 | 3499-3521 |
| AD-1736389 | CUGCCAAACAGAAGGAGCAUA | 1060 | 337-357 | UAUGCUCCUUCUGUUUGGCAGGU | 1329 | 335-357 |
| AD-1736390 | GGCAAAGUUGUGAAGCACUCA | 1061 | 1563-1583 | UGAGUGCUUCACAACUUUGCCAC | 1330 | 1561-1583 |
| AD-1736391 | AUAGGAUGAUGAAGUUUAGAA | 1062 | 4413-4433 | UUCUAAACUUCAUCAUCCUAUUU | 1331 | 4411-4433 |
| AD-1736392 | AUUCGUAUCUUAAAAUGGCAA | 1063 | 5513-5533 | UUGCCAUUUUAAGAUACGAAUAC | 1332 | 5511-5533 |
| AD-1736393 | CACAGCUUGGGUAAUAGCGUA | 1064 | 3384-3404 | UACGCUAUUACCCAAGCUGUGCU | 1333 | 3382-3404 |
| AD-1736394 | UUUGCAACAACAUAACACUGA | 1065 | 492-512 | UCAGUGUUAUGUUGUUGCAAAAA | 1334 | 490-512 |
| AD-1736395 | UGCCACCAUGUGACUUAUUGA | 1066 | 5153-5173 | UCAAUAAGUCACAUGGUGGCAAA | 1335 | 5151-5173 |
| AD-1736396 | UCGAUAGAGGAAAUGAGAAAA | 1067 | 1499-1519 | UUUUCUCAUUUCCUCUAUCGAGG | 1336 | 1497-1519 |
| AD-1736397 | UUUUUAAGUUAGCAGGACUUA | 1068 | 2152-2172 | UAAGUCCUGCUAACUUAAAAAGG | 1337 | 2150-2172 |
| AD-1736398 | UGUAAAUAAUUAUCUGCCUAA | 1069 | 8696-8716 | UUAGGCAGAUAAUUAUUUACAUC | 1338 | 8694-8716 |
| AD-1736399 | UGGUUGUACGUGCCUCAAAUA | 1070 | 4010-4030 | UAUUUGAGGCACGUACAACCAUA | 1339 | 4008-4030 |
| AD-1736400 | CCACACUGACUAGAGCCAACA | 2147 | 70-90 | UGUUGGCUCUAGUCAGUGUGGGC | 2148 | 68-90 |

TABLE 7
Modified Sense and Antisense Strand Sequences of ACVRIC dsRNA
Agents Comprising a GalNAc Derivative Targeting Ligand

| | | SEQ | | SEQ | | SEQ |
|---|---|---|---|---|---|---|
| Duplex | Antisense Sequence | ID | Antisense Sequence | ID | mRNA Target Sequence | ID |
| Name | 5′ to 3′ | NO: | 5′ to 3′ | NO: | 5′ to 3′ | NO: |
| AD- | ususuuuuCfaAfAfCfuccauuc | 2149 | VPusAfsggaAfuGfGfaguuUfgAfaaa | 1609 | UCUUUUUUCAAACUCCAUUC | 1878 |
| 1736131 | csusa | | aasgsa | | CUU | |
| AD- | ascsuuucAfuCfUfGfucuucag | 2150 | VPusAfsucuGfaAfGfacagAfuGfaaa | 1610 | UAACUUUCAUCUGUCUUCAG | 1879 |
| 1736132 | asusa | | gususa | | AUG | |
| AD- | cscsucauAfaCfUfUfcuccagu | 2151 | VPusUfsuacUfgGfAfgaagUfuAfuga | 1611 | CACCUCAUAACUUCUCCAGU | 1880 |
| 1736133 | asasa | | ggsusg | | AAU | |
| AD- | csuscacuAfuCfUfUfucaacau | 2152 | VPusUfsaauGfuUfGfaaagAfuAfgug | 1612 | CCCUCACUAUCUUUCAACAU | 1881 |
| 1736134 | usasa | | agsgsg | | UAU | |
| AD- | csuscguuAfaUfGfCfucucauc | 2153 | VPusUfsggaUfgAfGfagcaUfuAfacg | 1613 | UACUCGUUAAUGCUCUCAUC | 1882 |
| 1736135 | csasa | | agsusa | | CAC | |
| AD- | gsusucuuCfaUfAfAfuccacua | 2154 | VPusAfsguaGfuGfGfauuaUfgAfaga | 1614 | CUGUUCUUCAUAAUCCACUA | 1883 |
| 1736136 | csusa | | acsasg | | CUG | |
| AD- | gsusugacUfuCfAfUfccaaucu | 2155 | VPusAfsgagAfuUfGfgaugAfaGfuca | 1615 | GAGUUGACUUCAUCCAAUCU | 1884 |
| 1736137 | csusa | | acsusc | | CUA | |
| AD- | csusacacAfaUfGfAfacuucuu | 2156 | VPusUfsuaaGfaAfGfuucaUfuGfugu | 1616 | UUCUACACAAUGAACUUCUU | 1885 |
| 1736138 | asasa | | agsasa | | AAC | |
| AD- | csascaucUfaGfAfAfuucuuaa | 2157 | VPusAfsauuAfaGfAfauucUfaGfaug | 1617 | GUCACAUCUAGAAUUCUUAA | 1886 |
| 1736139 | ususa | | ugsasc | | UUU | |
| AD- | asasaucuCfuCfAfUfagcuuuc | 2158 | VPusAfsagaAfaGfCfuaugAfgAfgau | 1618 | AGAAAUCUCUCAUAGCUUUC | 1887 |
| 1736140 | ususa | | uuscsu | | UUU | |
| AD- | cscsuacuAfuUfGfUfagaauua | 2159 | VPusAfsguaAfuUfCfuacaAfuAfgua | 1619 | CACCUACUAUUGUAGAAUUA | 1888 |
| 1736141 | csusa | | ggsusg | | CUA | |
| AD- | asuscuucUfuUfUfAfgugcauu | 2160 | VPusUfsuaaUfgCfAfcuaaAfaGfaag | 1620 | UCAUCUUCUUUUAGUGCAUU | 1889 |
| 1736142 | asasa | | ausgsa | | AAA | |
| AD- | csuscaugUfaCfUfCfuucugau | 2161 | VPusGfsaauCfaGfAfagagUfaCfaug | 1621 | AGCUCAUGUACUCUUCUGAU | 1890 |
| 1736143 | uscsa | | agscsu | | UCU | |
| AD- | ususucucUfuUfGfUfaccuugg | 2162 | VPusUfsuccAfaGfGfuacaAfaGfaga | 1622 | UCUUUCUCUUUGUACCUUGG | 1891 |
| 1736144 | asasa | | aasgsa | | AAU | |
| AD- | usgsgcuuAfuAfCfAfucuucag | 2163 | VPusUfsucuGfaAfGfauguAfuAfagc | 1623 | UCUGGCUUAUACAUCUUCAG | 1892 |
| 1736145 | asasa | | casgsa | | AAA | |
| AD- | csasaaacAfaAfAfCfuacuccu | 2164 | VPusAfsuagGfaGfUfaguuUfuGfuuu | 1624 | AACAAAACAAAACUACUCCU | 1893 |
| 1736146 | asusa | | ugsusu | | AUU | |
| AD- | ascsuagcAfgAfAfCfucuuaug | 2165 | VPusUfsucaUfaAfGfaguuCfuGfcua | 1625 | UUACUAGCAGAACUCUUAUG | 1894 |
| 1736147 | asasa | | gusasa | | AAA | |
| AD- | cscsaaguCfaCfUfCfuauaauu | 2166 | VPusGfsgaaUfuAfUfagagUfgAfcuu | 1626 | UCCCAAGUCACUCUAUAAUU | 1895 |
| 1736148 | cscsa | | ggsgsa | | CCU | |
| AD- | uscscauuUfuUfCfUfugucauu | 2167 | VPusAfsuaaUfgAfCfaagaAfaAfaug | 1627 | UCUCCAUUUUUCUUGUCAUU | 1896 |
| 1736149 | asusa | | gasgsa | | AUG | |
| AD- | csasacacCfuCfAfAfcucaucu | 2168 | VPusAfsaagAfuGfAfguugAfgGfugu | 1628 | AGCAACACCUCAACUCAUCU | 1897 |
| 1736150 | ususa | | ugscsu | | UUU | |
| AD- | ascsucugAfaAfGfAfucugauu | 2169 | VPusUfsaaaUfcAfGfaucuUfuCfaga | 1629 | AAACUCUGAAAGAUCUGAUU | 1898 |
| 1736151 | usasa | | gususu | | UAU | |
| AD- | csusaguuCfuUfUfUfccgcaau | 2170 | VPusUfscauUfgCfGfgaaaAfgAfacu | 1630 | UUCUAGUUCUUUUCCGCAAU | 1899 |
| 1736152 | gsasa | | agsasa | | GAC | |
| AD- | csusuucaCfuCfUfGfaagaaau | 2171 | VPusGfsgauUfuCfUfucagAfgUfgaa | 1631 | AACUUUCACUCUGAAGAAAU | 1900 |
| 1736153 | cscsa | | agsusu | | CCG | |
| AD- | uscsuaacUfuUfUfCfucucuuu | 2172 | VPusAfsgaaAfgAfGfagaaAfaGfuua | 1632 | UAUCUAACUUUUCUCUCUUU | 1901 |
| 1736154 | csusa | | gasusa | | CUC | |
| AD- | uscsucaaCfuUfUfGfugucaaa | 2173 | VPusUfscuuUfgAfCfacaaAfgUfuga | 1633 | UAUCUCAACUUUGUGUCAAA | 1902 |
| 1736155 | gsasa | | gasusa | | GAA | |
| AD- | csusucaaUfaAfUfCfauuccuu | 2174 | VPusUfsaaaGfgAfAfugauUfaUfuga | 1634 | GUCUUCAAUAAUCAUUCCUU | 1903 |
| 1736156 | usasa | | agsasc | | UAA | |
| AD- | usasacugCfuCfUfUfcguauua | 2175 | VPusCfsuuaAfuAfCfgaagAfgCfagu | 1635 | CCUAACUGCUCUUCGUAUUA | 1904 |
| 1736157 | asgsa | | uasgsg | | AGA | |
| AD- | uscsuucuGfuCfAfUfaguucca | 2176 | VPusGfsuugGfaAfCfuaugAfcAfgaa | 1636 | AGUCUUCUGUCAUAGUUCCA | 1905 |
| 1736158 | ascsa | | gascsu | | ACA | |
| AD- | asuscucaGfaAfCfCfauaucug | 2177 | VPusAfsacaGfaUfAfugguUfcUfgag | 1637 | AAAUCUCAGAACCAUAUCUG | 1906 |
| 1736159 | ususa | | aususu | | UUG | |
| AD- | usgsaaucUfaUfCfUfucauuuu | 2178 | VPusGfsuaaAfaUfGfaagaUfaGfauu | 1638 | ACUGAAUCUAUCUUCAUUUU | 1907 |
| 1736160 | ascsa | | casgsu | | ACU | |
| AD- | ascscacuAfaAfCfUfuguuccu | 2179 | VPusAfsaagGfaAfCfaaguUfuAfgug | 1639 | GAACCACUAAACUUGUUCCU | 1908 |
| 1736161 | ususa | | gususc | | UUC | |
| AD- | asgsuguuCfuUfUfAfcuccuua | 2180 | VPusUfsguaAfgGfAfguaaAfgAfaca | 1640 | UCAGUGUUCUUUACUCCUUA | 1909 |
| 1736162 | csasa | | cusgsa | | CAG | |
| AD- | csusuuacUfcUfUfAfacaggau | 2181 | VPusUfsaauCfcUfGfuuaaGfaGfuaa | 1641 | UCCUUUACUCUUAACAGGAU | 1910 |
| 1736163 | usasa | | agsgsa | | UAU | |
| AD- | usasuaccUfaAfGfAfacauauu | 2182 | VPusGfsuaaUfaUfGfuucuUfaGfgua | 1642 | CUUAUACCUAAGAACAUAUU | 1911 |
| 1736164 | ascsa | | uasasg | | ACA | |
| AD- | csusucuaCfuGfAfGfaugaucc | 2183 | VPusUfsuggAfuCfAfucucAfgUfaga | 1643 | UUCUUCUACUGAGAUGAUCC | 1912 |
| 1736165 | asasa | | agsasa | | AAG | |
| AD- | csusguauUfuUfCfUfcauagag | 2184 | VPusUfsacuCfuAfUfgagaAfaAfuac | 1644 | UUCUGUAUUUUCUCAUAGAG | 1913 |
| 1736166 | usasa | | agsasa | | UAC | |
| AD- | ascsuuuuCfuCfUfUfucaguug | 2185 | VPusUfsacaAfcUfGfaaagAfgAfaaa | 1645 | AUACUUUUCUCUUUCAGUUG | 1914 |
| 1736167 | usasa | | gusasu | | UAG | |
| AD- | asusuaauUfuCfUfAfgucugug | 2186 | VPusUfsucaCfaGfAfcuagAfaAfuua | 1646 | UCAUUAAUUUCUAGUCUGUG | 1915 |
| 1736168 | asasa | | ausgsa | | AAA | |
| AD- | csuscuguAfuAfAfGfagguuuc | 2187 | VPusGfsugaAfaCfCfucuuAfuAfcag | 1647 | UUCUCUGUAUAAGAGGUUUC | 1916 |
| 1736169 | ascsa | | agsasa | | ACC | |
| AD- | gsascuuuCfaAfAfGfuacuaau | 2188 | VPusGfsuauUfaGfUfacuuUfgAfaag | 1648 | UUGACUUUCAAAGUACUAAU | 1917 |
| 1736170 | ascsa | | ucsasa | | ACU | |
| AD- | ususugccAfuUfAfUfacaaagu | 2189 | VPusAfsaacUfuUfGfuauaAfuGfgca | 1649 | UGUUUGCCAUUAUACAAAGU | 1918 |
| 1736171 | ususa | | aascsa | | UUG | |
| AD- | gsasacacUfaUfCfGfacauacc | 2190 | VPusGfsaggUfaUfGfucgaUfaGfugu | 1650 | CUGAACACUAUCGACAUACC | 1919 |
| 1736172 | uscsa | | ucsasg | | UCA | |
| AD- | usasgaauGfaCfAfUfuuacuaa | 2191 | VPusUfsauuAfgUfAfaaugUfcAfuuc | 1651 | CGUAGAAUGACAUUUACUAA | 1920 |
| 1736173 | usasa | | uascsg | | UAU | |
| AD- | asasgcuaCfuUfAfGfaaauguu | 2192 | VPusUfsaaaCfaUfUfucuaAfgUfagc | 1652 | ACAAGCUACUUAGAAAUGUU | 1921 |
| 1736174 | usasa | | uusgsu | | UAG | |
| AD- | cscsuuagUfaCfUfCfucagaga | 2193 | VPusAfsaucUfcUfGfagagUfaCfuaa | 1653 | UCCCUUAGUACUCUCAGAGA | 1922 |
| 1736175 | ususa | | ggsgsa | | UUA | |
| AD- | usgsaaugCfaCfAfCfuaacgua | 2194 | VPusAfsuuaCfgUfUfagugUfgCfauu | 1654 | CUUGAAUGCACACUAACGUA | 1923 |
| 1736176 | asusa | | casasg | | AUG | |
| AD- | asasgccuAfaUfGfAfugauaau | 2195 | VPusUfsaauUfaUfCfaucaUfuAfggc | 1655 | CAAAGCCUAAUGAUGAUAAU | 1924 |
| 1736177 | usasa | | uususg | | UAU | |
| AD- | asasacuuUfuUfAfCfuauccca | 2196 | VPusUfsaugGfgAfUfaguaAfaAfagu | 1656 | GGAAACUUUUUACUAUCCCA | 1925 |
| 1736178 | usasa | | uuscsc | | UAU | |
| AD- | csusagcuGfaUfAfCfucuuaag | 2197 | VPusUfsacuUfaAfGfaguaUfcAfgcu | 1657 | AGCUAGCUGAUACUCUUAAG | 1926 |
| 1736179 | usasa | | agscsu | | UAU | |
| AD- | asgscaugAfaAfAfGfauaacuc | 2198 | VPusUfsagaGfuUfAfucuuUfuCfaug | 1658 | GCAGCAUGAAAAGAUAACUC | 1927 |
| 1736180 | usasa | | cusgsc | | UAA | |
| AD- | usasagccAfuUfAfUfgcuauua | 2199 | VPusAfscuaAfuAfGfcauaAfuGfgcu | 1659 | ACUAAGCCAUUAUGCUAUUA | 1928 |
| 1736181 | gsusa | | uasgsu | | GUU | |
| AD- | uscsuagcUfuUfUfAfgcuaaca | 2200 | VPusUfsaugUfuAfGfcuaaAfaGfcua | 1660 | AUUCUAGCUUUUAGCUAACA | 1929 |
| 1736182 | usasa | | gasasu | | UAU | |
| AD- | gsusgugaUfuCfUfUfcaaacuu | 2201 | VPusUfsgaaGfuUfUfgaagAfaUfcac | 1661 | UUGUGUGAUUCUUCAAACUU | 1930 |
| 1736183 | csasa | | acsasa | | CAC | |
| AD- | uscsuccaGfaCfCfUfaacaguu | 2202 | VPusAfsaaaCfuGfUfuaggUfcUfgga | 1662 | UCUCUCCAGACCUAACAGUU | 1931 |
| 1736184 | ususa | | gasgsa | | UUA | |
| AD- | csusuuuuUfuCfAfUfcuagccu | 2203 | VPusCfsaagGfcUfAfgaugAfaAfaaa | 1663 | UUCUUUUUUUCAUCUAGCCU | 1932 |
| 1736185 | usgsa | | agsasa | | UGC | |
| AD- | csasaaauAfaUfUfCfuugacau | 2204 | VPusAfsgauGfuCfAfagaaUfuAfuuu | 1664 | GUCAAAAUAAUUCUUGACAU | 1933 |
| 1736186 | csusa | | ugsasc | | CUA | |
| AD- | gscsaucaCfuUfUfCfugaaaau | 2205 | VPusUfsuauUfuUfCfagaaAfgUfgau | 1665 | CAGCAUCACUUUCUGAAAAU | 1934 |
| 1736187 | asasa | | gcsusg | | AAG | |
| AD- | uscsuuuuGfuGfAfAfacauacu | 2206 | VPusAfsuagUfaUfGfuuucAfcAfaaa | 1666 | CAUCUUUUGUGAAACAUACU | 1935 |
| 1736188 | asusa | | gasusg | | AUU | |
| AD- | csusauuuCfuUfCfCfauaggcu | 2207 | VPusUfsuagCfcUfAfuggaAfgAfaau | 1667 | UUCUAUUUCUUCCAUAGGCU | 1936 |
| 1736189 | asasa | | agsasa | | AAA | |
| AD- | csusucaaUfgAfAfGfuguuaac | 2208 | VPusUfsuguUfaAfCfacuuCfaUfuga | 1668 | CUCUUCAAUGAAGUGUUAAC | 1937 |
| 1736190 | asasa | | agsasg | | AAC | |
| AD- | ususugccUfuCfAfUfucuacuu | 2209 | VPusGfsaaaGfuAfGfaaugAfaGfgca | 1669 | GUUUUGCCUUCAUUCUACUU | 1938 |
| 1736191 | uscsa | | aasasc | | UCU | |
| AD- | asgsguuuUfuAfAfAfuguccua | 2210 | VPusUfsuuaGfgAfCfauuuAfaAfaac | 1670 | UCAGGUUUUUAAAUGUCCUA | 1939 |
| 1736192 | asasa | | cusgsa | | AAA | |
| AD- | gsasauauCfuUfUfGfaguccuu | 2211 | VPusUfsgaaGfgAfCfucaaAfgAfuau | 1671 | GUGAAUAUCUUUGAGUCCUU | 1940 |
| 1736193 | csasa | | ucsasc | | CAA | |
| AD- | gsasacacUfuCfCfAfaagauua | 2212 | VPusAfsuuaAfuCfUfuuggAfaGfugu | 1672 | CUGAACACUUCCAAAGAUUA | 1941 |
| 1736194 | asusa | | ucsasg | | AUC | |
| AD- | csusaaauUfuUfGfUfcuaacaa | 2213 | VPusAfsuuuGfuUfAfgacaAfaAfuuu | 1673 | GCCUAAAUUUUGUCUAACAA | 1942 |
| 1736195 | asusa | | agsgsc | | AUG | |
| AD- | gsusaaacAfaCfUfUfaaaauug | 2214 | VPusAfsgcaAfuUfUfuaagUfuGfuuu | 1674 | GAGUAAACAACUUAAAAUUG | 1943 |
| 1736196 | csusa | | acsusc | | CUU | |
| AD- | asasaauaAfuUfUfAfcucacuc | 2215 | VPusCfsugaGfuGfAfguaaAfuUfauu | 1675 | CUAAAAUAAUUUACUCACUC | 1944 |
| 1736197 | asgsa | | uusasg | | AGA | |
| AD- | gsascaucUfaUfUfCfuguuggu | 2216 | VPusAfsgacCfaAfCfagaaUfaGfaug | 1676 | CUGACAUCUAUUCUGUUGGU | 1945 |
| 1736198 | csusa | | ucsasg | | CUG | |
| AD- | usasacugAfgUfAfGfucuuaua | 2217 | VPusAfsauaUfaAfGfacuaCfuCfagu | 1677 | CCUAACUGAGUAGUCUUAUA | 1946 |
| 1736199 | ususa | | uasgsg | | UUU | |
| AD- | uscsuggaAfuUfUfAfgccuucu | 2218 | VPusUfsuagAfaGfGfcuaaAfuUfcca | 1678 | CGUCUGGAAUUUAGCCUUCU | 1947 |
| 1736200 | asasa | | gascsg | | AAU | |
| AD- | ascsaugcCfuUfGfAfacucuug | 2219 | VPusUfsucaAfgAfGfuucaAfgGfcau | 1679 | AAACAUGCCUUGAACUCUUG | 1948 |
| 1736201 | asasa | | gususu | | AAC | |
| AD- | asuscaagCfaCfUfUfcuugcac | 2220 | VPusAfsaguGfcAfAfgaagUfgCfuug | 1680 | AAAUCAAGCACUUCUUGCAC | 1949 |
| 1736202 | ususa | | aususu | | UUG | |
| AD- | csusugcuUfuUfCfAfucuuuau | 2221 | VPusGfsuauAfaAfGfaugaAfaAfgca | 1681 | CACUUGCUUUUCAUCUUUAU | 1950 |
| 1736203 | ascsa | | agsusg | | ACU | |
| AD- | ususuucuCfcCfUfAfuguaaua | 2222 | VPusGfsauaUfuAfCfauagGfgAfgaa | 1682 | GCUUUUCUCCCUAUGUAAUA | 1951 |
| 1736204 | uscsa | | aasgsc | | UCU | |
| AD- | usgscuuuCfuUfCfUfaugucua | 2223 | VPusUfsuuaGfaCfAfuagaAfgAfaag | 1683 | UAUGCUUUCUUCUAUGUCUA | 1952 |
| 1736205 | asasa | | casusa | | AAA | |
| AD- | ascscugcUfuAfGfCfaaaucgu | 2224 | VPusAfsgacGfaUfUfugcuAfaGfcag | 1684 | GAACCUGCUUAGCAAAUCGU | 1953 |
| 1736206 | csusa | | gususc | | CUG | |
| AD- | asusauucCfuCfUfAfcccuuuc | 2225 | VPusGfsugaAfaGfGfguagAfgGfaau | 1685 | AGAUAUUCCUCUACCCUUUC | 1954 |
| 1736207 | ascsa | | auscsu | | ACA | |
| AD- | uscsccacUfuUfUfCfuuugggu | 2226 | VPusAfsaacCfcAfAfagaaAfaGfugg | 1686 | AAUCCCACUUUUCUUUGGGU | 1955 |
| 1736208 | ususa | | gasusu | | UUC | |
| AD- | asgsgcuuCfuUfGfUfauauacu | 2227 | VPusUfsaagUfaUfAfuacaAfgAfagc | 1687 | GCAGGCUUCUUGUAUAUACU | 1956 |
| 1736209 | usasa | | cusgsc | | UAU | |
| AD- | asasacuuGfaUfCfUfguguuuc | 2228 | VPusCfsugaAfaCfAfcagaUfcAfagu | 1688 | UCAAACUUGAUCUGUGUUUC | 1957 |
| 1736210 | asgsa | | uusgsa | | AGG | |
| AD- | ususugcuUfuAfAfUfgcuaaau | 2229 | VPusGfsaauUfuAfGfcauuAfaAfgca | 1689 | CUUUUGCUUUAAUGCUAAAU | 1958 |
| 1736211 | uscsa | | aasasg | | UCC | |
| AD- | asgsacuaGfcUfGfUfuauuugu | 2230 | VPusAfsuacAfaAfUfaacaGfcUfagu | 1690 | AAAGACUAGCUGUUAUUUGU | 1959 |
| 1736212 | asusa | | cususu | | AUU | |
| AD- | ususccuaCfuUfUfCfccuugaa | 2231 | VPusUfsauuCfaAfGfggaaAfgUfagg | 1691 | GCUUCCUACUUUCCCUUGAA | 1960 |
| 1736213 | usasa | | aasgsc | | UAG | |
| AD- | csasgaacUfgAfAfUfgcucaag | 2232 | VPusGfsacuUfgAfGfcauuCfaGfuuc | 1692 | UCCAGAACUGAAUGCUCAAG | 1961 |
| 1736214 | uscsa | | ugsgsa | | UCU | |
| AD- | uscsuuguUfaCfUfAfauuucuc | 2233 | VPusAfsugaGfaAfAfuuagUfaAfcaa | 1693 | GUUCUUGUUACUAAUUUCUC | 1962 |
| 1736215 | asusa | | gasasc | | AUA | |
| AD- | csuscaguGfaUfAfGfccuuuau | 2234 | VPusGfsuauAfaAfGfgcuaUfcAfcug | 1694 | AACUCAGUGAUAGCCUUUAU | 1963 |
| 1736216 | ascsa | | agsusu | | ACC | |
| AD- | ususuuauGfcUfCfCfuaaaaca | 2235 | VPusGfsaugUfuUfUfaggaGfcAfuaa | 1695 | UCUUUUAUGCUCCUAAAACA | 1964 |
| 1736217 | uscsa | | aasgsa | | UCU | |
| AD- | ususcuccUfuAfGfGfuuauguu | 2236 | VPusUfsgaaCfaUfAfaccuAfaGfgag | 1696 | AAUUCUCCUUAGGUUAUGUU | 1965 |
| 1736218 | csasa | | aasusu | | CAG | |
| AD- | asusugcuCfaUfCfGfagacaua | 2237 | VPusUfsuuaUfgUfCfucgaUfgAfgca | 1697 | CUAUUGCUCAUCGAGACAUA | 1966 |
| 1736219 | asasa | | ausasg | | AAA | |
| AD- | cscsuuugUfaCfAfUfacacacu | 2238 | VPusUfsaagUfgUfGfuaugUfaCfaaa | 1698 | UUCCUUUGUACAUACACACU | 1967 |
| 1736220 | usasa | | ggsasa | | UAG | |
| AD- | ususgaacCfaAfGfAfgcacaug | 2239 | VPusUfsucaUfgUfGfcucuUfgGfuuc | 1699 | ACUUGAACCAAGAGCACAUG | 1968 |
| 1736221 | asasa | | aasgsu | | AAU | |
| AD- | uscsagggAfuUfUfUfaaagucu | 2240 | VPusUfsuagAfcUfUfuaaaAfuCfccu | 1700 | CCUCAGGGAUUUUAAAGUCU | 1969 |
| 1736222 | asasa | | gasgsg | | AAU | |
| AD- | usascuugCfuUfAfUfaaaguga | 2241 | VPusUfsaucAfcUfUfuauaAfgCfaag | 1701 | GGUACUUGCUUAUAAAGUGA | 1970 |
| 1736223 | usasa | | uascsc | | UAG | |
| AD- | asusgcauCfuAfAfAfccuaccu | 2242 | VPusCfsaagGfuAfGfguuuAfgAfugc | 1702 | GCAUGCAUCUAAACCUACCU | 1971 |
| 1736224 | usgsa | | ausgsc | | UGA | |
| AD- | ususgggaAfaAfCfAfcuauuau | 2243 | VPusUfscauAfaUfAfguguUfuUfccc | 1703 | ACUUGGGAAAACACUAUUAU | 1972 |
| 1736225 | gsasa | | aasgsu | | GAA | |
| AD- | asasacucCfaAfAfGfagaaaug | 2244 | VPusUfsucaUfuUfCfucuuUfgGfagu | 1704 | UCAAACUCCAAAGAGAAAUG | 1973 |
| 1736226 | asasa | | uusgsa | | AAU | |
| AD- | asusgggcAfuUfUfUfucaaaac | 2245 | VPusAfsuguUfuUfGfaaaaAfuGfccc | 1705 | AUAUGGGCAUUUUUCAAAAC | 1974 |
| 1736227 | asusa | | ausasu | | AUU | |
| AD- | asusaaugGfaAfCfUfuggacuc | 2246 | VPusUfsugaGfuCfCfaaguUfcCfauu | 1706 | AGAUAAUGGAACUUGGACUC | 1975 |
| 1736228 | asasa | | auscsu | | AAC | |
| AD- | usgsuguaGfaUfGfAfcgaaacc | 2247 | VPusUfsuggUfuUfCfgucaUfcUfaca | 1707 | UUUGUGUAGAUGACGAAACC | 1976 |
| 1736229 | asasa | | casasa | | AAG | |
| AD- | ususcuacCfuCfAfAfagauaag | 2248 | VPusGfsucuUfaUfCfuuugAfgGfuag | 1708 | UGUUCUACCUCAAAGAUAAG | 1977 |
| 1736230 | ascsa | | aascsa | | ACA | |
| AD- | asgsaaggCfaUfAfUfugaguua | 2249 | VPusAfsauaAfcUfCfaauaUfgCfcuu | 1709 | UUAGAAGGCAUAUUGAGUUA | 1978 |
| 1736231 | ususa | | cusasa | | UUU | |
| AD- | asusggagUfuUfUfUfcugcuau | 2250 | VPusAfsaauAfgCfAfgaaaAfaCfucc | 1710 | ACAUGGAGUUUUUCUGCUAU | 1979 |
| 1736232 | ususa | | ausgsu | | UUU | |
| AD- | uscsaguuUfcUfCfAfuuaguuu | 2251 | VPusAfscaaAfcUfAfaugaGfaAfacu | 1711 | CCUCAGUUUCUCAUUAGUUU | 1980 |
| 1736233 | gsusa | | gasgsg | | GUC | |
| AD- | csusgcauAfuAfUfAfagaacga | 2252 | VPusUfsuucGfuUfCfuuauAfuAfugc | 1712 | UUCUGCAUAUAUAAGAACGA | 1981 |
| 1736234 | asasa | | agsasa | | AAU | |
| AD- | usgsagccAfaAfAfUfauuaaau | 2253 | VPusGfsaauUfuAfAfuauuUfuGfgcu | 1713 | UCUGAGCCAAAAUAUUAAAU | 1982 |
| 1736235 | uscsa | | casgsa | | UCU | |
| AD- | asgsaaugAfuAfUfUfuccuguu | 2254 | VPusAfsaaaCfaGfGfaaauAfuCfauu | 1714 | CAAGAAUGAUAUUUCCUGUU | 1983 |
| 1736236 | ususa | | cususg | | UUA | |
| AD- | gsusgcucUfaUfAfUfaaaucuu | 2255 | VPusGfsgaaGfaUfUfuauaUfaGfagc | 1715 | UUGUGCUCUAUAUAAAUCUU | 1984 |
| 1736237 | cscsa | | acsasa | | CCC | |
| AD- | ususuacaGfaGfAfAfgcaucuu | 2256 | VPusAfsuaaGfaUfGfcuucUfcUfgua | 1716 | AUUUUACAGAGAAGCAUCUU | 1985 |
| 1736238 | asusa | | aasasu | | AUU | |
| AD- | gsuscuugAfgUfUfCfugcauga | 2257 | VPusUfsgucAfuGfCfagaaCfuCfaag | 1717 | AUGUCUUGAGUUCUGCAUGA | 1986 |
| 1736239 | csasa | | acsasu | | CAG | |
| AD- | csusucaaAfuCfUfAfuaauuuu | 2258 | VPusGfsuaaAfaUfUfauagAfuUfuga | 1718 | CCCUUCAAAUCUAUAAUUUU | 1987 |
| 1736240 | ascsa | | agsgsg | | ACU | |
| AD- | gsasagcaUfaUfAfGfaacucua | 2259 | VPusAfsauaGfaGfUfucuaUfaUfgcu | 1719 | GUGAAGCAUAUAGAACUCUA | 1988 |
| 1736241 | ususa | | ucsasc | | UUU | |
| AD- | gsasgcugCfuUfCfUfaaauaac | 2260 | VPusUfsuguUfaUfUfuagaAfgCfagc | 1720 | GAGAGCUGCUUCUAAAUAAC | 1989 |
| 1736242 | asasa | | ucsusc | | AAA | |
| AD- | usgsacugUfaUfUfUfccugauc | 2261 | VPusAfsugaUfcAfGfgaaaUfaCfagu | 1721 | UGUGACUGUAUUUCCUGAUC | 1990 |
| 1736243 | asusa | | cascsa | | AUU | |
| AD- | gsusucugAfaGfGfAfuauacuu | 2262 | VPusAfsgaaGfuAfUfauccUfuCfaga | 1722 | GCGUUCUGAAGGAUAUACUU | 1991 |
| 1736244 | csusa | | acsgsc | | CUG | |
| AD- | gsusgaagCfaUfGfAfuucaaua | 2263 | VPusAfsguaUfuGfAfaucaUfgCfuuc | 1723 | CUGUGAAGCAUGAUUCAAUA | 1992 |
| 1736245 | csusa | | acsasg | | CUG | |
| AD- | asasugcuGfcUfUfCfacagauu | 2264 | VPusAfsaaaUfcUfGfugaaGfcAfgca | 1724 | CGAAUGCUGCUUCACAGAUU | 1993 |
| 1736246 | ususa | | uuscsg | | UUU | |
| AD- | usgsugggUfuAfUfGfuuaaucu | 2265 | VPusUfscagAfuUfAfacauAfaCfcca | 1725 | ACUGUGGGUUAUGUUAAUCU | 1994 |
| 1736247 | gsasa | | casgsu | | GAA | |
| AD- | gsasguacAfgAfAfGfaaugcuc | 2266 | VPusAfsugaGfcAfUfucuuCfuGfuac | 1726 | GUGAGUACAGAAGAAUGCUC | 1995 |
| 1736248 | asusa | | ucsasc | | AUG | |
| AD- | csusguauUfuCfAfUfccuagau | 2267 | VPusAfsaauCfuAfGfgaugAfaAfuac | 1727 | AGCUGUAUUUCAUCCUAGAU | 1996 |
| 1736249 | ususa | | agscsu | | UUU | |
| AD- | asasucugGfuAfAfAfugcugga | 2268 | VPusUfsuucCfaGfCfauuuAfcCfaga | 1728 | GCAAUCUGGUAAAUGCUGGA | 1997 |
| 1736250 | asasa | | uusgsc | | AAA | |
| AD- | usgscucaGfaUfUfAfccugauc | 2269 | VPusAfscgaUfcAfGfguaaUfcUfgag | 1729 | AUUGCUCAGAUUACCUGAUC | 1998 |
| 1736251 | gsusa | | casasu | | GUG | |
| AD- | gsascagcUfaUfGfGfaguuugc | 2270 | VPusAfscgcAfaAfCfuccaUfaGfcug | 1730 | CUGACAGCUAUGGAGUUUGC | 1999 |
| 1736252 | gsusa | | ucsasg | | GUG | |
| AD- | usasgaacAfuGfCfUfcacuuac | 2271 | VPusUfsuguAfaGfUfgagcAfuGfuuc | 1731 | UAUAGAACAUGCUCACUUAC | 2000 |
| 1736253 | asasa | | uasusa | | AAA | |
| AD- | asusuaugCfuUfCfAfuuucacu | 2272 | VPusAfsuagUfgAfAfaugaAfgCfaua | 1732 | UGAUUAUGCUUCAUUUCACU | 2001 |
| 1736254 | asusa | | auscsa | | AUG | |
| AD- | csasacagCfaAfGfUfcauaaaa | 2273 | VPusAfscuuUfuAfUfgacuUfgCfugu | 1733 | ACCAACAGCAAGUCAUAAAA | 2002 |
| 1736255 | gsusa | | ugsgsu | | GUA | |
| AD- | ususgucuGfaAfAfAfugucuuu | 2274 | VPusUfsuaaAfgAfCfauuuUfcAfgac | 1734 | CAUUGUCUGAAAAUGUCUUU | 2003 |
| 1736256 | asasa | | aasusg | | AAG | |
| AD- | usgsuuggUfuCfAfAfaggacaa | 2275 | VPusAfsauuGfuCfCfuuugAfaCfcaa | 1735 | UCUGUUGGUUCAAAGGACAA | 2004 |
| 1736257 | ususa | | casgsa | | UUG | |
| AD- | uscsuaaaCfuUfUfAfauauauc | 2276 | VPusUfscgaUfaUfAfuuaaAfgUfuua | 1736 | GCUCUAAACUUUAAUAUAUC | 2005 |
| 1736258 | gsasa | | gasgsc | | GAA | |
| AD- | asasgugaAfaCfAfUfgacuguc | 2277 | VPusAfscgaCfaGfUfcaugUfuUfcac | 1737 | UUAAGUGAAACAUGACUGUC | 2006 |
| 1736259 | gsusa | | uusasa | | GUG | |
| AD- | asuscgucCfaUfAfCfaguuuuc | 2278 | VPusAfsugaAfaAfCfuguaUfgGfacg | 1738 | AUAUCGUCCAUACAGUUUUC | 2007 |
| 1736260 | asusa | | ausasu | | AUU | |
| AD- | csusucagGfaAfAfUfaguagga | 2279 | VPusUfsuucCfuAfCfuauuUfcCfuga | 1739 | UGCUUCAGGAAAUAGUAGGA | 2008 |
| 1736261 | asasa | | agscsa | | AAA | |
| AD- | csascccuUfuCfUfGfuaaggac | 2280 | VPusCfsaguCfcUfUfacagAfaAfggg | 1740 | CCCACCCUUUCUGUAAGGAC | 2009 |
| 1736262 | usgsa | | ugsgsg | | UGU | |
| AD- | asasagagAfuAfCfCfugacauc | 2281 | VPusAfsggaUfgUfCfagguAfuCfucu | 1741 | CAAAAGAGAUACCUGACAUC | 2010 |
| 1736263 | csusa | | uususg | | CUG | |
| AD- | asusgagcAfuUfAfAfuguuuuc | 2282 | VPusCfsagaAfaAfCfauuaAfuGfcuc | 1742 | UAAUGAGCAUUAAUGUUUUC | 2011 |
| 1736264 | usgsa | | aususa | | UGA | |
| AD- | usgsacauUfuUfUfUfcucauag | 2283 | VPusUfsucuAfuGfAfgaaaAfaAfugu | 1743 | GUUGACAUUUUUUCUCAUAG | 2012 |
| 1736265 | asasa | | casasc | | AAA | |
| AD- | csasgagaUfuAfAfAfugacuac | 2284 | VPusUfsaguAfgUfCfauuuAfaUfcuc | 1744 | AUCAGAGAUUAAAUGACUAC | 2013 |
| 1736266 | usasa | | ugsasu | | UAG | |
| AD- | gscsugucAfaAfUfGfuuauauu | 2285 | VPusAfscaaUfaUfAfacauUfuGfaca | 1745 | AUGCUGUCAAAUGUUAUAUU | 2014 |
| 1736267 | gsusa | | gcsasu | | GUU | |
| AD- | asasuauaAfuAfCfUfacagcaa | 2286 | VPusUfsuuuGfcUfGfuaguAfuUfaua | 1746 | GGAAUAUAAUACUACAGCAA | 2015 |
| 1736268 | asasa | | uuscsc | | AAU | |
| AD- | gsgsugucUfaAfAfUfauaauuu | 2287 | VPusUfsgaaAfuUfAfuauuUfaGfaca | 1747 | AGGGUGUCUAAAUAUAAUUU | 2016 |
| 1736269 | csasa | | ccscsu | | CAU | |
| AD- | csuscuuuAfuAfCfAfaaaugag | 2288 | VPusCfsucuCfaUfUfuuguAfuAfaag | 1748 | UUCUCUUUAUACAAAAUGAG | 2017 |
| 1736270 | asgsa | | agsasa | | AGU | |
| AD- | gscsaguaCfcAfAfAfugaauaa | 2289 | VPusUfsuuuAfuUfCfauuuGfgUfacu | 1749 | UAGCAGUACCAAAUGAAUAA | 2018 |
| 1736271 | asasa | | gcsusa | | AAG | |
| AD- | ususguugGfuAfCfAfcaaggua | 2290 | VPusUfsuuaCfcUfUfguguAfcCfaac | 1750 | GAUUGUUGGUACACAAGGUA | 2019 |
| 1736272 | asasa | | aasusc | | AAC | |
| AD- | csuscuuaUfuUfAfAfcuuaacc | 2291 | VPusAfscggUfuAfAfguuaAfaUfaag | 1751 | AACUCUUAUUUAACUUAACC | 2020 |
| 1736273 | gsusa | | agsusu | | GUC | |
| AD- | usgscuugAfuGfAfUfacaauga | 2292 | VPusAfsuucAfuUfGfuaucAfuCfaag | 1752 | AAUGCUUGAUGAUACAAUGA | 2021 |
| 1736274 | asusa | | casusu | | AUG | |
| AD- | asascuggGfaAfAfGfacaauuu | 2293 | VPusUfscaaAfuUfGfucuuUfcCfcag | 1753 | GUAACUGGGAAAGACAAUUU | 2022 |
| 1736275 | gsasa | | uusasc | | GAA | |
| AD- | csusccuuAfuAfUfGfacuauuu | 2294 | VPusUfscaaAfuAfGfucauAfuAfagg | 1754 | GGCUCCUUAUAUGACUAUUU | 2023 |
| 1736276 | gsasa | | agscsc | | GAA | |
| AD- | asgsucauGfcUfAfAfccaaugg | 2295 | VPusUfsuccAfuUfGfguuaGfcAfuga | 1755 | UCAGUCAUGCUAACCAAUGG | 2024 |
| 1736277 | asasa | | cusgsa | | AAA | |
| AD- | cscsugaaGfuCfAfCfacagcua | 2296 | VPusAfsuuaGfcUfGfugugAfcUfuca | 1756 | GUCCUGAAGUCACACAGCUA | 2025 |
| 1736278 | asusa | | ggsasc | | AUG | |
| AD- | ususgcugCfuGfAfCfaacaaag | 2297 | VPusAfsucuUfuGfUfugucAfgCfagc | 1757 | CAUUGCUGCUGACAACAAAG | 2026 |
| 1736279 | asusa | | aasusg | | AUA | |
| AD- | usascugaCfuUfUfGfccuguaa | 2298 | VPusCfsuuuAfcAfGfgcaaAfgUfcag | 1758 | AUUACUGACUUUGCCUGUAA | 2027 |
| 1736280 | asgsa | | uasasu | | AGA | |
| AD- | asasucccUfaUfUfUfuaaaauu | 2299 | VPusGfsgaaUfuUfUfaaaaUfaGfgga | 1759 | ACAAUCCCUAUUUUAAAAUU | 2028 |
| 1736281 | cscsa | | uusgsu | | CCC | |
| AD- | gsusgccuUfaGfGfAfgauuacc | 2300 | VPusAfsgggUfaAfUfcuccUfaAfggc | 1760 | GAGUGCCUUAGGAGAUUACC | 2029 |
| 1736282 | csusa | | acsusc | | CUU | |
| AD- | gsascaauCfuAfAfAfuauauca | 2301 | VPusGfsaugAfuAfUfauuuAfgAfuug | 1761 | CAGACAAUCUAAAUAUAUCA | 2030 |
| 1736283 | uscsa | | ucsusg | | UCA | |
| AD- | usgsugauAfaUfGfAfacaccgu | 2302 | VPusUfsuacGfgUfGfuucaUfuAfuca | 1762 | CUUGUGAUAAUGAACACCGU | 2031 |
| 1736284 | asasa | | casasg | | AAG | |
| AD- | uscsaccgUfuGfUfAfaagacuu | 2303 | VPusAfsaaaGfuCfUfuuacAfaCfggu | 1763 | AAUCACCGUUGUAAAGACUU | 2032 |
| 1736285 | ususa | | gasusu | | UUU | |
| AD- | ususagagAfaGfCfUfuccugac | 2304 | VPusAfsuguCfaGfGfaagcUfuCfucu | 1764 | GAUUAGAGAAGCUUCCUGAC | 2033 |
| 1736286 | asusa | | aasusc | | AUC | |
| AD- | asascaguAfaAfGfAfaaugcua | 2305 | VPusAfsguaGfcAfUfuucuUfuAfcug | 1765 | AUAACAGUAAAGAAAUGCUA | 2034 |
| 1736287 | csusa | | uusasu | | CUU | |
| AD- | usasuguuCfuGfAfCfuugagag | 2306 | VPusAfsacuCfuCfAfagucAfgAfaca | 1766 | UUUAUGUUCUGACUUGAGAG | 2035 |
| 1736288 | ususa | | uasasa | | UUA | |
| AD- | ususagagCfaUfGfCfuaucuuu | 2307 | VPusCfsuaaAfgAfUfagcaUfgCfucu | 1767 | AAUUAGAGCAUGCUAUCUUU | 2036 |
| 1736289 | asgsa | | aasusu | | AGG | |
| AD- | usasgucuUfuGfAfUfugaaaua | 2308 | VPusCfsuuaUfuUfCfaaucAfaAfgac | 1768 | CAUAGUCUUUGAUUGAAAUA | 2037 |
| 1736290 | asgsa | | uasusg | | AGU | |
| AD- | ususgguaAfaCfGfAfgauuuaa | 2309 | VPusUfsguuAfaAfUfcucgUfuUfacc | 1769 | CUUUGGUAAACGAGAUUUAA | 2038 |
| 1736291 | csasa | | aasasg | | CAU | |
| AD- | gsuscugaAfaAfUfUfgcuuuca | 2310 | VPusAfsaugAfaAfGfcaauUfuUfcag | 1770 | AGGUCUGAAAAUUGCUUUCA | 2039 |
| 1736292 | ususa | | acscsu | | UUU | |
| AD- | asusgaacUfuGfUfUfgccuugu | 2311 | VPusUfsuacAfaGfGfcaacAfaGfuuc | 1771 | GCAUGAACUUGUUGCCUUGU | 2040 |
| 1736293 | asasa | | ausgsc | | AAA | |
| AD- | gsgsgcaaUfaAfAfCfuguauca | 2312 | VPusUfsuugAfuAfCfaguuUfaUfugc | 1772 | UUGGGCAAUAAACUGUAUCA | 2041 |
| 1736294 | asasa | | ccsasa | | AAA | |
| AD- | ascsauguUfaGfCfAfuauaaug | 2313 | VPusUfsacaUfuAfUfaugcUfaAfcau | 1773 | GUACAUGUUAGCAUAUAAUG | 2042 |
| 1736295 | usasa | | gusasc | | UAU | |
| AD- | usgsugagAfgUfAfUfagaauuu | 2314 | VPusAfsgaaAfuUfCfuauaCfuCfuca | 1774 | ACUGUGAGAGUAUAGAAUUU | 2043 |
| 1736296 | csusa | | casgsu | | CUU | |
| AD- | asusccuuCfaUfUfUfggcacua | 2315 | VPusUfsauaGfuGfCfcaaaUfgAfagg | 1775 | UAAUCCUUCAUUUGGCACUA | 2044 |
| 1736297 | usasa | | aususa | | UAG | |
| AD- | ascsauuuAfgAfAfAfguagcuu | 2316 | VPusUfsaaaGfcUfAfcuuuCfuAfaau | 1776 | ACACAUUUAGAAAGUAGCUU | 2045 |
| 1736298 | usasa | | gusgsu | | UAU | |
| AD- | asascuguUfcUfAfUfaaagcaa | 2317 | VPusCfsuuuGfcUfUfuauaGfaAfcag | 1777 | UUAACUGUUCUAUAAAGCAA | 2046 |
| 1736299 | asgsa | | uusasa | | AGC | |
| AD- | cscsuccaGfaGfAfUfgaaagau | 2318 | VPusAfsgauCfuUfUfcaucUfcUfgga | 1778 | CUCCUCCAGAGAUGAAAGAU | 2047 |
| 1736300 | csusa | | ggsasg | | CUU | |
| AD- | ususguuuAfaCfUfAfugacucc | 2319 | VPusUfsaggAfgUfCfauagUfuAfaac | 1779 | UGUUGUUUAACUAUGACUCC | 2048 |
| 1736301 | usasa | | aascsa | | UAA | |
| AD- | csusguuuGfaCfAfAfugcuuug | 2320 | VPusAfsacaAfaGfCfauugUfcAfaac | 1780 | UUCUGUUUGACAAUGCUUUG | 2049 |
| 1736302 | ususa | | agsasa | | UUC | |
| AD- | usgsuccuAfaAfAfGfaaauuuu | 2321 | VPusGfsaaaAfaUfUfucuuUfuAfgga | 1781 | GUUGUCCUAAAAGAAAUUUU | 2050 |
| 1736303 | uscsa | | casasc | | UCU | |
| AD- | ascsagauUfgAfAfCfaaagaac | 2322 | VPusAfsaguUfcUfUfuguuCfaAfucu | 1782 | CUACAGAUUGAACAAAGAAC | 2051 |
| 1736304 | ususa | | gusasg | | UUA | |
| AD- | gsusuuaaCfcUfGfUfccaaacu | 2323 | VPusGfsaagUfuUfGfgacaGfgUfuaa | 1783 | UCGUUUAACCUGUCCAAACU | 2052 |
| 1736305 | uscsa | | acsgsa | | UCU | |
| AD- | csasaaauGfuUfUfAfacuuuac | 2324 | VPusUfsgguAfaAfGfuuaaAfcAfuuu | 1784 | ACCAAAAUGUUUAACUUUAC | 2053 |
| 1736306 | csasa | | ugsgsu | | CAA | |
| AD- | uscsccauUfgUfGfUfaauauuu | 2325 | VPusAfsuaaAfuAfUfuacaCfaAfugg | 1785 | AGUCCCAUUGUGUAAUAUUU | 2054 |
| 1736307 | asusa | | gascsu | | AUU | |
| AD- | gsusugggUfaAfAfUfaugcuua | 2326 | VPusAfsauaAfgCfAfuauuUfaCfcca | 1786 | AUGUUGGGUAAAUAUGCUUA | 2055 |
| 1736308 | ususa | | acsasu | | UUG | |
| AD- | csasggguUfgUfCfUfuugaguc | 2327 | VPusCfsagaCfuCfAfaagaCfaAfccc | 1787 | CUCAGGGUUGUCUUUGAGUC | 2056 |
| 1736309 | usgsa | | ugsasg | | UGC | |
| AD- | gscsuaaaAfuCfCfAfacugcaa | 2328 | VPusAfsauuGfcAfGfuuggAfuUfuua | 1788 | GGGCUAAAAUCCAACUGCAA | 2057 |
| 1736310 | ususa | | gcscsc | | UUG | |
| AD- | csasggacUfgAfAfGfuguguau | 2329 | VPusAfscauAfcAfCfacuuCfaGfucc | 1789 | GCCAGGACUGAAGUGUGUAU | 2058 |
| 1736311 | gsusa | | ugsgsc | | GUC | |
| AD- | gsasguacCfaAfUfUfgccuuau | 2330 | VPusUfsaauAfaGfGfcaauUfgGfuac | 1790 | AGGAGUACCAAUUGCCUUAU | 2059 |
| 1736312 | usasa | | ucscsu | | UAU | |
| AD- | asasgugcCfuAfUfGfugaagug | 2331 | VPusAfsucaCfuUfCfacauAfgGfcac | 1791 | AAAAGUGCCUAUGUGAAGUG | 2060 |
| 1736313 | asusa | | uususu | | AUU | |
| AD- | usasacaaUfaAfUfAfgaacugc | 2332 | VPusUfsggcAfgUfUfcuauUfaUfugu | 1792 | CCUAACAAUAAUAGAACUGC | 2061 |
| 1736314 | csasa | | uasgsg | | CAG | |
| AD- | gscsuguuCfcAfUfAfccauugc | 2333 | VPusAfsagcAfaUfGfguauGfgAfaca | 1793 | CUGCUGUUCCAUACCAUUGC | 2062 |
| 1736315 | ususa | | gcsasg | | UUU | |
| AD- | usasgacuGfgAfGfAfagauuau | 2334 | VPusGfsaauAfaUfCfuucuCfcAfguc | 1794 | UCUAGACUGGAGAAGAUUAU | 2063 |
| 1736316 | uscsa | | uasgsa | | UCA | |
| AD- | ususccaaCfaGfCfAfucaccaa | 2335 | VPusAfsuuuGfgUfGfaugcUfgUfugg | 1795 | CCUUCCAACAGCAUCACCAA | 2064 |
| 1736317 | asusa | | aasgsg | | AUG | |
| AD- | usasauugGfuAfCfAfgauucug | 2336 | VPusAfsacaGfaAfUfcuguAfcCfaau | 1796 | UGUAAUUGGUACAGAUUCUG | 2065 |
| 1736318 | ususa | | uascsa | | UUG | |
| AD- | gsasgaaaCfaUfUfAfuuuguug | 2337 | VPusGfsacaAfcAfAfauaaUfgUfuuc | 1797 | AAGAGAAACAUUAUUUGUUG | 2066 |
| 1736319 | uscsa | | ucsusu | | UCA | |
| AD- | csgscucuCfaAfUfUfgcuagug | 2338 | VPusAfsccaCfuAfGfcaauUfgAfgag | 1798 | GGCGCUCUCAAUUGCUAGUG | 2067 |
| 1736320 | gsusa | | cgscsc | | GUC | |
| AD- | csgsguauCfaGfAfAfacagcaa | 2339 | VPusAfsuuuGfcUfGfuuucUfgAfuac | 1799 | GACGGUAUCAGAAACAGCAA | 2068 |
| 1736321 | asusa | | cgsusc | | AUA | |
| AD- | cscscagaCfaUfAfAfuuuuaua | 2340 | VPusAfsauaUfaAfAfauuaUfgUfcug | 1800 | CUCCCAGACAUAAUUUUAUA | 2069 |
| 1736322 | ususa | | ggsasg | | UUU | |
| AD- | usasguacAfuUfUfUfgagguau | 2341 | VPusAfsaauAfcCfUfcaaaAfuGfuac | 1801 | GUUAGUACAUUUUGAGGUAU | 2070 |
| 1736323 | ususa | | uasasc | | UUU | |
| AD- | asasaugcUfaUfUfGfauaacag | 2342 | VPusUfsacuGfuUfAfucaaUfaGfcau | 1802 | GUAAAUGCUAUUGAUAACAG | 2071 |
| 1736324 | usasa | | uusasc | | UAA | |
| AD- | usasgcugAfaUfUfUfgggacua | 2343 | VPusCfsauaGfuCfCfcaaaUfuCfagc | 1803 | GAUAGCUGAAUUUGGGACUA | 2072 |
| 1736325 | usgsa | | uasusc | | UGU | |
| AD- | asusugugGfuUfUfUfcaaagau | 2344 | VPusAfsuauCfuUfUfgaaaAfcCfaca | 1804 | CCAUUGUGGUUUUCAAAGAU | 2073 |
| 1736326 | asusa | | ausgsg | | AUU | |
| AD- | cscsugguUfgCfAfGfuaucuga | 2345 | VPusUfsuucAfgAfUfacugCfaAfcca | 1805 | AACCUGGUUGCAGUAUCUGA | 2074 |
| 1736327 | asasa | | ggsusu | | AAA | |
| AD- | usasgaauGfgUfUfGfuugagcu | 2346 | VPusUfsuagCfuCfAfacaaCfcAfuuc | 1806 | UGUAGAAUGGUUGUUGAGCU | 2075 |
| 1736328 | asasa | | uascsa | | AAG | |
| AD- | csusggccAfuCfAfUfuauuacu | 2347 | VPusAfscagUfaAfUfaaugAfuGfgcc | 1807 | AGCUGGCCAUCAUUAUUACU | 2076 |
| 1736329 | gsusa | | agscsu | | GUG | |
| AD- | ususgacaGfaUfAfAfaauacga | 2348 | VPusCfsuucGfuAfUfuuuaUfcUfguc | 1808 | AAUUGACAGAUAAAAUACGA | 2077 |
| 1736330 | asgsa | | aasusu | | AGU | |
| AD- | uscsacaaAfcAfCfAfucauuac | 2349 | VPusUfsuguAfaUfGfauguGfuUfugu | 1809 | AUUCACAAACACAUCAUUAC | 2078 |
| 1736331 | asasa | | gasasu | | AAG | |
| AD- | cscsaugaUfuGfUfAfugaaaau | 2350 | VPusCfsuauUfuUfCfauacAfaUfcau | 1810 | UUCCAUGAUUGUAUGAAAAU | 2079 |
| 1736332 | asgsa | | ggsasa | | AGU | |
| AD- | csascagaGfuAfAfUfgaauauu | 2351 | VPusUfsaaaUfaUfUfcauuAfcUfcug | 1811 | GACACAGAGUAAUGAAUAUU | 2080 |
| 1736333 | usasa | | ugsusc | | UAA | |
| AD- | asgscugcUfuAfGfUfggaagau | 2352 | VPusAfscauCfuUfCfcacuAfaGfcag | 1812 | GGAGCUGCUUAGUGGAAGAU | 2081 |
| 1736334 | gsusa | | cuscsc | | GUA | |
| AD- | usasgcucUfgUfGfUfgcugaua | 2353 | VPusGfsguaUfcAfGfcacaCfaGfagc | 1813 | UCUAGCUCUGUGUGCUGAUA | 2082 |
| 1736335 | cscsa | | uasgsa | | CCU | |
| AD- | csasuucgAfgAfGfAfauaugag | 2354 | VPusAfsgcuCfaUfAfuucuCfuCfgaa | 1814 | UACAUUCGAGAGAAUAUGAG | 2083 |
| 1736336 | csusa | | ugsusa | | CUG | |
| AD- | asusgcauUfuUfCfUfgaaaaug | 2355 | VPusUfsacaUfuUfUfcagaAfaAfugc | 1815 | GUAUGCAUUUUCUGAAAAUG | 2084 |
| 1736337 | usasa | | ausasc | | UAU | |
| AD- | gsusuucgAfcCfAfAfguauccc | 2356 | VPusUfsuggGfaUfAfcuugGfuCfgaa | 1816 | AAGUUUCGACCAAGUAUCCC | 2085 |
| 1736338 | asasa | | acsusu | | AAA | |
| AD- | uscsuugcUfuGfCfCfacaauau | 2357 | VPusCfsgauAfuUfGfuggcAfaGfcaa | 1817 | UAUCUUGCUUGCCACAAUAU | 2086 |
| 1736339 | csgsa | | gasusa | | CGG | |
| AD- | gsgsguacAfaGfAfGfggaauac | 2358 | VPusUfsuguAfuUfCfccucUfuGfuac | 1818 | UCGGGUACAAGAGGGAAUAC | 2087 |
| 1736340 | asasa | | ccsgsa | | AAA | |
| AD- | gsgsugauCfaAfAfUfccugugu | 2359 | VPusAfsgacAfcAfGfgauuUfgAfuca | 1819 | CAGGUGAUCAAAUCCUGUGU | 2088 |
| 1736341 | csusa | | ccsusg | | CUC | |
| AD- | csasguggGfuUfUfCfuaggaua | 2360 | VPusCfscuaUfcCfUfagaaAfcCfcac | 1820 | GACAGUGGGUUUCUAGGAUA | 2089 |
| 1736342 | gsgsa | | ugsusc | | GGU | |
| AD- | asascuaaGfuAfUfUfuuuaagg | 2361 | VPusGfsuccUfuAfAfaaauAfcUfuag | 1821 | GUAACUAAGUAUUUUUAAGG | 2090 |
| 1736343 | ascsa | | uusasc | | ACA | |
| AD- | csasuaauGfuGfAfUfuguuaaa | 2362 | VPusAfsauuUfaAfCfaaucAfcAfuua | 1822 | CCCAUAAUGUGAUUGUUAAA | 2091 |
| 1736344 | ususa | | ugsgsg | | UUU | |
| AD- | gsasgaagAfaUfUfAfagaaaac | 2363 | VPusGfsaguUfuUfCfuuaaUfuCfuuc | 1823 | UUGAGAAGAAUUAAGAAAAC | 2092 |
| 1736345 | uscsa | | ucsasa | | UCU | |
| AD- | gsasagagAfaAfUfUfgauuguu | 2364 | VPusUfsaaaCfaAfUfcaauUfuCfucu | 1824 | GAGAAGAGAAAUUGAUUGUU | 2093 |
| 1736346 | usasa | | ucsusc | | UAU | |
| AD- | asgsugugAfaAfCfUfugugcca | 2365 | VPusUfsaugGfcAfCfaaguUfuCfaca | 1825 | AAAGUGUGAAACUUGUGCCA | 2094 |
| 1736347 | usasa | | cususu | | UAG | |
| AD- | csusgagaCfaCfUfGfagaaaug | 2366 | VPusGfsacaUfuUfCfucagUfgUfcuc | 1826 | UCCUGAGACACUGAGAAAUG | 2095 |
| 1736348 | uscsa | | agsgsa | | UCC | |
| AD- | usgsgcuuAfuAfUfGfuguuuaa | 2367 | VPusCfsuuuAfaAfCfacauAfuAfagc | 1827 | AUUGGCUUAUAUGUGUUUAA | 2096 |
| 1736349 | asgsa | | casasu | | AGA | |
| AD- | usgscauuUfuGfAfCfauugcaa | 2368 | VPusUfsuuuGfcAfAfugucAfaAfaug | 1828 | AUUGCAUUUUGACAUUGCAA | 2097 |
| 1736350 | asasa | | casasu | | AAC | |
| AD- | ususagguUfaGfAfAfguuccag | 2369 | VPusUfsucuGfgAfAfcuucUfaAfccu | 1829 | CAUUAGGUUAGAAGUUCCAG | 2098 |
| 1736351 | asasa | | aasusg | | AAU | |
| AD- | usgscgacAfuGfAfAfaacaucc | 2370 | VPusAfsaggAfuGfUfuuucAfuGfucg | 1830 | GCUGCGACAUGAAAACAUCC | 2099 |
| 1736352 | ususa | | casgsc | | UUG | |
| AD- | gsasgaggAfuUfUfUfuuaccau | 2371 | VPusAfsgauGfgUfAfaaaaAfuCfcuc | 1831 | AAGAGAGGAUUUUUUACCAU | 2100 |
| 1736353 | csusa | | ucsusu | | CUC | |
| AD- | gsasagguGfaAfGfAfgaauuuc | 2372 | VPusUfsugaAfaUfUfcucuUfcAfccu | 1832 | UGGAAGGUGAAGAGAAUUUC | 2101 |
| 1736354 | asasa | | ucscsa | | AAA | |
| AD- | usgsguauCfuGfAfAfuaucaug | 2373 | VPusUfsucaUfgAfUfauucAfgAfuac | 1833 | GCUGGUAUCUGAAUAUCAUG | 2102 |
| 1736355 | asasa | | casgsc | | AAC | |
| AD- | usgsuuggUfuUfAfAfuuuuuca | 2374 | VPusGfsuugAfaAfAfauuaAfaCfcaa | 1834 | CAUGUUGGUUUAAUUUUUCA | 2103 |
| 1736356 | ascsa | | casusg | | ACC | |
| AD- | usasguugUfaAfUfUfuaaaugu | 2375 | VPusCfscacAfuUfUfaaauUfaCfaac | 1835 | AGUAGUUGUAAUUUAAAUGU | 2104 |
| 1736357 | gsgsa | | uascsu | | GGA | |
| AD- | gsusgaauGfuUfUfUfugccauu | 2376 | VPusAfsaaaUfgGfCfaaaaAfcAfuuc | 1836 | AUGUGAAUGUUUUUGCCAUU | 2105 |
| 1736358 | ususa | | acsasu | | UUU | |
| AD- | csasgagaUfgAfUfUfuuucuuu | 2377 | VPusUfsaaaAfgAfAfaaauCfaUfcuc | 1837 | GGCAGAGAUGAUUUUUCUUU | 2106 |
| 1736359 | usasa | | ugscsc | | UAA | |
| AD- | asgsaaaaUfuAfGfAfuucagau | 2378 | VPusAfsgauCfuGfAfaucuAfaUfuuu | 1838 | ACAGAAAAUUAGAUUCAGAU | 2107 |
| 1736360 | csusa | | cusgsu | | CUC | |
| AD- | ascsuggaAfaAfUfUfaagaaag | 2379 | VPusUfsacuUfuCfUfuaauUfuUfcca | 1839 | CCACUGGAAAAUUAAGAAAG | 2108 |
| 1736361 | usasa | | gusgsg | | UAG | |
| AD- | usasaaguGfgGfAfAfagauaau | 2380 | VPusUfsuauUfaUfCfuuucCfcAfcuu | 1840 | UGUAAAGUGGGAAAGAUAAU | 2109 |
| 1736362 | asasa | | uascsa | | AAA | |
| AD- | csusaggcUfaAfGfAfaagaguu | 2381 | VPusAfscaaCfuCfUfuucuUfaGfccu | 1841 | AACUAGGCUAAGAAAGAGUU | 2110 |
| 1736363 | gsusa | | agsusu | | GUA | |
| AD- | gscsugauAfaAfAfUfuaaugga | 2382 | VPusUfsaucCfaUfUfaauuUfuAfuca | 1842 | GUGCUGAUAAAAUUAAUGGA | 2111 |
| 1736364 | usasa | | gcsasc | | UAA | |
| AD- | cscsuguaUfuUfCfUfuuaguug | 2383 | VPusGfsacaAfcUfAfaagaAfaUfaca | 1843 | UUCCUGUAUUUCUUUAGUUG | 2112 |
| 1736365 | uscsa | | ggsasa | | UCG | |
| AD- | ususuguuUfuGfCfUfuuugaca | 2384 | VPusUfsuugUfcAfAfaagcAfaAfaca | 1844 | GCUUUGUUUUGCUUUUGACA | 2113 |
| 1736366 | asasa | | aasgsc | | AAC | |
| AD- | usgsgcugUfgAfAfAfauauucu | 2385 | VPusGfsgagAfaUfAfuuuuCfaCfagc | 1845 | UGUGGCUGUGAAAAUAUUCU | 2114 |
| 1736367 | cscsa | | cascsa | | CCU | |
| AD- | ascsuauuUfuAfGfGfcauagca | 2386 | VPusAfsgugCfuAfUfgccuAfaAfaua | 1846 | GCACUAUUUUAGGCAUAGCA | 2115 |
| 1736368 | csusa | | gusgsc | | CUU | |
| AD- | ususucagUfaCfUfGfuauaaag | 2387 | VPusCfsacuUfuAfUfacagUfaCfuga | 1847 | AUUUUCAGUACUGUAUAAAG | 2116 |
| 1736369 | usgsa | | aasasu | | UGG | |
| AD- | gsusgaugCfaAfUfCfuauguuu | 2388 | VPusGfsgaaAfcAfUfagauUfgCfauc | 1848 | AGGUGAUGCAAUCUAUGUUU | 2117 |
| 1736370 | cscsa | | acscsu | | CCC | |
| AD- | usgsuuugGfcAfGfAfucucauc | 2389 | VPusUfsugaUfgAfGfaucuGfcCfaaa | 1849 | AAUGUUUGGCAGAUCUCAUC | 2118 |
| 1736371 | asasa | | casusu | | AAU | |
| AD- | asasgguuGfuUfUfGfugaccag | 2390 | VPusUfsucuGfgUfCfacaaAfcAfacc | 1850 | GAAAGGUUGUUUGUGACCAG | 2119 |
| 1736372 | asasa | | uususc | | AAG | |
| AD- | gsgsaaggAfaAfUfAfuuuugag | 2391 | VPusUfsucuCfaAfAfauauUfuCfcuu | 1851 | AAGGAAGGAAAUAUUUUGAG | 2120 |
| 1736373 | asasa | | ccsusu | | AAU | |
| AD- | ususuuggUfaGfCfGfugacucu | 2392 | VPusGfsaagAfgUfCfacgcUfaCfcaa | 1852 | UCUUUUGGUAGCGUGACUCU | 2121 |
| 1736374 | uscsa | | aasgsa | | UCU | |
| AD- | usgsaacaGfgAfAfAfagaugua | 2393 | VPusUfsuuaCfaUfCfuuuuCfcUfguu | 1853 | AAUGAACAGGAAAAGAUGUA | 2122 |
| 1736375 | asasa | | casusu | | AAA | |
| AD- | gsgsgaacCfaAfGfAfgguauau | 2394 | VPusCfscauAfuAfCfcucuUfgGfuuc | 1854 | GUGGGAACCAAGAGGUAUAU | 2123 |
| 1736376 | gsgsa | | ccsasc | | GGC | |
| AD- | usgsgcacUfaGfGfUfccaaauc | 2395 | VPusAfsagaUfuUfGfgaccUfaGfugc | 1855 | ACUGGCACUAGGUCCAAAUC | 2124 |
| 1736377 | ususa | | casgsu | | UUG | |
| AD- | csascaccUfuCfAfUfauggaga | 2396 | VPusAfsaucUfcCfAfuaugAfaGfgug | 1856 | GGCACACCUUCAUAUGGAGA | 2125 |
| 1736378 | ususa | | ugscsc | | UUG | |
| AD- | csusgguuUfaCfUfGfggaaaua | 2397 | VPusGfscuaUfuUfCfccagUfaAfacc | 1857 | GUCUGGUUUACUGGGAAAUA | 2126 |
| 1736379 | gscsa | | agsasc | | GCC | |
| AD- | gscsccaaAfgGfAfAfuguauau | 2398 | VPusUfsuauAfuAfCfauucCfuUfugg | 1858 | AGGCCCAAAGGAAUGUAUAU | 2127 |
| 1736380 | asasa | | gcscsu | | AAG | |
| AD- | ususaacuGfcAfAfGfaguuuac | 2399 | VPusCfsaguAfaAfCfucuuGfcAfguu | 1859 | UUUUAACUGCAAGAGUUUAC | 2128 |
| 1736381 | usgsa | | aasasa | | UGU | |
| AD- | gsasaccaCfuCfUfCfugagugc | 2400 | VPusUfsugcAfcUfCfagagAfgUfggu | 1860 | AGGAACCACUCUCUGAGUGC | 2129 |
| 1736382 | asasa | | ucscsu | | AAU | |
| AD- | ususaucuUfuUfCfAfuccuggc | 2401 | VPusAfsugcCfaGfGfaugaAfaAfgau | 1861 | CUUUAUCUUUUCAUCCUGGC | 2130 |
| 1736383 | asusa | | aasasg | | AUU | |
| AD- | gsusgaguGfuUfGfGfuaugcca | 2402 | VPusGfsuugGfcAfUfaccaAfcAfcuc | 1862 | GCGUGAGUGUUGGUAUGCCA | 2131 |
| 1736384 | ascsa | | acsgsc | | ACG | |
| AD- | asgsaaugUfaUfUfUfggcuaaa | 2403 | VPusUfsauuUfaGfCfcaaaUfaCfauu | 1863 | UGAGAAUGUAUUUGGCUAAA | 2132 |
| 1736385 | usasa | | cuscsa | | UAA | |
| AD- | gsasacccUfuUfUfAfuuaagag | 2404 | VPusUfsccuCfuUfAfauaaAfaGfggu | 1864 | UGGAACCCUUUUAUUAAGAG | 2133 |
| 1736386 | gsasa | | ucscsa | | GAG | |
| AD- | csusccugUfcCfAfUfagcugcg | 2405 | VPusAfsucgCfaGfCfuaugGfaCfagg | 1865 | GCCUCCUGUCCAUAGCUGCG | 2134 |
| 1736387 | asusa | | agsgsc | | AUG | |
| AD- | ascsugagUfuGfAfAfauaagga | 2406 | VPusCfsuucCfuUfAfuuucAfaCfuca | 1866 | UUACUGAGUUGAAAUAAGGA | 2135 |
| 1736388 | asgsa | | gusasa | | AGG | |
| AD- | csusgccaAfaCfAfGfaaggagc | 2407 | VPusAfsugcUfcCfUfucugUfuUfggc | 1867 | ACCUGCCAAACAGAAGGAGC | 2136 |
| 1736389 | asusa | | agsgsu | | AUG | |
| AD- | gsgscaaaGfuUfGfUfgaagcac | 2408 | VPusGfsaguGfcUfUfcacaAfcUfuug | 1868 | GUGGCAAAGUUGUGAAGCAC | 2137 |
| 1736390 | uscsa | | ccsasc | | UCC | |
| AD- | asusaggaUfgAfUfGfaaguuua | 2409 | VPusUfscuaAfaCfUfucauCfaUfccu | 1869 | AAAUAGGAUGAUGAAGUUUA | 2138 |
| 1736391 | gsasa | | aususu | | GAG | |
| AD- | asusucguAfuCfUfUfaaaaugg | 2410 | VPusUfsgccAfuUfUfuaagAfuAfcga | 1870 | GUAUUCGUAUCUUAAAAUGG | 2139 |
| 1736392 | csasa | | ausasc | | CAC | |
| AD- | csascagcUfuGfGfGfuaauagc | 2411 | VPusAfscgcUfaUfUfacccAfaGfcug | 1871 | AGCACAGCUUGGGUAAUAGC | 2140 |
| 1736393 | gsusa | | ugscsu | | GUU | |
| AD- | ususugcaAfcAfAfCfauaacac | 2412 | VPusCfsaguGfuUfAfuguuGfuUfgca | 1872 | UUUUUGCAACAACAUAACAC | 2141 |
| 1736394 | usgsa | | aasasa | | UGC | |
| AD- | usgsccacCfaUfGfUfgacuuau | 2413 | VPusCfsaauAfaGfUfcacaUfgGfugg | 1873 | UUUGCCACCAUGUGACUUAU | 2142 |
| 1736395 | usgsa | | casasa | | UGG | |
| AD- | uscsgauaGfaGfGfAfaaugaga | 2414 | VPusUfsuucUfcAfUfuuccUfcUfauc | 1874 | CCUCGAUAGAGGAAAUGAGA | 2143 |
| 1736396 | asasa | | gasgsg | | AAG | |
| AD- | ususuuuaAfgUfUfAfgcaggac | 2415 | VPusAfsaguCfcUfGfcuaaCfuUfaaa | 1875 | CCUUUUUAAGUUAGCAGGAC | 2144 |
| 1736397 | ususa | | aasgsg | | UUU | |
| AD- | usgsuaaaUfaAfUfUfaucugcc | 2416 | VPusUfsaggCfaGfAfuaauUfaUfuua | 1876 | GAUGUAAAUAAUUAUCUGCC | 2145 |
| 1736398 | usasa | | casusc | | UAA | |
| AD- | usgsguugUfaCfGfUfgccucaa | 2417 | VPusAfsuuuGfaGfGfcacgUfaCfaac | 1877 | UAUGGUUGUACGUGCCUCAA | 2146 |
| 1736399 | asusa | | casusa | | AUA | |
| AD- | cscsacacUfgAfCfUfagagcca | 2418 | VPusGfsuugGfcUfCfuaguCfaGfugu | 2419 | GCCCACACUGACUAGAGCCA | 2420 |
| 1736400 | ascsa | | ggsgsc | | ACC | |

TABLE 8
Unmodified Sense and Antisense Strand Sequences of PLIN1 dsRNA
Agents Comprising anUnsaturated C22 Hydrocarbon Chain Conjugated
to Position 6 on the Sense Strand, Counting from the 5′-end of
the Sense Strand

| | | SEQ | | | SEQ | |
|---|---|---|---|---|---|---|
| Duplex | Sense Sequence | ID | Range in | Antisense Sequence | ID | Range in |
| Name | 5′ to 3′ | NO: | NM_002666.5 | 5′ to 3′ | NO: | NM_002666.5 |
| AD- | CAUCUCUUUAACCAAACUUGA | 2421 | 1995-2015 | UCAAGUUUGGUUAAAGAGAUGAA | 2556 | 1993-2015 |
| 1735051 | | | | | | |
| AD- | CUCUAACAAAUAAACAGAACA | 2422 | 1740-1760 | UGUUCUGUUUAUUUGUUAGAGAA | 2557 | 1738-1760 |
| 1735052 | | | | | | |
| AD- | UGCAUAGUCACUCUUUUGAUA | 2423 | 2390-2410 | UAUCAAAAGAGUGACUAUGCAGG | 2558 | 2388-2410 |
| 1735053 | | | | | | |
| AD- | AACUUGAUUUUUCAUCUCUUA | 2424 | 1983-2003 | UAAGAGAUGAAAAAUCAAGUUAG | 2559 | 1981-2003 |
| 1735054 | | | | | | |
| AD- | GACACAUUCUUAGCACUGAAA | 2425 | 2128-2148 | UUUCAGUGCUAAGAAUGUGUCAA | 2560 | 2126-2148 |
| 1735055 | | | | | | |
| AD- | ACGCCUUAUUUGAUUUAACUA | 2426 | 2807-2827 | UAGUUAAAUCAAAUAAGGCGUAU | 2561 | 2805-2827 |
| 1735056 | | | | | | |
| AD- | UAGUCUUCGAAAUGUUAAUAA | 2427 | 2474-2494 | UUAUUAACAUUUCGAAGACUAGG | 2562 | 2472-2494 |
| 1735057 | | | | | | |
| AD- | GAUGGACUUUUAAGUUGUUUA | 2428 | 2838-2858 | UAAACAACUUAAAAGUCCAUCAU | 2563 | 2836-2858 |
| 1735058 | | | | | | |
| AD- | UGCUUUUUUCACUUAAUAAUA | 2429 | 2702-2722 | UAUUAUUAAGUGAAAAAAGCAGG | 2564 | 2700-2722 |
| 1735059 | | | | | | |
| AD- | ACAUAAUAACUACUGCAUAAA | 2430 | 2780-2800 | UUUAUGCAGUAGUUAUUAUGUGG | 2565 | 2778-2800 |
| 1735060 | | | | | | |
| AD- | UACUAGUGUCACUUUCUGAGA | 2431 | 2271-2291 | UCUCAGAAAGUGACACUAGUAUU | 2566 | 2269-2291 |
| 1735061 | | | | | | |
| AD- | CAAUCAGAUGCAAAAGCUCUA | 2432 | 2234-2254 | UAGAGCUUUUGCAUCUGAUUGUU | 2567 | 2232-2254 |
| 1735062 | | | | | | |
| AD- | UAAGAGUAAUUGCCUAACUUA | 2433 | 1968-1988 | UAAGUUAGGCAAUUACUCUUAUA | 2568 | 1966-1988 |
| 1735063 | | | | | | |
| AD- | GGCUUGUUUAUGAACAUUAAA | 2434 | 82-102 | UUUAAUGUUCAUAAACAAGCCAU | 2569 | 80-102 |
| 1735064 | | | | | | |
| AD- | UUUUUGCUACUGCAAACGAUA | 2435 | 2871-2891 | UAUCGUUUGCAGUAGCAAAAAAG | 2570 | 2869-2891 |
| 1735065 | | | | | | |
| AD- | AACGAUGCUAUAAUAAAUGUA | 2436 | 2885-2905 | UACAUUUAUUAUAGCAUCGUUUG | 2571 | 2883-2905 |
| 1735066 | | | | | | |
| AD- | UGGUUGUUACUAUAAGAGUAA | 2437 | 1956-1976 | UUACUCUUAUAGUAACAACCAAG | 2572 | 1954-1976 |
| 1735067 | | | | | | |
| AD- | CUGAUGAACAUCCUCUGAUGA | 2438 | 2181-2201 | UCAUCAGAGGAUGUUCAUCAGAG | 2573 | 2179-2201 |
| 1735068 | | | | | | |
| AD- | CUGCGGAUAAAUAUUUGCCAA | 2439 | 2059-2079 | UUGGCAAAUAUUUAUCCGCAGAG | 2574 | 2057-2079 |
| 1735069 | | | | | | |
| AD- | CCAAAAUUCAGAUUCUGCCUA | 2440 | 2039-2059 | UAGGCAGAAUCUGAAUUUUGGAA | 2575 | 2037-2059 |
| 1735070 | | | | | | |
| AD- | AAGGAUGUGUGUCUUUCUCCA | 2441 | 2547-2567 | UGGAGAAAGACACACAUCCUUUU | 2576 | 2545-2567 |
| 1735071 | | | | | | |
| AD- | UGCGAAUGCUUCCAGAAGACA | 2442 | 231-251 | UGUCUUCUGGAAGCAUUCGCAGG | 2577 | 229-251 |
| 1735072 | | | | | | |
| AD- | CGAAUGAGUAACUCCUGUCAA | 2443 | 2079-2099 | UUGACAGGAGUUACUCAUUCGUG | 2578 | 2077-2099 |
| 1735073 | | | | | | |
| AD- | UGGGUGUUUAUUUAAAAUACA | 2444 | 2254-2274 | UGUAUUUUAAAUAAACACCCAAG | 2579 | 2252-2274 |
| 1735074 | | | | | | |
| AD- | CAAAAGAUAUUUGACCGUUUA | 2445 | 2019-2039 | UAAACGGUCAAAUAUCUUUUGGC | 2580 | 2017-2039 |
| 1735075 | | | | | | |
| AD- | AUACAGCUUGGAGAGAUUUUA | 2446 | 2720-2740 | UAAAAUCUCUCCAAGCUGUAUUA | 2581 | 2718-2740 |
| 1735076 | | | | | | |
| AD- | AAAUGCAUUCAUACAAUUACA | 2447 | 2509-2529 | UGUAAUUGUAUGAAUGCAUUUUC | 2582 | 2507-2529 |
| 1735077 | | | | | | |
| AD- | UCCCACUCGCUCUUUUUGAUA | 2448 | 2756-2776 | UAUCAAAAAGAGCGAGUGGGAUU | 2583 | 2754-2776 |
| 1735078 | | | | | | |
| AD- | GCUUGUGUUUACACAAGCUGA | 2449 | 2664-2684 | UCAGCUUGUGUAAACACAAGCGG | 2584 | 2662-2684 |
| 1735079 | | | | | | |
| AD- | CCUGCCUUACAUGGCUUGUUA | 2450 | 70-90 | UAACAAGCCAUGUAAGGCAGGUG | 2585 | 68-90 |
| 1735080 | | | | | | |
| AD- | GAGAUUUUUGUAUCACAUUAA | 2451 | 2732-2752 | UUAAUGUGAUACAAAAAUCUCUC | 2586 | 2730-2752 |
| 1735081 | | | | | | |
| AD- | AGCACUUCAGACAAGGUCCUA | 2452 | 540-560 | UAGGACCUUGUCUGAAGUGCUCG | 2587 | 538-560 |
| 1735082 | | | | | | |
| AD- | UCACUCUCAGAGCCAGUUUUA | 2453 | 1895-1915 | UAAAACUGGCUCUGAGAGUGAAG | 2588 | 1893-1915 |
| 1735083 | | | | | | |
| AD- | ACUGAACUCCUCUGUGAUCUA | 2454 | 2142-2162 | UAGAUCACAGAGGAGUUCAGUGC | 2589 | 2140-2162 |
| 1735084 | | | | | | |
| AD- | UAGUUCCCUAAUGAUGGACUA | 2455 | 2826-2846 | UAGUCCAUCAUUAGGGAACUAGU | 2590 | 2824-2846 |
| 1735085 | | | | | | |
| AD- | GGCGUUACUGACAACGUGGUA | 2456 | 1296-1316 | UACCACGUUGUCAGUAACGCCCU | 2591 | 1294-1316 |
| 1735086 | | | | | | |
| AD- | UGAUCUAGGAUGAUCUGUUCA | 2457 | 2156-2176 | UGAACAGAUCAUCCUAGAUCACA | 2592 | 2154-2176 |
| 1735087 | | | | | | |
| AD- | GUGAUGAUAUAUAGACUUUAA | 2458 | 2427-2447 | UUAAAGUCUAUAUAUCAUCACCA | 2593 | 2425-2447 |
| 1735088 | | | | | | |
| AD- | GGCUACUUUGAAGGGAACAAA | 2459 | 2217-2237 | UUUGUUCCCUUCAAAGUAGCCUG | 2594 | 2215-2237 |
| 1735089 | | | | | | |
| AD- | CUGCUCUGAUUCUAUGGCUUA | 2460 | 1937-1957 | UAAGCCAUAGAAUCAGAGCAGGC | 2595 | 1935-1957 |
| 1735090 | | | | | | |
| AD- | AGAUUGCUUCUGAGCUGAAGA | 2461 | 463-483 | UCUUCAGCUCAGAAGCAAUCUUU | 2596 | 461-483 |
| 1735091 | | | | | | |
| AD- | GCCAUCUCUUGUGUAUGCAGA | 2462 | 2607-2627 | UCUGCAUACACAAGAGAUGGCAC | 2597 | 2605-2627 |
| 1735092 | | | | | | |
| AD- | AGCCACAUUUCCAUUUGCAUA | 2463 | 2354-2374 | UAUGCAAAUGGAAAUGUGGCUGU | 2598 | 2352-2374 |
| 1735093 | | | | | | |
| AD- | UCCAGACAGAAGGUUUUGACA | 2464 | 2111-2131 | UGUCAAAACCUUCUGUCUGGACC | 2599 | 2109-2131 |
| 1735094 | | | | | | |
| AD- | CUCUCGAUACACCGUGCAGAA | 2465 | 818-838 | UUCUGCACGGUGUAUCGAGAGAG | 2600 | 816-838 |
| 1735095 | | | | | | |
| AD- | GGCGCACUUUUUAUUUUUAUA | 2466 | 1838-1858 | UAUAAAAAUAAAAAGUGCGCCUU | 2601 | 1836-1858 |
| 1735096 | | | | | | |
| AD- | GAGCGUUGCCACUUUCAAAGA | 2467 | 1775-1795 | UCUUUGAAAGUGGCAACGCUCGC | 2602 | 1773-1795 |
| 1735097 | | | | | | |
| AD- | UUGCAUCAUUACUGCCUUCAA | 2468 | 2368-2388 | UUGAAGGCAGUAAUGAUGCAAAU | 2603 | 2366-2388 |
| 1735098 | | | | | | |
| AD- | GCGCAAGAAGAGCUGAGUCGA | 2469 | 1685-1705 | UCGACUCAGCUCUUCUUGCGCAG | 2604 | 1683-1705 |
| 1735099 | | | | | | |
| AD- | UGCGGAAUUUGCUGCCAACAA | 2470 | 611-631 | UUGUUGGCAGCAAAUUCCGCAGU | 2605 | 609-631 |
| 1735100 | | | | | | |
| AD- | GUGUGCAAUGCCUAUGAGAAA | 2471 | 291-311 | UUUCUCAUAGGCAUUGCACACAG | 2606 | 289-311 |
| 1735101 | | | | | | |
| AD- | GAAUUCAAAUAUUGCAAAAGA | 2472 | 2530-2550 | UCUUUUGCAAUAUUUGAAUUCUG | 2607 | 2528-2550 |
| 1735102 | | | | | | |
| AD- | CCUGUGUGCUUUGUAGAGCCA | 2473 | 2320-2340 | UGGCUCUACAAAGCACACAGGCC | 2608 | 2318-2340 |
| 1735103 | | | | | | |
| AD- | UCCAGACAAGGAAGAGUCAGA | 2474 | 710-730 | UCUGACUCUUCCUUGUCUGGAGG | 2609 | 708-730 |
| 1735104 | | | | | | |
| AD- | UGCCAGAAACAGCAUCAGCGA | 2475 | 509-529 | UCGCUGAUGCUGUUUCUGGCACU | 2610 | 507-529 |
| 1735105 | | | | | | |
| AD- | GCAUAAUAUGGAUACGCCUUA | 2476 | 2794-2814 | UAAGGCGUAUCCAUAUUAUGCAG | 2611 | 2792-2814 |
| 1735106 | | | | | | |
| AD- | AGCCUCAUCCUGAUGAUGCUA | 2477 | 1813-1833 | UAGCAUCAUCAGGAUGAGGCUGA | 2612 | 1811-1833 |
| 1735107 | | | | | | |
| AD- | AAGCCUCUUGAGCAGGGUUGA | 2478 | 779-799 | UCAACCCUGCUCAAGAGGCUUGG | 2613 | 777-799 |
| 1735108 | | | | | | |
| AD- | UAAAGGGAAGAAGUUGAAGCA | 2479 | 99-119 | UGCUUCAACUUCUUCCCUUUAAU | 2614 | 97-119 |
| 1735109 | | | | | | |
| AD- | GGCAGCAUUGAGAAGGUGGUA | 2480 | 675-695 | UACCACCUUCUCAAUGCUGCCCA | 2615 | 673-695 |
| 1735110 | | | | | | |
| AD- | GUCAGCGACAGCUUCUUCCGA | 2481 | 1617-1637 | UCGGAAGAAGCUGUCGCUGACCC | 2616 | 1615-1637 |
| 1735111 | | | | | | |
| AD- | CUGCUGUCUCCUCAACCAAGA | 2482 | 1243-1263 | UCUUGGUUGAGGAGACAGCAGGG | 2617 | 1241-1263 |
| 1735112 | | | | | | |
| AD- | AGGAGGAAGAAUUGGAGACUA | 2483 | 1054-1074 | UAGUCUCCAAUUCUUCCUCCUCC | 2618 | 1052-1074 |
| 1735113 | | | | | | |
| AD- | CCUGUCACCACUCUGAAGGUA | 2484 | 2092-2112 | UACCUUCAGAGUGGUGACAGGAG | 2619 | 2090-2112 |
| 1735114 | | | | | | |
| AD- | AGACUUUAUGUAUAGCCACAA | 2485 | 2439-2459 | UUGUGGCUAUACAUAAAGUCUAU | 2620 | 2437-2459 |
| 1735115 | | | | | | |
| AD- | GUUACGCAUGCCUGCUUUUUA | 2486 | 2690-2710 | UAAAAAGCAGGCAUGCGUAACAC | 2621 | 2688-2710 |
| 1735116 | | | | | | |
| AD- | CCAGUUCACAGCUGCCAAUGA | 2487 | 377-397 | UCAUUGGCAGCUGUGAACUGGGU | 2622 | 375-397 |
| 1735117 | | | | | | |
| AD- | CAGGCACGUGUGUAUGCACUA | 2488 | 2640-2660 | UAGUGCAUACACACGUGCCUGCA | 2623 | 2638-2660 |
| 1735118 | | | | | | |
| AD- | AUGGCAGUCAACAAAGGCCUA | 2489 | 132-152 | UAGGCCUUUGUUGACUGCCAUCC | 2624 | 130-152 |
| 1735119 | | | | | | |
| AD- | CAAACUUGUGGCCAAAAGAUA | 2490 | 2007-2027 | UAUCUUUUGGCCACAAGUUUGGU | 2625 | 2005-2027 |
| 1735120 | | | | | | |
| AD- | UCUGACCAACACCCUCUCUCA | 2491 | 803-823 | UGAGAGAGGGUGUUGGUCAGAGC | 2626 | 801-823 |
| 1735121 | | | | | | |
| AD- | UCACAUUAUAAAUCCCACUCA | 2492 | 2744-2764 | UGAGUGGGAUUUAUAAUGUGAUA | 2627 | 2742-2764 |
| 1735122 | | | | | | |
| AD- | GAGGAGAACAAGUUCAGUGAA | 2493 | 1074-1094 | UUCACUGAACUUGUUCUCCUCAG | 2628 | 1072-1094 |
| 1735123 | | | | | | |
| AD- | GAGCAGGAGAAUGUGCUGCAA | 2494 | 177-197 | UUGCAGCACAUUCUCCUGCUCAG | 2629 | 175-197 |
| 1735124 | | | | | | |
| AD- | GAAGACCUACACCAGCACUAA | 2495 | 245-265 | UUAGUGCUGGUGUAGGUCUUCUG | 2630 | 243-265 |
| 1735125 | | | | | | |
| AD- | AGGCCUCACCUUGCUGGAUGA | 2496 | 146-166 | UCAUCCAGCAAGGUGAGGCCUUU | 2631 | 144-166 |
| 1735126 | | | | | | |
| AD- | AGCCAGCUGCUUGCUCACAGA | 2497 | 2336-2356 | UCUGUGAGCAAGCAGCUGGCUCU | 2632 | 2334-2356 |
| 1735127 | | | | | | |
| AD- | GGGCUCUGUGAGACUGAGGUA | 2498 | 13-33 | UACCUCAGUCUCACAGAGCCCAG | 2633 | Nov-33 |
| 1735128 | | | | | | |
| AD- | CGAGAGCGAAUUCCGGGACAA | 2499 | 1367-1387 | UUGUCCCGGAAUUCGCUCUCGGG | 2634 | 1365-1387 |
| 1735129 | | | | | | |
| AD- | GUGGCACAUACCCUGCAGAAA | 2500 | 1134-1154 | UUUCUGCAGGGUAUGUGCCACAC | 2635 | 1132-1154 |
| 1735130 | | | | | | |
| AD- | GUGGACACAGUGGUGCAUUAA | 2501 | 1314-1334 | UUAAUGCACCACUGUGUCCACCA | 2636 | 1312-1334 |
| 1735131 | | | | | | |
| AD- | AAGCCCAGAAGUCUCCCAAGA | 2502 | 751-771 | UCUUGGGAGACUUCUGGGCUUGC | 2637 | 749-771 |
| 1735132 | | | | | | |
| AD- | GGCCAUGUCCCUAUCAGAUGA | 2503 | 1268-1288 | UCAUCUGAUAGGGACAUGGCCCU | 2638 | 1266-1288 |
| 1735133 | | | | | | |
| AD- | GCCGGCGGGUUUCUCUAACAA | 2504 | 1728-1748 | UUGUUAGAGAAACCCGCCGGCCC | 2639 | 1726-1748 |
| 1735134 | | | | | | |
| AD- | CUGAAGGACACCAUCUCCACA | 2505 | 477-497 | UGUGGAGAUGGUGUCCUUCAGCU | 2640 | 475-497 |
| 1735135 | | | | | | |
| AD- | GACCACCAUCUCGGCUGUGAA | 2506 | 1163-1183 | UUCACAGCCGAGAUGGUGGUCUG | 2641 | 1161-1183 |
| 1735136 | | | | | | |
| AD- | CCAGUUUUUAAGGGACACCAA | 2507 | 1907-1927 | UUGGUGUCCCUUAAAAACUGGCU | 2642 | 1905-1927 |
| 1735137 | | | | | | |
| AD- | GGCCAGAGACACUGCGGAAUA | 2508 | 599-619 | UAUUCCGCAGUGUCUCUGGCCAC | 2643 | 597-619 |
| 1735138 | | | | | | |
| AD- | CGUUCCCAUCGCGAGCACUUA | 2509 | 527-547 | UAAGUGCUCGCGAUGGGAACGCU | 2644 | 525-547 |
| 1735139 | | | | | | |
| AD- | CCGGGACAUCGACAACCCACA | 2510 | 1379-1399 | UGUGGGUUGUCGAUGUCCCGGAA | 2645 | 1377-1399 |
| 1735140 | | | | | | |
| AD- | UCUGAUGAUCUAGGCUCCCAA | 2511 | 2194-2214 | UUGGGAGCCUAGAUCAUCAGAGG | 2646 | 2192-2214 |
| 1735141 | | | | | | |
| AD- | CUGCAGAAGACCCUCCAGACA | 2512 | 1146-1166 | UGUCUGGAGGGUCUUCUGCAGGG | 2647 | 1144-1166 |
| 1735142 | | | | | | |
| AD- | CGCCAGUAGCUUGGCUGCCUA | 2513 | 323-343 | UAGGCAGCCAAGCUACUGGCGCU | 2648 | 321-343 |
| 1735143 | | | | | | |
| AD- | CGCUUCACAGGCUGAGUCCAA | 2514 | 2298-2318 | UUGGACUCAGCCUGUGAAGCGGC | 2649 | 2296-2318 |
| 1735144 | | | | | | |
| AD- | UUUUUUUAGCAUCCUUUUGGA | 2515 | 1871-1891 | UCCAAAAGGAUGCUAAAAAAAAA | 2650 | 1869-1891 |
| 1735145 | | | | | | |
| AD- | GAAGCCAAAGCGCAGGGUCAA | 2516 | 1601-1621 | UUGACCCUGCGCUUUGGCUUCUC | 2651 | 1599-1621 |
| 1735146 | | | | | | |
| AD- | GAGGAGGAUCAUGAGGACCAA | 2517 | 1005-1025 | UUGGUCCUCAUGAUCCUCCUCCU | 2652 | 1003-1025 |
| 1735147 | | | | | | |
| AD- | GCACGCAUUACAGCCAGCUGA | 2518 | 1666-1686 | UCAGCUGGCUGUAAUGCGUGCGG | 2653 | 1664-1686 |
| 1735148 | | | | | | |
| AD- | CUUCAUUGAAAACCACCACGA | 2519 | 2585-2605 | UCGUGGUGGUUUUCAAUGAAGGG | 2654 | 2583-2605 |
| 1735149 | | | | | | |
| AD- | UUUUUGAUGGCCACAUAAUAA | 2520 | 2768-2788 | UUAUUAUGUGGCCAUCAAAAAGA | 2655 | 2766-2788 |
| 1735150 | | | | | | |
| AD- | CCACCUGGAGGAAAAGAUCCA | 2521 | 419-439 | UGGAUCUUUUCCUCCAGGUGGUC | 2656 | 417-439 |
| 1735151 | | | | | | |
| AD- | CAAGGCCAAGCCAAGCCUCUA | 2522 | 767-787 | UAGAGGCUUGGCUUGGCCUUGGG | 2657 | 765-787 |
| 1735152 | | | | | | |
| AD- | GAGGACCAGACAGACACGGAA | 2523 | 1017-1037 | UUCCGUGUCUGUCUGGUCCUCAU | 2658 | 1015-1037 |
| 1735153 | | | | | | |
| AD- | GAUGCCCUGAAGGGCGUUACA | 2524 | 1284-1304 | UGUAACGCCCUUCAGGGCAUCUG | 2659 | 1282-1304 |
| 1735154 | | | | | | |
| AD- | CCAACACUCGAGCUGGCCGAA | 2525 | 625-645 | UUCGGCCAGCUCGAGUGUUGGCA | 2660 | 623-645 |
| 1735155 | | | | | | |
| AD- | CAGGGCUAUGCACCUGCAGGA | 2526 | 2624-2644 | UCCUGCAGGUGCAUAGCCCUGCA | 2661 | 2622-2644 |
| 1735156 | | | | | | |
| AD- | AAGGUGGUGGAGUACCUCCUA | 2527 | 687-707 | UAGGAGGUACUCCACCACCUUCU | 2662 | 685-707 |
| 1735157 | | | | | | |
| AD- | UUGAAGCUUGAGGAGCGAGGA | 2528 | 112-132 | UCCUCGCUCCUCAAGCUUCAACU | 2663 | 110-132 |
| 1735158 | | | | | | |
| AD- | CGUGGCCAUGUGGAUCCCAGA | 2529 | 869-889 | UCUGGGAUCCACAUGGCCACGGU | 2664 | 867-889 |
| 1735159 | | | | | | |
| AD- | CAGCACUAAGGAAGCCCACCA | 2530 | 257-277 | UGGUGGGCUUCCUUAGUGCUGGU | 2665 | 255-277 |
| 1735160 | | | | | | |
| AD- | GUCGCUGAUGGAGCCCGAGAA | 2531 | 1352-1372 | UUCUCGGGCUCCAUCAGCGACAG | 2666 | 1350-1372 |
| 1735161 | | | | | | |
| AD- | UUCUUCCGGCCCAGCGUCAUA | 2532 | 1629-1649 | UAUGACGCUGGGCCGGAAGAAGC | 2667 | 1627-1649 |
| 1735162 | | | | | | |
| AD- | CUGCUCCUGGACACCAGCAAA | 2533 | 733-753 | UUUGCUGGUGUCCAGGAGCAGGG | 2668 | 731-753 |
| 1735163 | | | | | | |
| AD- | UUUCUGAGUACCCGCCGCUUA | 2534 | 2283-2303 | UAAGCGGCGGGUACUCAGAAAGU | 2669 | 2281-2303 |
| 1735164 | | | | | | |
| AD- | CGCAGGCUGUCCACCCAGUUA | 2535 | 363-383 | UAACUGGGUGGACAGCCUGCGGA | 2670 | 361-383 |
| 1735165 | | | | | | |
| AD- | GGCUGUGACAUGGGCACCUGA | 2536 | 1175-1195 | UCAGGUGCCCAUGUCACAGCCGA | 2671 | 1173-1195 |
| 1735166 | | | | | | |
| AD- | UCAGUGAGGUAGCAGCCCUGA | 2537 | 1087-1107 | UCAGGGCUGCUACCUCACUGAAC | 2672 | 1085-1107 |
| 1735167 | | | | | | |
| AD- | AGCGUCAUGGAGCCCAUCCUA | 2538 | 1641-1661 | UAGGAUGGGCUCCAUGACGCUGG | 2673 | 1639-1661 |
| 1735168 | | | | | | |
| AD- | CUGGAUGGAGACCUCCCUGAA | 2539 | 159-179 | UUCAGGGAGGUCUCCAUCCAGCA | 2674 | 157-179 |
| 1735169 | | | | | | |
| AD- | UCAGCCGGAGUGAGUGUUGGA | 2540 | 38-58 | UCCAACACUCACUCCGGCUGACC | 2675 | 36-58 |
| 1735170 | | | | | | |
| AD- | CUGGCCGACUGGCUUCUGGAA | 2541 | 637-657 | UUCCAGAAGCCAGUCGGCCAGCU | 2676 | 635-657 |
| 1735171 | | | | | | |
| AD- | GGUGCUGCACCUCACACCAGA | 2542 | 1220-1240 | UCUGGUGUGAGGUGCAGCACCCU | 2677 | 1218-1240 |
| 1735172 | | | | | | |
| AD- | GGCUGCCUGGAGCAUGGAGCA | 2543 | 335-355 | UGCUCCAUGCUCCAGGCAGCCAA | 2678 | 333-355 |
| 1735173 | | | | | | |
| AD- | CCUGCAGCUGUGCUGGGCAUA | 2544 | 1191-1211 | UAUGCCCAGCACAGCUGCAGGUG | 2679 | 1189-1211 |
| 1735174 | | | | | | |
| AD- | AGUGGCCAUGCAGGCGGUGUA | 2545 | 929-949 | UACACCGCCUGCAUGGCCACUGA | 2680 | 927-949 |
| 1735175 | | | | | | |
| AD- | GACUUGGCCUUGGGCAGCAUA | 2546 | 663-683 | UAUGCUGCCCAAGGCCAAGUCGG | 2681 | 661-683 |
| 1735176 | | | | | | |
| AD- | GAGCGAAGUGCGGGUACCCUA | 2547 | 959-979 | UAGGGUACCCGCACUUCGCUCCU | 2682 | 957-979 |
| 1735177 | | | | | | |
| AD- | CUGGUGGCCUCUGUGUGCAAA | 2548 | 279-299 | UUUGCACACAGAGGCCACCAGGG | 2683 | 277-299 |
| 1735178 | | | | | | |
| AD- | AACCCACCAGCCGAGGUCGAA | 2549 | 1392-1412 | UUCGACCUCGGCUGGUGGGUUGU | 2684 | 1390-1412 |
| 1735179 | | | | | | |
| AD- | UGAUGCUGCCAAGGCGCACUA | 2550 | 1826-1846 | UAGUGCGCCUUGGCAGCAUCAUC | 2685 | 1824-1846 |
| 1735180 | | | | | | |
| AD- | CCAAUGAGCUGGCCUGCCGAA | 2551 | 391-411 | UUCGGCAGGCCAGCUCAUUGGCA | 2686 | 389-411 |
| 1735181 | | | | | | |
| AD- | GUGCUGCAGCGGGUCCUGCAA | 2552 | 189-209 | UUGCAGGACCCGCUGCAGCACAU | 2687 | 187-209 |
| 1735182 | | | | | | |
| AD- | GGGCGUGCAGAGCGCCAGUAA | 2553 | 311-331 | UUACUGGCGCUCUGCACGCCCUU | 2688 | 309-331 |
| 1735183 | | | | | | |
| AD- | GGUGAGUGGCACCUGCGAAUA | 2554 | 218-238 | UAUUCGCAGGUGCCACUCACCAC | 2689 | 216-238 |
| 1735184 | | | | | | |
| AD- | ACGGAGGGAGAGGACACGGAA | 2555 | 1032-1052 | UUCCGUGUCCUCUCCCUCCGUGU | 2690 | 1030-1052 |
| 1735185 | | | | | | |

TABLE 9
Modified Sense and Antisense Strand Sequences of PLIN1 dsRNA Agents Comprising an Unsaturated C22 Hydrocarbon Chain
Conjugated to Position 6 on the Sense Strand, Counting from the 5′-end of the Sense Strand

| | | SEQ | | SEQ | | SEQ |
|---|---|---|---|---|---|---|
| Duplex | | ID | | ID | | ID |
| Name | Sense Sequence 5′ to 3′ | NO: | Antisense Sequence 5′ to 3′ | NO: | mRNA Target Sequence 5′ to 3′ | NO: |
| AD- | csasucu(Cda)UfuUfAfAfccaaacuusg | 2691 | VPusCfsaagUfuUfGfguuaAfaGfagaugsas | 2826 | UUCAUCUCUUUAACCAAACU | 2961 |
| 1735051 | sa | | a | | UGU | |
| AD- | csuscua(Ada)CfaAfAfUfaaacagaasc | 2692 | VPusGfsuucUfgUfUfuauuUfgUfuagagsas | 2827 | UUCUCUAACAAAUAAACAGA | 2962 |
| 1735052 | sa | | a | | ACC | |
| AD- | usgscau(Ada)GfuCfAfCfucuuuugas | 2693 | VPusAfsucaAfaAfGfagugAfcUfaugcasgs | 2828 | CCUGCAUAGUCACUCUUUUG | 2963 |
| 1735053 | usa | | g | | AUG | |
| AD- | asascuu(Gda)AfuUfUfUfucaucucus | 2694 | VPusAfsagaGfaUfGfaaaaAfuCfaaguusasg | 2829 | CUAACUUGAUUUUUCAUCUC | 2964 |
| 1735054 | usa | | | | UUU | |
| AD- | gsascac(Ada)UfuCfUfUfagcacugasa | 2695 | VPusUfsucaGfuGfCfuaagAfaUfgugucsas | 2830 | UUGACACAUUCUUAGCACUG | 2965 |
| 1735055 | sa | | a | | AAC | |
| AD- | ascsgcc(Uda)UfaUfUfUfgauuuaacsu | 2696 | VPusAfsguuAfaAfUfcaaaUfaAfggcgusas | 2831 | AUACGCCUUAUUUGAUUUAA | 2966 |
| 1735056 | sa | | u | | CUA | |
| AD- | usasguc(Uda)UfcGfAfAfauguuaaus | 2697 | VPusUfsauuAfaCfAfuuucGfaAfgacuasgs | 2832 | CCUAGUCUUCGAAAUGUUAA | 2967 |
| 1735057 | asa | | g | | UAU | |
| AD- | gsasugg(Ada)CfuUfUfUfaaguuguus | 2698 | VPusAfsaacAfaCfUfuaaaAfgUfccaucsasu | 2833 | AUGAUGGACUUUUAAGUUGU | 2968 |
| 1735058 | usa | | | | UUC | |
| AD- | usgscuu(Uda)UfuUfCfAfcuuaauaas | 2699 | VPusAfsuuaUfuAfAfgugaAfaAfaagcasgs | 2834 | CCUGCUUUUUUCACUUAAUA | 2969 |
| 1735059 | usa | | g | | AUA | |
| AD- | ascsaua(Ada)UfaAfCfUfacugcauasa | 2700 | VPusUfsuauGfcAfGfuaguUfaUfuaugusgs | 2835 | CCACAUAAUAACUACUGCAU | 2970 |
| 1735060 | sa | | g | | AAU | |
| AD- | usascua(Gda)UfgUfCfAfcuuucugas | 2701 | VPusCfsucaGfaAfAfgugaCfaCfuaguasusu | 2836 | AAUACUAGUGUCACUUUCUG | 2971 |
| 1735061 | gsa | | | | AGU | |
| AD- | csasauc(Ada)GfaUfGfCfaaaagcucsu | 2702 | VPusAfsgagCfuUfUfugcaUfcUfgauugsus | 2837 | AACAAUCAGAUGCAAAAGCU | 2972 |
| 1735062 | sa | | u | | CUU | |
| AD- | usasaga(Gda)UfaAfUfUfgccuaacusu | 2703 | VPusAfsaguUfaGfGfcaauUfaCfucuuasusa | 2838 | UAUAAGAGUAAUUGCCUAAC | 2973 |
| 1735063 | sa | | | | UUG | |
| AD- | gsgscuu(Gda)UfuUfAfUfgaacauuas | 2704 | VPusUfsuaaUfgUfUfcauaAfaCfaagccsasu | 2839 | AUGGCUUGUUUAUGAACAUU | 2974 |
| 1735064 | asa | | | | AAA | |
| AD- | ususuuu(Gda)CfuAfCfUfgcaaacgas | 2705 | VPusAfsucgUfuUfGfcaguAfgCfaaaaasasg | 2840 | CUUUUUUGCUACUGCAAACG | 2975 |
| 1735065 | usa | | | | AUG | |
| AD- | asascga(Uda)GfcUfAfUfaauaaaugsu | 2706 | VPusAfscauUfuAfUfuauaGfcAfucguusus | 2841 | CAAACGAUGCUAUAAUAAAU | 2976 |
| 1735066 | sa | | g | | GUC | |
| AD- | usgsguu(Gda)UfuAfCfUfauaagagus | 2707 | VPusUfsacuCfuUfAfuaguAfaCfaaccasasg | 2842 | CUUGGUUGUUACUAUAAGAG | 2977 |
| 1735067 | asa | | | | UAA | |
| AD- | csusgau(Gda)AfaCfAfUfccucugaus | 2708 | VPusCfsaucAfgAfGfgaugUfuCfaucagsas | 2843 | CUCUGAUGAACAUCCUCUGA | 2978 |
| 1735068 | gsa | | g | | UGA | |
| AD- | csusgcg(Gda)AfuAfAfAfuauuugccs | 2709 | VPusUfsggcAfaAfUfauuuAfuCfcgcagsas | 2844 | CUCUGCGGAUAAAUAUUUGC | 2979 |
| 1735069 | asa | | g | | CAC | |
| AD- | cscsaaa(Ada)UfuCfAfGfauucugccsu | 2710 | VPusAfsggcAfgAfAfucugAfaUfuuuggsas | 2845 | UUCCAAAAUUCAGAUUCUGC | 2980 |
| 1735070 | sa | | a | | CUC | |
| AD- | asasgga(Uda)GfuGfUfGfucuuucucs | 2711 | VPusGfsgagAfaAfGfacacAfcAfuccuusus | 2846 | AAAAGGAUGUGUGUCUUUCU | 2981 |
| 1735071 | csa | | u | | CCC | |
| AD- | usgscga(Ada)UfgCfUfUfccagaagasc | 2712 | VPusGfsucuUfcUfGfgaagCfaUfucgcasgs | 2847 | CCUGCGAAUGCUUCCAGAAG | 2982 |
| 1735072 | sa | | g | | ACC | |
| AD- | csgsaau(Gda)AfgUfAfAfcuccugucs | 2713 | VPusUfsgacAfgGfAfguuaCfuCfauucgsus | 2848 | CACGAAUGAGUAACUCCUGU | 2983 |
| 1735073 | asa | | g | | CAC | |
| AD- | usgsggu(Gda)UfuUfAfUfuuaaaauas | 2714 | VPusGfsuauUfuUfAfaauaAfaCfacccasasg | 2849 | CUUGGGUGUUUAUUUAAAAU | 2984 |
| 1735074 | csa | | | | ACU | |
| AD- | csasaaa(Gda)AfuAfUfUfugaccguus | 2715 | VPusAfsaacGfgUfCfaaauAfuCfuuuugsgs | 2850 | GCCAAAAGAUAUUUGACCGU | 2985 |
| 1735075 | usa | | c | | UUC | |
| AD- | asusaca(Gda)CfuUfGfGfagagauuus | 2716 | VPusAfsaaaUfcUfCfuccaAfgCfuguaususa | 2851 | UAAUACAGCUUGGAGAGAUU | 2986 |
| 1735076 | usa | | | | UUU | |
| AD- | asasaug(Cda)AfuUfCfAfuacaauuasc | 2717 | VPusGfsuaaUfuGfUfaugaAfuGfcauuusus | 2852 | GAAAAUGCAUUCAUACAAUU | 2987 |
| 1735077 | sa | | c | | ACA | |
| AD- | uscscca(Cda)UfcGfCfUfcuuuuugasu | 2718 | VPusAfsucaAfaAfAfgagcGfaGfugggasus | 2853 | AAUCCCACUCGCUCUUUUUGA | 2988 |
| 1735078 | sa | | u | | UG | |
| AD- | gscsuug(Uda)GfuUfUfAfcacaagcus | 2719 | VPusCfsagcUfuGfUfguaaAfcAfcaagcsgsg | 2854 | CCGCUUGUGUUUACACAAGC | 2989 |
| 1735079 | gsa | | | | UGU | |
| AD- | cscsugc(Cda)UfuAfCfAfuggcuugus | 2720 | VPusAfsacaAfgCfCfauguAfaGfgcaggsus | 2855 | CACCUGCCUUACAUGGCUUGU | 2990 |
| 1735080 | usa | | g | | UU | |
| AD- | gsasgau(Uda)UfuUfGfUfaucacauus | 2721 | VPusUfsaauGfuGfAfuacaAfaAfaucucsusc | 2856 | GAGAGAUUUUUGUAUCACAU | 2991 |
| 1735081 | asa | | | | UAU | |
| AD- | asgscac(Uda)UfcAfGfAfcaagguccsu | 2722 | VPusAfsggaCfcUfUfgucuGfaAfgugcuscs | 2857 | CGAGCACUUCAGACAAGGUCC | 2992 |
| 1735082 | sa | | g | | UG | |
| AD- | uscsacu(Cda)UfcAfGfAfgccaguuus | 2723 | VPusAfsaaaCfuGfGfcucuGfaGfagugasasg | 2858 | CUUCACUCUCAGAGCCAGUUU | 2993 |
| 1735083 | usa | | | | UU | |
| AD- | ascsuga(Ada)CfuCfCfUfcugugaucsu | 2724 | VPusAfsgauCfaCfAfgaggAfgUfucagusgs | 2859 | GCACUGAACUCCUCUGUGAUC | 2994 |
| 1735084 | sa | | c | | UA | |
| AD- | usasguu(Cda)CfcUfAfAfugauggacs | 2725 | VPusAfsgucCfaUfCfauuaGfgGfaacuasgsu | 2860 | ACUAGUUCCCUAAUGAUGGA | 2995 |
| 1735085 | usa | | | | CUU | |
| AD- | gsgscgu(Uda)AfcUfGfAfcaacguggs | 2726 | VPusAfsccaCfgUfUfgucaGfuAfacgccscsu | 2861 | AGGGCGUUACUGACAACGUG | 2996 |
| 1735086 | usa | | | | GUG | |
| AD- | usgsauc(Uda)AfgGfAfUfgaucuguus | 2727 | VPusGfsaacAfgAfUfcaucCfuAfgaucascsa | 2862 | UGUGAUCUAGGAUGAUCUGU | 2997 |
| 1735087 | csa | | | | UCC | |
| AD- | gsusgau(Gda)AfuAfUfAfuagacuuus | 2728 | VPusUfsaaaGfuCfUfauauAfuCfaucacscsa | 2863 | UGGUGAUGAUAUAUAGACUU | 2998 |
| 1735088 | asa | | | | UAU | |
| AD- | gsgscua(Cda)UfuUfGfAfagggaacasa | 2729 | VPusUfsuguUfcCfCfuucaAfaGfuagccsus | 2864 | CAGGCUACUUUGAAGGGAAC | 2999 |
| 1735089 | sa | | g | | AAU | |
| AD- | csusgcu(Cda)UfgAfUfUfcuauggcus | 2730 | VPusAfsagcCfaUfAfgaauCfaGfagcagsgsc | 2865 | GCCUGCUCUGAUUCUAUGGC | 3000 |
| 1735090 | usa | | | | UUG | |
| AD- | asgsauu(Gda)CfuUfCfUfgagcugaas | 2731 | VPusCfsuucAfgCfUfcagaAfgCfaaucususu | 2866 | AAAGAUUGCUUCUGAGCUGA | 3001 |
| 1735091 | gsa | | | | AGG | |
| AD- | gscscau(Cda)UfcUfUfGfuguaugcas | 2732 | VPusCfsugcAfuAfCfacaaGfaGfauggcsasc | 2867 | GUGCCAUCUCUUGUGUAUGC | 3002 |
| 1735092 | gsa | | | | AGG | |
| AD- | asgscca(Cda)AfuUfUfCfcauuugcasu | 2733 | VPusAfsugcAfaAfUfggaaAfuGfuggcusgs | 2868 | ACAGCCACAUUUCCAUUUGCA | 3003 |
| 1735093 | sa | | u | | UC | |
| AD- | uscscag(Ada)CfaGfAfAfgguuuugas | 2734 | VPusGfsucaAfaAfCfcuucUfgUfcuggascsc | 2869 | GGUCCAGACAGAAGGUUUUG | 3004 |
| 1735094 | csa | | | | ACA | |
| AD- | csuscuc(Gda)AfuAfCfAfccgugcagsa | 2735 | VPusUfscugCfaCfGfguguAfuCfgagagsas | 2870 | CUCUCUCGAUACACCGUGCAG | 3005 |
| 1735095 | sa | | g | | AC | |
| AD- | gsgscgc(Ada)CfuUfUfUfuauuuuuas | 2736 | VPusAfsuaaAfaAfUfaaaaAfgUfgcgccsusu | 2871 | AAGGCGCACUUUUUAUUUUU | 3006 |
| 1735096 | usa | | | | AUU | |
| AD- | gsasgcg(Uda)UfgCfCfAfcuuucaaasg | 2737 | VPusCfsuuuGfaAfAfguggCfaAfcgcucsgs | 2872 | GCGAGCGUUGCCACUUUCAA | 3007 |
| 1735097 | sa | | c | | AGU | |
| AD- | ususgca(Uda)CfaUfUfAfcugccuucsa | 2738 | VPusUfsgaaGfgCfAfguaaUfgAfugcaasas | 2873 | AUUUGCAUCAUUACUGCCUU | 3008 |
| 1735098 | sa | | u | | CAC | |
| AD- | gscsgca(Ada)GfaAfGfAfgcugagucs | 2739 | VPusCfsgacUfcAfGfcucuUfcUfugcgcsasg | 2874 | CUGCGCAAGAAGAGCUGAGU | 3009 |
| 1735099 | gsa | | | | CGC | |
| AD- | usgscgg(Ada)AfuUfUfGfcugccaacs | 2740 | VPusUfsguuGfgCfAfgcaaAfuUfccgcasgs | 2875 | ACUGCGGAAUUUGCUGCCAA | 3010 |
| 1735100 | asa | | u | | CAC | |
| AD- | gsusgug(Cda)AfaUfGfCfcuaugagas | 2741 | VPusUfsucuCfaUfAfggcaUfuGfcacacsasg | 2876 | CUGUGUGCAAUGCCUAUGAG | 3011 |
| 1735101 | asa | | | | AAG | |
| AD- | gsasauu(Cda)AfaAfUfAfuugcaaaasg | 2742 | VPusCfsuuuUfgCfAfauauUfuGfaauucsus | 2877 | CAGAAUUCAAAUAUUGCAAA | 3012 |
| 1735102 | sa | | g | | AGG | |
| AD- | cscsugu(Gda)UfgCfUfUfuguagagcs | 2743 | VPusGfsgcuCfuAfCfaaagCfaCfacaggscsc | 2878 | GGCCUGUGUGCUUUGUAGAG | 3013 |
| 1735103 | csa | | | | CCA | |
| AD- | uscscag(Ada)CfaAfGfGfaagagucasg | 2744 | VPusCfsugaCfuCfUfuccuUfgUfcuggasgs | 2879 | CCUCCAGACAAGGAAGAGUC | 3014 |
| 1735104 | sa | | g | | AGC | |
| AD- | usgscca(Gda)AfaAfCfAfgcaucagcsg | 2745 | VPusCfsgcuGfaUfGfcuguUfuCfuggcascs | 2880 | AGUGCCAGAAACAGCAUCAG | 3015 |
| 1735105 | sa | | u | | CGU | |
| AD- | gscsaua(Ada)UfaUfGfGfauacgccusu | 2746 | VPusAfsaggCfgUfAfuccaUfaUfuaugcsas | 2881 | CUGCAUAAUAUGGAUACGCC | 3016 |
| 1735106 | sa | | g | | UUA | |
| AD- | asgsccu(Cda)AfuCfCfUfgaugaugcsu | 2747 | VPusAfsgcaUfcAfUfcaggAfuGfaggcusgs | 2882 | UCAGCCUCAUCCUGAUGAUGC | 3017 |
| 1735107 | sa | | a | | UG | |
| AD- | asasgcc(Uda)CfuUfGfAfgcaggguus | 2748 | VPusCfsaacCfcUfGfcucaAfgAfggcuusgsg | 2883 | CCAAGCCUCUUGAGCAGGGU | 3018 |
| 1735108 | gsa | | | | UGG | |
| AD- | usasaag(Gda)GfaAfGfAfaguugaags | 2749 | VPusGfscuuCfaAfCfuucuUfcCfcuuuasasu | 2884 | AUUAAAGGGAAGAAGUUGAA | 3019 |
| 1735109 | csa | | | | GCU | |
| AD- | gsgscag(Cda)AfuUfGfAfgaagguggs | 2750 | VPusAfsccaCfcUfUfcucaAfuGfcugccscsa | 2885 | UGGGCAGCAUUGAGAAGGUG | 3020 |
| 1735110 | usa | | | | GUG | |
| AD- | gsuscag(Cda)GfaCfAfGfcuucuuccsg | 2751 | VPusCfsggaAfgAfAfgcugUfcGfcugacscs | 2886 | GGGUCAGCGACAGCUUCUUCC | 3021 |
| 1735111 | sa | | c | | GG | |
| AD- | csusgcu(Gda)UfcUfCfCfucaaccaasg | 2752 | VPusCfsuugGfuUfGfaggaGfaCfagcagsgs | 2887 | CCCUGCUGUCUCCUCAACCAA | 3022 |
| 1735112 | sa | | g | | GG | |
| AD- | asgsgag(Gda)AfaGfAfAfuuggagacs | 2753 | VPusAfsgucUfcCfAfauucUfuCfcuccuscsc | 2888 | GGAGGAGGAAGAAUUGGAGA | 3023 |
| 1735113 | usa | | | | CUG | |
| AD- | cscsugu(Cda)AfcCfAfCfucugaaggsu | 2754 | VPusAfsccuUfcAfGfagugGfuGfacaggsas | 2889 | CUCCUGUCACCACUCUGAAGG | 3024 |
| 1735114 | sa | | g | | UC | |
| AD- | asgsacu(Uda)UfaUfGfUfauagccacsa | 2755 | VPusUfsgugGfcUfAfuacaUfaAfagucusas | 2890 | AUAGACUUUAUGUAUAGCCA | 3025 |
| 1735115 | sa | | u | | CAG | |
| AD- | gsusuac(Gda)CfaUfGfCfcugcuuuus | 2756 | VPusAfsaaaAfgCfAfggcaUfgCfguaacsasc | 2891 | GUGUUACGCAUGCCUGCUUU | 3026 |
| 1735116 | usa | | | | UUU | |
| AD- | cscsagu(Uda)CfaCfAfGfcugccaausg | 2757 | VPusCfsauuGfgCfAfgcugUfgAfacuggsgs | 2892 | ACCCAGUUCACAGCUGCCAAU | 3027 |
| 1735117 | sa | | u | | GA | |
| AD- | csasggc(Ada)CfgUfGfUfguaugcacs | 2758 | VPusAfsgugCfaUfAfcacaCfgUfgccugscsa | 2893 | UGCAGGCACGUGUGUAUGCA | 3028 |
| 1735118 | usa | | | | CUC | |
| AD- | asusggc(Ada)GfuCfAfAfcaaaggccsu | 2759 | VPusAfsggcCfuUfUfguugAfcUfgccauscs | 2894 | GGAUGGCAGUCAACAAAGGC | 3029 |
| 1735119 | sa | | c | | CUC | |
| AD- | csasaac(Uda)UfgUfGfGfccaaaagasu | 2760 | VPusAfsucuUfuUfGfgccaCfaAfguuugsgs | 2895 | ACCAAACUUGUGGCCAAAAG | 3030 |
| 1735120 | sa | | u | | AUA | |
| AD- | uscsuga(Cda)CfaAfCfAfcccucucusc | 2761 | VPusGfsagaGfaGfGfguguUfgGfucagasgs | 2896 | GCUCUGACCAACACCCUCUCU | 3031 |
| 1735121 | sa | | c | | CG | |
| AD- | uscsaca(Uda)UfaUfAfAfaucccacusc | 2762 | VPusGfsaguGfgGfAfuuuaUfaAfugugasus | 2897 | UAUCACAUUAUAAAUCCCAC | 3032 |
| 1735122 | sa | | a | | UCG | |
| AD- | gsasgga(Gda)AfaCfAfAfguucagugs | 2763 | VPusUfscacUfgAfAfcuugUfuCfuccucsas | 2898 | CUGAGGAGAACAAGUUCAGU | 3033 |
| 1735123 | asa | | g | | GAG | |
| AD- | gsasgca(Gda)GfaGfAfAfugugcugcs | 2764 | VPusUfsgcaGfcAfCfauucUfcCfugcucsasg | 2899 | CUGAGCAGGAGAAUGUGCUG | 3034 |
| 1735124 | asa | | | | CAG | |
| AD- | gsasaga(Cda)CfuAfCfAfccagcacusa | 2765 | VPusUfsaguGfcUfGfguguAfgGfucuucsus | 2900 | CAGAAGACCUACACCAGCACU | 3035 |
| 1735125 | sa | | g | | AA | |
| AD- | asgsgcc(Uda)CfaCfCfUfugcuggausg | 2766 | VPusCfsaucCfaGfCfaaggUfgAfggccususu | 2901 | AAAGGCCUCACCUUGCUGGA | 3036 |
| 1735126 | sa | | | | UGG | |
| AD- | asgscca(Gda)CfuGfCfUfugcucacasg | 2767 | VPusCfsuguGfaGfCfaagcAfgCfuggcuscs | 2902 | AGAGCCAGCUGCUUGCUCACA | 3037 |
| 1735127 | sa | | u | | GC | |
| AD- | gsgsgcu(Cda)UfgUfGfAfgacugaggs | 2768 | VPusAfsccuCfaGfUfcucaCfaGfagcccsasg | 2903 | CUGGGCUCUGUGAGACUGAG | 3038 |
| 1735128 | usa | | | | GUG | |
| AD- | csgsaga(Gda)CfgAfAfUfuccgggacsa | 2769 | VPusUfsgucCfcGfGfaauuCfgCfucucgsgs | 2904 | CCCGAGAGCGAAUUCCGGGAC | 3039 |
| 1735129 | sa | | g | | AU | |
| AD- | gsusggc(Ada)CfaUfAfCfccugcagasa | 2770 | VPusUfsucuGfcAfGfgguaUfgUfgccacsas | 2905 | GUGUGGCACAUACCCUGCAG | 3040 |
| 1735130 | sa | | c | | AAG | |
| AD- | gsusgga(Cda)AfcAfGfUfggugcauus | 2771 | VPusUfsaauGfcAfCfcacuGfuGfuccacscsa | 2906 | UGGUGGACACAGUGGUGCAU | 3041 |
| 1735131 | asa | | | | UAC | |
| AD- | asasgcc(Cda)AfgAfAfGfucucccaasg | 2772 | VPusCfsuugGfgAfGfacuuCfuGfggcuusgs | 2907 | GCAAGCCCAGAAGUCUCCCAA | 3042 |
| 1735132 | sa | | c | | GG | |
| AD- | gsgscca(Uda)GfuCfCfCfuaucagausg | 2773 | VPusCfsaucUfgAfUfagggAfcAfuggccscs | 2908 | AGGGCCAUGUCCCUAUCAGA | 3043 |
| 1735133 | sa | | u | | UGC | |
| AD- | gscscgg(Cda)GfgGfUfUfucucuaacsa | 2774 | VPusUfsguuAfgAfGfaaacCfcGfccggcscsc | 2909 | GGGCCGGCGGGUUUCUCUAA | 3044 |
| 1735134 | sa | | | | CAA | |
| AD- | csusgaa(Gda)GfaCfAfCfcaucuccasc | 2775 | VPusGfsuggAfgAfUfggugUfcCfuucagscs | 2910 | AGCUGAAGGACACCAUCUCCA | 3045 |
| 1735135 | sa | | u | | CC | |
| AD- | gsascca(Cda)CfaUfCfUfcggcugugsa | 2776 | VPusUfscacAfgCfCfgagaUfgGfuggucsus | 2911 | CAGACCACCAUCUCGGCUGUG | 3046 |
| 1735136 | sa | | g | | AC | |
| AD- | cscsagu(Uda)UfuUfAfAfgggacaccsa | 2777 | VPusUfsgguGfuCfCfcuuaAfaAfacuggscs | 2912 | AGCCAGUUUUUAAGGGACAC | 3047 |
| 1735137 | sa | | u | | CAG | |
| AD- | gsgscca(Gda)AfgAfCfAfcugcggaas | 2778 | VPusAfsuucCfgCfAfguguCfuCfuggccsas | 2913 | GUGGCCAGAGACACUGCGGA | 3048 |
| 1735138 | usa | | c | | AUU | |
| AD- | csgsuuc(Cda)CfaUfCfGfcgagcacusu | 2779 | VPusAfsaguGfcUfCfgcgaUfgGfgaacgscs | 2914 | AGCGUUCCCAUCGCGAGCACU | 3049 |
| 1735139 | sa | | u | | UC | |
| AD- | cscsggg(Ada)CfaUfCfGfacaacccasc | 2780 | VPusGfsuggGfuUfGfucgaUfgUfcccggsas | 2915 | UUCCGGGACAUCGACAACCCA | 3050 |
| 1735140 | sa | | a | | CC | |
| AD- | uscsuga(Uda)GfaUfCfUfaggcucccsa | 2781 | VPusUfsgggAfgCfCfuagaUfcAfucagasgs | 2916 | CCUCUGAUGAUCUAGGCUCCC | 3051 |
| 1735141 | sa | | g | | AG | |
| AD- | csusgca(Gda)AfaGfAfCfccuccagasc | 2782 | VPusGfsucuGfgAfGfggucUfuCfugcagsgs | 2917 | CCCUGCAGAAGACCCUCCAGA | 3052 |
| 1735142 | sa | | g | | CC | |
| AD- | csgscca(Gda)UfaGfCfUfuggcugccsu | 2783 | VPusAfsggcAfgCfCfaagcUfaCfuggcgscsu | 2918 | AGCGCCAGUAGCUUGGCUGCC | 3053 |
| 1735143 | sa | | | | UG | |
| AD- | csgscuu(Cda)AfcAfGfGfcugaguccsa | 2784 | VPusUfsggaCfuCfAfgccuGfuGfaagcgsgs | 2919 | GCCGCUUCACAGGCUGAGUCC | 3054 |
| 1735144 | sa | | c | | AG | |
| AD- | ususuuu(Uda)UfaGfCfAfuccuuuugs | 2785 | VPusCfscaaAfaGfGfaugcUfaAfaaaaasasa | 2920 | UUUUUUUUUAGCAUCCUUUU | 3055 |
| 1735145 | gsa | | | | GGG | |
| AD- | gsasagc(Cda)AfaAfGfCfgcagggucsa | 2786 | VPusUfsgacCfcUfGfcgcuUfuGfgcuucsus | 2921 | GAGAAGCCAAAGCGCAGGGU | 3056 |
| 1735146 | sa | | c | | CAG | |
| AD- | gsasgga(Gda)GfaUfCfAfugaggaccsa | 2787 | VPusUfsgguCfcUfCfaugaUfcCfuccucscsu | 2922 | AGGAGGAGGAUCAUGAGGAC | 3057 |
| 1735147 | sa | | | | CAG | |
| AD- | gscsacg(Cda)AfuUfAfCfagccagcusg | 2788 | VPusCfsagcUfgGfCfuguaAfuGfcgugcsgs | 2923 | CCGCACGCAUUACAGCCAGCU | 3058 |
| 1735148 | sa | | g | | GC | |
| AD- | csusuca(Uda)UfgAfAfAfaccaccacsg | 2789 | VPusCfsgugGfuGfGfuuuuCfaAfugaagsgs | 2924 | CCCUUCAUUGAAAACCACCAC | 3059 |
| 1735149 | sa | | g | | GG | |
| AD- | ususuuu(Gda)AfuGfGfCfcacauaaus | 2790 | VPusUfsauuAfuGfUfggccAfuCfaaaaasgsa | 2925 | UCUUUUUGAUGGCCACAUAA | 3060 |
| 1735150 | asa | | | | UAA | |
| AD- | cscsacc(Uda)GfgAfGfGfaaaagaucsc | 2791 | VPusGfsgauCfuUfUfuccuCfcAfgguggsus | 2926 | GACCACCUGGAGGAAAAGAU | 3061 |
| 1735151 | sa | | c | | CCC | |
| AD- | csasagg(Cda)CfaAfGfCfcaagccucsu | 2792 | VPusAfsgagGfcUfUfggcuUfgGfccuugsgs | 2927 | CCCAAGGCCAAGCCAAGCCUC | 3062 |
| 1735152 | sa | | g | | UU | |
| AD- | gsasgga(Cda)CfaGfAfCfagacacggsa | 2793 | VPusUfsccgUfgUfCfugucUfgGfuccucsas | 2928 | AUGAGGACCAGACAGACACG | 3063 |
| 1735153 | sa | | u | | GAG | |
| AD- | gsasugc(Cda)CfuGfAfAfgggcguuas | 2794 | VPusGfsuaaCfgCfCfcuucAfgGfgcaucsusg | 2929 | CAGAUGCCCUGAAGGGCGUU | 3064 |
| 1735154 | csa | | | | ACU | |
| AD- | cscsaac(Ada)CfuCfGfAfgcuggccgsa | 2795 | VPusUfscggCfcAfGfcucgAfgUfguuggscs | 2930 | UGCCAACACUCGAGCUGGCCG | 3065 |
| 1735155 | sa | | a | | AC | |
| AD- | csasggg(Cda)UfaUfGfCfaccugcagsg | 2796 | VPusCfscugCfaGfGfugcaUfaGfcccugscsa | 2931 | UGCAGGGCUAUGCACCUGCA | 3066 |
| 1735156 | sa | | | | GGC | |
| AD- | asasggu(Gda)GfuGfGfAfguaccuccs | 2797 | VPusAfsggaGfgUfAfcuccAfcCfaccuuscsu | 2932 | AGAAGGUGGUGGAGUACCUC | 3067 |
| 1735157 | usa | | | | CUC | |
| AD- | ususgaa(Gda)CfuUfGfAfggagcgags | 2798 | VPusCfscucGfcUfCfcucaAfgCfuucaascsu | 2933 | AGUUGAAGCUUGAGGAGCGA | 3068 |
| 1735158 | gsa | | | | GGA | |
| AD- | csgsugg(Cda)CfaUfGfUfggaucccasg | 2799 | VPusCfsuggGfaUfCfcacaUfgGfccacgsgsu | 2934 | ACCGUGGCCAUGUGGAUCCCA | 3069 |
| 1735159 | sa | | | | GG | |
| AD- | csasgca(Cda)UfaAfGfGfaagcccacsc | 2800 | VPusGfsgugGfgCfUfuccuUfaGfugcugsgs | 2935 | ACCAGCACUAAGGAAGCCCAC | 3070 |
| 1735160 | sa | | u | | CC | |
| AD- | gsuscgc(Uda)GfaUfGfGfagcccgagsa | 2801 | VPusUfscucGfgGfCfuccaUfcAfgcgacsasg | 2936 | CUGUCGCUGAUGGAGCCCGA | 3071 |
| 1735161 | sa | | | | GAG | |
| AD- | ususcuu(Cda)CfgGfCfCfcagcgucasu | 2802 | VPusAfsugaCfgCfUfgggcCfgGfaagaasgsc | 2937 | GCUUCUUCCGGCCCAGCGUCA | 3072 |
| 1735162 | sa | | | | UG | |
| AD- | csusgcu(Cda)CfuGfGfAfcaccagcasa | 2803 | VPusUfsugcUfgGfUfguccAfgGfagcagsgs | 2938 | CCCUGCUCCUGGACACCAGCA | 3073 |
| 1735163 | sa | | g | | AG | |
| AD- | ususucu(Gda)AfgUfAfCfccgccgcus | 2804 | VPusAfsagcGfgCfGfgguaCfuCfagaaasgsu | 2939 | ACUUUCUGAGUACCCGCCGCU | 3074 |
| 1735164 | usa | | | | UC | |
| AD- | csgscag(Gda)CfuGfUfCfcacccagusu | 2805 | VPusAfsacuGfgGfUfggacAfgCfcugcgsgs | 2940 | UCCGCAGGCUGUCCACCCAGU | 3075 |
| 1735165 | sa | | a | | UC | |
| AD- | gsgscug(Uda)GfaCfAfUfgggcaccus | 2806 | VPusCfsaggUfgCfCfcaugUfcAfcagccsgsa | 2941 | UCGGCUGUGACAUGGGCACC | 3076 |
| 1735166 | gsa | | | | UGC | |
| AD- | uscsagu(Gda)AfgGfUfAfgcagcccus | 2807 | VPusCfsaggGfcUfGfcuacCfuCfacugasasc | 2942 | GUUCAGUGAGGUAGCAGCCC | 3077 |
| 1735167 | gsa | | | | UGC | |
| AD- | asgscgu(Cda)AfuGfGfAfgcccauccsu | 2808 | VPusAfsggaUfgGfGfcuccAfuGfacgcusgs | 2943 | CCAGCGUCAUGGAGCCCAUCC | 3078 |
| 1735168 | sa | | g | | UG | |
| AD- | csusgga(Uda)GfgAfGfAfccucccugs | 2809 | VPusUfscagGfgAfGfgucuCfcAfuccagscsa | 2944 | UGCUGGAUGGAGACCUCCCU | 3079 |
| 1735169 | asa | | | | GAG | |
| AD- | uscsagc(Cda)GfgAfGfUfgaguguugs | 2810 | VPusCfscaaCfaCfUfcacuCfcGfgcugascsc | 2945 | GGUCAGCCGGAGUGAGUGUU | 3080 |
| 1735170 | gsa | | | | GGG | |
| AD- | csusggc(Cda)GfaCfUfGfgcuucuggs | 2811 | VPusUfsccaGfaAfGfccagUfcGfgccagscsu | 2946 | AGCUGGCCGACUGGCUUCUG | 3081 |
| 1735171 | asa | | | | GAG | |
| AD- | gsgsugc(Uda)GfcAfCfCfucacaccasg | 2812 | VPusCfsuggUfgUfGfagguGfcAfgcaccscs | 2947 | AGGGUGCUGCACCUCACACCA | 3082 |
| 1735172 | sa | | u | | GC | |
| AD- | gsgscug(Cda)CfuGfGfAfgcauggags | 2813 | VPusGfscucCfaUfGfcuccAfgGfcagccsasa | 2948 | UUGGCUGCCUGGAGCAUGGA | 3083 |
| 1735173 | csa | | | | GCC | |
| AD- | cscsugc(Ada)GfcUfGfUfgcugggcas | 2814 | VPusAfsugcCfcAfGfcacaGfcUfgcaggsusg | 2949 | CACCUGCAGCUGUGCUGGGCA | 3084 |
| 1735174 | usa | | | | UG | |
| AD- | asgsugg(Cda)CfaUfGfCfaggcggugs | 2815 | VPusAfscacCfgCfCfugcaUfgGfccacusgsa | 2950 | UCAGUGGCCAUGCAGGCGGU | 3085 |
| 1735175 | usa | | | | GUC | |
| AD- | gsascuu(Gda)GfcCfUfUfgggcagcas | 2816 | VPusAfsugcUfgCfCfcaagGfcCfaagucsgsg | 2951 | CCGACUUGGCCUUGGGCAGCA | 3086 |
| 1735176 | usa | | | | UU | |
| AD- | gsasgcg(Ada)AfgUfGfCfggguacccs | 2817 | VPusAfsgggUfaCfCfcgcaCfuUfcgcucscsu | 2952 | AGGAGCGAAGUGCGGGUACC | 3087 |
| 1735177 | usa | | | | CUG | |
| AD- | csusggu(Gda)GfcCfUfCfugugugcas | 2818 | VPusUfsugcAfcAfCfagagGfcCfaccagsgsg | 2953 | CCCUGGUGGCCUCUGUGUGCA | 3088 |
| 1735178 | asa | | | | AU | |
| AD- | asasccc(Ada)CfcAfGfCfcgaggucgsa | 2819 | VPusUfscgaCfcUfCfggcuGfgUfggguusgs | 2954 | ACAACCCACCAGCCGAGGUCG | 3089 |
| 1735179 | sa | | u | | AG | |
| AD- | usgsaug(Cda)UfgCfCfAfaggcgcacsu | 2820 | VPusAfsgugCfgCfCfuuggCfaGfcaucasusc | 2955 | GAUGAUGCUGCCAAGGCGCA | 3090 |
| 1735180 | sa | | | | CUU | |
| AD- | cscsaau(Gda)AfgCfUfGfgccugccgsa | 2821 | VPusUfscggCfaGfGfccagCfuCfauuggscsa | 2956 | UGCCAAUGAGCUGGCCUGCCG | 3091 |
| 1735181 | sa | | | | AG | |
| AD- | gsusgcu(Gda)CfaGfCfGfgguccugcs | 2822 | VPusUfsgcaGfgAfCfccgcUfgCfagcacsasu | 2957 | AUGUGCUGCAGCGGGUCCUG | 3092 |
| 1735182 | asa | | | | CAG | |
| AD- | gsgsgcg(Uda)GfcAfGfAfgcgccagus | 2823 | VPusUfsacuGfgCfGfcucuGfcAfcgcccsusu | 2958 | AAGGGCGUGCAGAGCGCCAG | 3093 |
| 1735183 | asa | | | | UAG | |
| AD- | gsgsuga(Gda)UfgGfCfAfccugcgaas | 2824 | VPusAfsuucGfcAfGfgugcCfaCfucaccsasc | 2959 | GUGGUGAGUGGCACCUGCGA | 3094 |
| 1735184 | usa | | | | AUG | |
| AD- | ascsgga(Gda)GfgAfGfAfggacacggs | 2825 | VPusUfsccgUfgUfCfcucuCfcCfuccgusgsu | 2960 | ACACGGAGGGAGAGGACACG | 3095 |
| 1735185 | asa | | | | GAG | |

TABLE 10
Unmodified Sense and Antisense Strand Sequences of PLIN1 dsRNA Agents Comprising a GalNAc
Derivative Targeting Ligand

| | | SEQ | Range in | | SEQ | Range in |
|---|---|---|---|---|---|---|
| Duplex | Sense Sequence | ID | NM_ | Antisense Sequence | ID | NM_ |
| Name | 5′ to 3′ | NO: | 002666.5 | 5′ to 3′ | NO: | 002666.5 |
| AD-1735186 | CAUCUCUUUAACCAAACUUGA | 2421 | 1995-2015 | UCAAGUUUGGUUAAAGAGAUGA | 2556 | 1993-2015 |
| | | | | A | | |
| AD-1735187 | CUCUAACAAAUAAACAGAACA | 2422 | 1740-1760 | UGUUCUGUUUAUUUGUUAGAGA | 2557 | 1738-1760 |
| | | | | A | | |
| AD-1735188 | UGCAUAGUCACUCUUUUGAUA | 2423 | 2390-2410 | UAUCAAAAGAGUGACUAUGCAG | 2558 | 2388-2410 |
| | | | | G | | |
| AD-1735189 | AACUUGAUUUUUCAUCUCUUA | 2424 | 1983-2003 | UAAGAGAUGAAAAAUCAAGUUA | 2559 | 1981-2003 |
| | | | | G | | |
| AD-1735190 | GACACAUUCUUAGCACUGAAA | 2425 | 2128-2148 | UUUCAGUGCUAAGAAUGUGUCA | 2560 | 2126-2148 |
| | | | | A | | |
| AD-1735191 | ACGCCUUAUUUGAUUUAACUA | 2426 | 2807-2827 | UAGUUAAAUCAAAUAAGGCGUA | 2561 | 2805-2827 |
| | | | | U | | |
| AD-1735192 | UAGUCUUCGAAAUGUUAAUAA | 2427 | 2474-2494 | UUAUUAACAUUUCGAAGACUAG | 2562 | 2472-2494 |
| | | | | G | | |
| AD-1735193 | GAUGGACUUUUAAGUUGUUUA | 2428 | 2838-2858 | UAAACAACUUAAAAGUCCAUCA | 2563 | 2836-2858 |
| | | | | U | | |
| AD-1735194 | UGCUUUUUUCACUUAAUAAUA | 2429 | 2702-2722 | UAUUAUUAAGUGAAAAAAGCAG | 2564 | 2700-2722 |
| | | | | G | | |
| AD-1735195 | ACAUAAUAACUACUGCAUAAA | 2430 | 2780-2800 | UUUAUGCAGUAGUUAUUAUGUG | 2565 | 2778-2800 |
| | | | | G | | |
| AD-1735196 | UACUAGUGUCACUUUCUGAGA | 2431 | 2271-2291 | UCUCAGAAAGUGACACUAGUAU | 2566 | 2269-2291 |
| | | | | U | | |
| AD-1735197 | CAAUCAGAUGCAAAAGCUCUA | 2432 | 2234-2254 | UAGAGCUUUUGCAUCUGAUUGU | 2567 | 2232-2254 |
| | | | | U | | |
| AD-1735198 | UAAGAGUAAUUGCCUAACUUA | 2433 | 1968-1988 | UAAGUUAGGCAAUUACUCUUAU | 2568 | 1966-1988 |
| | | | | A | | |
| AD-1735199 | GGCUUGUUUAUGAACAUUAAA | 2434 | 82-102 | UUUAAUGUUCAUAAACAAGCCA | 2569 | 80-102 |
| | | | | U | | |
| AD-1735200 | UUUUUGCUACUGCAAACGAUA | 2435 | 2871-2891 | UAUCGUUUGCAGUAGCAAAAAA | 2570 | 2869-2891 |
| | | | | G | | |
| AD-1735201 | AACGAUGCUAUAAUAAAUGUA | 2436 | 2885-2905 | UACAUUUAUUAUAGCAUCGUUU | 2571 | 2883-2905 |
| | | | | G | | |
| AD-1735202 | UGGUUGUUACUAUAAGAGUAA | 2437 | 1956-1976 | UUACUCUUAUAGUAACAACCAA | 2572 | 1954-1976 |
| | | | | G | | |
| AD-1735203 | CUGAUGAACAUCCUCUGAUGA | 2438 | 2181-2201 | UCAUCAGAGGAUGUUCAUCAGA | 2573 | 2179-2201 |
| | | | | G | | |
| AD-1735204 | CUGCGGAUAAAUAUUUGCCAA | 2439 | 2059-2079 | UUGGCAAAUAUUUAUCCGCAGA | 2574 | 2057-2079 |
| | | | | G | | |
| AD-1735205 | CCAAAAUUCAGAUUCUGCCUA | 2440 | 2039-2059 | UAGGCAGAAUCUGAAUUUUGGA | 2575 | 2037-2059 |
| | | | | A | | |
| AD-1735206 | AAGGAUGUGUGUCUUUCUCCA | 2441 | 2547-2567 | UGGAGAAAGACACACAUCCUUU | 2576 | 2545-2567 |
| | | | | U | | |
| AD-1735207 | UGCGAAUGCUUCCAGAAGACA | 2442 | 231-251 | UGUCUUCUGGAAGCAUUCGCAG | 2577 | 229-251 |
| | | | | G | | |
| AD-1735208 | CGAAUGAGUAACUCCUGUCAA | 2443 | 2079-2099 | UUGACAGGAGUUACUCAUUCGU | 2578 | 2077-2099 |
| | | | | G | | |
| AD-1735209 | UGGGUGUUUAUUUAAAAUACA | 2444 | 2254-2274 | UGUAUUUUAAAUAAACACCCAA | 2579 | 2252-2274 |
| | | | | G | | |
| AD-1735210 | CAAAAGAUAUUUGACCGUUUA | 2445 | 2019-2039 | UAAACGGUCAAAUAUCUUUUGG | 2580 | 2017-2039 |
| | | | | C | | |
| AD-1735211 | AUACAGCUUGGAGAGAUUUUA | 2446 | 2720-2740 | UAAAAUCUCUCCAAGCUGUAUU | 2581 | 2718-2740 |
| | | | | A | | |
| AD-1735212 | AAAUGCAUUCAUACAAUUACA | 2447 | 2509-2529 | UGUAAUUGUAUGAAUGCAUUUU | 2582 | 2507-2529 |
| | | | | C | | |
| AD-1735213 | UCCCACUCGCUCUUUUUGAUA | 2448 | 2756-2776 | UAUCAAAAAGAGCGAGUGGGAU | 2583 | 2754-2776 |
| | | | | U | | |
| AD-1735214 | GCUUGUGUUUACACAAGCUGA | 2449 | 2664-2684 | UCAGCUUGUGUAAACACAAGCG | 2584 | 2662-2684 |
| | | | | G | | |
| AD-1735215 | CCUGCCUUACAUGGCUUGUUA | 2450 | 70-90 | UAACAAGCCAUGUAAGGCAGGU | 2585 | 68-90 |
| | | | | G | | |
| AD-1735216 | GAGAUUUUUGUAUCACAUUAA | 2451 | 2732-2752 | UUAAUGUGAUACAAAAAUCUCU | 2586 | 2730-2752 |
| | | | | C | | |
| AD-1735217 | AGCACUUCAGACAAGGUCCUA | 2452 | 540-560 | UAGGACCUUGUCUGAAGUGCUC | 2587 | 538-560 |
| | | | | G | | |
| AD-1735218 | UCACUCUCAGAGCCAGUUUUA | 2453 | 1895-1915 | UAAAACUGGCUCUGAGAGUGAA | 2588 | 1893-1915 |
| | | | | G | | |
| AD-1735219 | ACUGAACUCCUCUGUGAUCUA | 2454 | 2142-2162 | UAGAUCACAGAGGAGUUCAGUG | 2589 | 2140-2162 |
| | | | | C | | |
| AD-1735220 | UAGUUCCCUAAUGAUGGACUA | 2455 | 2826-2846 | UAGUCCAUCAUUAGGGAACUAG | 2590 | 2824-2846 |
| | | | | U | | |
| AD-1735221 | GGCGUUACUGACAACGUGGUA | 2456 | 1296-1316 | UACCACGUUGUCAGUAACGCCC | 2591 | 1294-1316 |
| | | | | U | | |
| AD-1735222 | UGAUCUAGGAUGAUCUGUUCA | 2457 | 2156-2176 | UGAACAGAUCAUCCUAGAUCAC | 2592 | 2154-2176 |
| | | | | A | | |
| AD-1735223 | GUGAUGAUAUAUAGACUUUAA | 2458 | 2427-2447 | UUAAAGUCUAUAUAUCAUCACC | 2593 | 2425-2447 |
| | | | | A | | |
| AD-1735224 | GGCUACUUUGAAGGGAACAAA | 2459 | 2217-2237 | UUUGUUCCCUUCAAAGUAGCCU | 2594 | 2215-2237 |
| | | | | G | | |
| AD-1735225 | CUGCUCUGAUUCUAUGGCUUA | 2460 | 1937-1957 | UAAGCCAUAGAAUCAGAGCAGG | 2595 | 1935-1957 |
| | | | | C | | |
| AD-1735226 | AGAUUGCUUCUGAGCUGAAGA | 2461 | 463-483 | UCUUCAGCUCAGAAGCAAUCUU | 2596 | 461-483 |
| | | | | U | | |
| AD-1735227 | GCCAUCUCUUGUGUAUGCAGA | 2462 | 2607-2627 | UCUGCAUACACAAGAGAUGGCA | 2597 | 2605-2627 |
| | | | | C | | |
| AD-1735228 | AGCCACAUUUCCAUUUGCAUA | 2463 | 2354-2374 | UAUGCAAAUGGAAAUGUGGCUG | 2598 | 2352-2374 |
| | | | | U | | |
| AD-1735229 | UCCAGACAGAAGGUUUUGACA | 2464 | 2111-2131 | UGUCAAAACCUUCUGUCUGGAC | 2599 | 2109-2131 |
| | | | | C | | |
| AD-1735230 | CUCUCGAUACACCGUGCAGAA | 2465 | 818-838 | UUCUGCACGGUGUAUCGAGAGA | 2600 | 816-838 |
| | | | | G | | |
| AD-1735231 | GGCGCACUUUUUAUUUUUAUA | 2466 | 1838-1858 | UAUAAAAAUAAAAAGUGCGCCU | 2601 | 1836-1858 |
| | | | | U | | |
| AD-1735232 | GAGCGUUGCCACUUUCAAAGA | 2467 | 1775-1795 | UCUUUGAAAGUGGCAACGCUCG | 2602 | 1773-1795 |
| | | | | C | | |
| AD-1735233 | UUGCAUCAUUACUGCCUUCAA | 2468 | 2368-2388 | UUGAAGGCAGUAAUGAUGCAAA | 2603 | 2366-2388 |
| | | | | U | | |
| AD-1735234 | GCGCAAGAAGAGCUGAGUCGA | 2469 | 1685-1705 | UCGACUCAGCUCUUCUUGCGCA | 2604 | 1683-1705 |
| | | | | G | | |
| AD-1735235 | UGCGGAAUUUGCUGCCAACAA | 2470 | 611-631 | UUGUUGGCAGCAAAUUCCGCAG | 2605 | 609-631 |
| | | | | U | | |
| AD-1735236 | GUGUGCAAUGCCUAUGAGAAA | 2471 | 291-311 | UUUCUCAUAGGCAUUGCACACA | 2606 | 289-311 |
| | | | | G | | |
| AD-1735237 | GAAUUCAAAUAUUGCAAAAGA | 2472 | 2530-2550 | UCUUUUGCAAUAUUUGAAUUCU | 2607 | 2528-2550 |
| | | | | G | | |
| AD-1735238 | CCUGUGUGCUUUGUAGAGCCA | 2473 | 2320-2340 | UGGCUCUACAAAGCACACAGGC | 2608 | 2318-2340 |
| | | | | C | | |
| AD-1735239 | UCCAGACAAGGAAGAGUCAGA | 2474 | 710-730 | UCUGACUCUUCCUUGUCUGGAG | 2609 | 708-730 |
| | | | | G | | |
| AD-1735240 | UGCCAGAAACAGCAUCAGCGA | 2475 | 509-529 | UCGCUGAUGCUGUUUCUGGCAC | 2610 | 507-529 |
| | | | | U | | |
| AD-1735241 | GCAUAAUAUGGAUACGCCUUA | 2476 | 2794-2814 | UAAGGCGUAUCCAUAUUAUGCA | 2611 | 2792-2814 |
| | | | | G | | |
| AD-1735242 | AGCCUCAUCCUGAUGAUGCUA | 2477 | 1813-1833 | UAGCAUCAUCAGGAUGAGGCUG | 2612 | 1811-1833 |
| | | | | A | | |
| AD-1735243 | AAGCCUCUUGAGCAGGGUUGA | 2478 | 779-799 | UCAACCCUGCUCAAGAGGCUUG | 2613 | 777-799 |
| | | | | G | | |
| AD-1735244 | UAAAGGGAAGAAGUUGAAGCA | 2479 | 99-119 | UGCUUCAACUUCUUCCCUUUAA | 2614 | 97-119 |
| | | | | U | | |
| AD-1735245 | GGCAGCAUUGAGAAGGUGGUA | 2480 | 675-695 | UACCACCUUCUCAAUGCUGCCC | 2615 | 673-695 |
| | | | | A | | |
| AD-1735246 | GUCAGCGACAGCUUCUUCCGA | 2481 | 1617-1637 | UCGGAAGAAGCUGUCGCUGACC | 2616 | 1615-1637 |
| | | | | C | | |
| AD-1735247 | CUGCUGUCUCCUCAACCAAGA | 2482 | 1243-1263 | UCUUGGUUGAGGAGACAGCAGG | 2617 | 1241-1263 |
| | | | | G | | |
| AD-1735248 | AGGAGGAAGAAUUGGAGACUA | 2483 | 1054-1074 | UAGUCUCCAAUUCUUCCUCCUC | 2618 | 1052-1074 |
| | | | | C | | |
| AD-1735249 | CCUGUCACCACUCUGAAGGUA | 2484 | 2092-2112 | UACCUUCAGAGUGGUGACAGGA | 2619 | 2090-2112 |
| | | | | G | | |
| AD-1735250 | AGACUUUAUGUAUAGCCACAA | 2485 | 2439-2459 | UUGUGGCUAUACAUAAAGUCUA | 2620 | 2437-2459 |
| | | | | U | | |
| AD-1735251 | GUUACGCAUGCCUGCUUUUUA | 2486 | 2690-2710 | UAAAAAGCAGGCAUGCGUAACA | 2621 | 2688-2710 |
| | | | | C | | |
| AD-1735252 | CCAGUUCACAGCUGCCAAUGA | 2487 | 377-397 | UCAUUGGCAGCUGUGAACUGGG | 2622 | 375-397 |
| | | | | U | | |
| AD-1735253 | CAGGCACGUGUGUAUGCACUA | 2488 | 2640-2660 | UAGUGCAUACACACGUGCCUGC | 2623 | 2638-2660 |
| | | | | A | | |
| AD-1735254 | AUGGCAGUCAACAAAGGCCUA | 2489 | 132-152 | UAGGCCUUUGUUGACUGCCAUC | 2624 | 130-152 |
| | | | | C | | |
| AD-1735255 | CAAACUUGUGGCCAAAAGAUA | 2490 | 2007-2027 | UAUCUUUUGGCCACAAGUUUGG | 2625 | 2005-2027 |
| | | | | U | | |
| AD-1735256 | UCUGACCAACACCCUCUCUCA | 2491 | 803-823 | UGAGAGAGGGUGUUGGUCAGAG | 2626 | 801-823 |
| | | | | C | | |
| AD-1735257 | UCACAUUAUAAAUCCCACUCA | 2492 | 2744-2764 | UGAGUGGGAUUUAUAAUGUGAU | 2627 | 2742-2764 |
| | | | | A | | |
| AD-1735258 | GAGGAGAACAAGUUCAGUGAA | 2493 | 1074-1094 | UUCACUGAACUUGUUCUCCUCA | 2628 | 1072-1094 |
| | | | | G | | |
| AD-1735259 | GAGCAGGAGAAUGUGCUGCAA | 2494 | 177-197 | UUGCAGCACAUUCUCCUGCUCA | 2629 | 175-197 |
| | | | | G | | |
| AD-1735260 | GAAGACCUACACCAGCACUAA | 2495 | 245-265 | UUAGUGCUGGUGUAGGUCUUCU | 2630 | 243-265 |
| | | | | G | | |
| AD-1735261 | AGGCCUCACCUUGCUGGAUGA | 2496 | 146-166 | UCAUCCAGCAAGGUGAGGCCUU | 2631 | 144-166 |
| | | | | U | | |
| AD-1735262 | AGCCAGCUGCUUGCUCACAGA | 2497 | 2336-2356 | UCUGUGAGCAAGCAGCUGGCUC | 2632 | 2334-2356 |
| | | | | U | | |
| AD-1735263 | GGGCUCUGUGAGACUGAGGUA | 2498 | 13-33 | UACCUCAGUCUCACAGAGCCCA | 2633 | 11-33 |
| | | | | G | | |
| AD-1735264 | CGAGAGCGAAUUCCGGGACAA | 2499 | 1367-1387 | UUGUCCCGGAAUUCGCUCUCGG | 2634 | 1365-1387 |
| | | | | G | | |
| AD-1735265 | GUGGCACAUACCCUGCAGAAA | 2500 | 1134-1154 | UUUCUGCAGGGUAUGUGCCACA | 2635 | 1132-1154 |
| | | | | C | | |
| AD-1735266 | GUGGACACAGUGGUGCAUUAA | 2501 | 1314-1334 | UUAAUGCACCACUGUGUCCACC | 2636 | 1312-1334 |
| | | | | A | | |
| AD-1735267 | AAGCCCAGAAGUCUCCCAAGA | 2502 | 751-771 | UCUUGGGAGACUUCUGGGCUUG | 2637 | 749-771 |
| | | | | C | | |
| AD-1735268 | GGCCAUGUCCCUAUCAGAUGA | 2503 | 1268-1288 | UCAUCUGAUAGGGACAUGGCCC | 2638 | 1266-1288 |
| | | | | U | | |
| AD-1735269 | GCCGGCGGGUUUCUCUAACAA | 2504 | 1728-1748 | UUGUUAGAGAAACCCGCCGGCC | 2639 | 1726-1748 |
| | | | | C | | |
| AD-1735270 | CUGAAGGACACCAUCUCCACA | 2505 | 477-497 | UGUGGAGAUGGUGUCCUUCAGC | 2640 | 475-497 |
| | | | | U | | |
| AD-1735271 | GACCACCAUCUCGGCUGUGAA | 2506 | 1163-1183 | UUCACAGCCGAGAUGGUGGUCU | 2641 | 1161-1183 |
| | | | | G | | |
| AD-1735272 | CCAGUUUUUAAGGGACACCAA | 2507 | 1907-1927 | UUGGUGUCCCUUAAAAACUGGC | 2642 | 1905-1927 |
| | | | | U | | |
| AD-1735273 | GGCCAGAGACACUGCGGAAUA | 2508 | 599-619 | UAUUCCGCAGUGUCUCUGGCCA | 2643 | 597-619 |
| | | | | C | | |
| AD-1735274 | CGUUCCCAUCGCGAGCACUUA | 2509 | 527-547 | UAAGUGCUCGCGAUGGGAACGC | 2644 | 525-547 |
| | | | | U | | |
| AD-1735275 | CCGGGACAUCGACAACCCACA | 2510 | 1379-1399 | UGUGGGUUGUCGAUGUCCCGGA | 2645 | 1377-1399 |
| | | | | A | | |
| AD-1735276 | UCUGAUGAUCUAGGCUCCCAA | 2511 | 2194-2214 | UUGGGAGCCUAGAUCAUCAGAG | 2646 | 2192-2214 |
| | | | | G | | |
| AD-1735277 | CUGCAGAAGACCCUCCAGACA | 2512 | 1146-1166 | UGUCUGGAGGGUCUUCUGCAGG | 2647 | 1144-1166 |
| | | | | G | | |
| AD-1735278 | CGCCAGUAGCUUGGCUGCCUA | 2513 | 323-343 | UAGGCAGCCAAGCUACUGGCGC | 2648 | 321-343 |
| | | | | U | | |
| AD-1735279 | CGCUUCACAGGCUGAGUCCAA | 2514 | 2298-2318 | UUGGACUCAGCCUGUGAAGCGG | 2649 | 2296-2318 |
| | | | | C | | |
| AD-1735280 | UUUUUUUAGCAUCCUUUUGGA | 2515 | 1871-1891 | UCCAAAAGGAUGCUAAAAAAAA | 2650 | 1869-1891 |
| | | | | A | | |
| AD-1735281 | GAAGCCAAAGCGCAGGGUCAA | 2516 | 1601-1621 | UUGACCCUGCGCUUUGGCUUCU | 2651 | 1599-1621 |
| | | | | C | | |
| AD-1735282 | GAGGAGGAUCAUGAGGACCAA | 2517 | 1005-1025 | UUGGUCCUCAUGAUCCUCCUCC | 2652 | 1003-1025 |
| | | | | U | | |
| AD-1735283 | GCACGCAUUACAGCCAGCUGA | 2518 | 1666-1686 | UCAGCUGGCUGUAAUGCGUGCG | 2653 | 1664-1686 |
| | | | | G | | |
| AD-1735284 | CUUCAUUGAAAACCACCACGA | 2519 | 2585-2605 | UCGUGGUGGUUUUCAAUGAAGG | 2654 | 2583-2605 |
| | | | | G | | |
| AD-1735285 | UUUUUGAUGGCCACAUAAUAA | 2520 | 2768-2788 | UUAUUAUGUGGCCAUCAAAAAG | 2655 | 2766-2788 |
| | | | | A | | |
| AD-1735286 | CCACCUGGAGGAAAAGAUCCA | 2521 | 419-439 | UGGAUCUUUUCCUCCAGGUGGU | 2656 | 417-439 |
| | | | | C | | |
| AD-1735287 | CAAGGCCAAGCCAAGCCUCUA | 2522 | 767-787 | UAGAGGCUUGGCUUGGCCUUGG | 2657 | 765-787 |
| | | | | G | | |
| AD-1735288 | GAGGACCAGACAGACACGGAA | 2523 | 1017-1037 | UUCCGUGUCUGUCUGGUCCUCA | 2658 | 1015-1037 |
| | | | | U | | |
| AD-1735289 | GAUGCCCUGAAGGGCGUUACA | 2524 | 1284-1304 | UGUAACGCCCUUCAGGGCAUCU | 2659 | 1282-1304 |
| | | | | G | | |
| AD-1735290 | CCAACACUCGAGCUGGCCGAA | 2525 | 625-645 | UUCGGCCAGCUCGAGUGUUGGC | 2660 | 623-645 |
| | | | | A | | |
| AD-1735291 | CAGGGCUAUGCACCUGCAGGA | 2526 | 2624-2644 | UCCUGCAGGUGCAUAGCCCUGC | 2661 | 2622-2644 |
| | | | | A | | |
| AD-1735292 | AAGGUGGUGGAGUACCUCCUA | 2527 | 687-707 | UAGGAGGUACUCCACCACCUUC | 2662 | 685-707 |
| | | | | U | | |
| AD-1735293 | UUGAAGCUUGAGGAGCGAGGA | 2528 | 112-132 | UCCUCGCUCCUCAAGCUUCAAC | 2663 | 110-132 |
| | | | | U | | |
| AD-1735294 | CGUGGCCAUGUGGAUCCCAGA | 2529 | 869-889 | UCUGGGAUCCACAUGGCCACGG | 2664 | 867-889 |
| | | | | U | | |
| AD-1735295 | CAGCACUAAGGAAGCCCACCA | 2530 | 257-277 | UGGUGGGCUUCCUUAGUGCUGG | 2665 | 255-277 |
| | | | | U | | |
| AD-1735296 | GUCGCUGAUGGAGCCCGAGAA | 2531 | 1352-1372 | UUCUCGGGCUCCAUCAGCGACA | 2666 | 1350-1372 |
| | | | | G | | |
| AD-1735297 | UUCUUCCGGCCCAGCGUCAUA | 2532 | 1629-1649 | UAUGACGCUGGGCCGGAAGAAG | 2667 | 1627-1649 |
| | | | | C | | |
| AD-1735298 | CUGCUCCUGGACACCAGCAAA | 2533 | 733-753 | UUUGCUGGUGUCCAGGAGCAGG | 2668 | 731-753 |
| | | | | G | | |
| AD-1735299 | UUUCUGAGUACCCGCCGCUUA | 2534 | 2283-2303 | UAAGCGGCGGGUACUCAGAAAG | 2669 | 2281-2303 |
| | | | | U | | |
| AD-1735300 | CGCAGGCUGUCCACCCAGUUA | 2535 | 363-383 | UAACUGGGUGGACAGCCUGCGG | 2670 | 361-383 |
| | | | | A | | |
| AD-1735301 | GGCUGUGACAUGGGCACCUGA | 2536 | 1175-1195 | UCAGGUGCCCAUGUCACAGCCG | 2671 | 1173-1195 |
| | | | | A | | |
| AD-1735302 | UCAGUGAGGUAGCAGCCCUGA | 2537 | 1087-1107 | UCAGGGCUGCUACCUCACUGAA | 2672 | 1085-1107 |
| | | | | C | | |
| AD-1735303 | AGCGUCAUGGAGCCCAUCCUA | 2538 | 1641-1661 | UAGGAUGGGCUCCAUGACGCUG | 2673 | 1639-1661 |
| | | | | G | | |
| AD-1735304 | CUGGAUGGAGACCUCCCUGAA | 2539 | 159-179 | UUCAGGGAGGUCUCCAUCCAGC | 2674 | 157-179 |
| | | | | A | | |
| AD-1735305 | UCAGCCGGAGUGAGUGUUGGA | 2540 | 38-58 | UCCAACACUCACUCCGGCUGACC | 2675 | 36-58 |
| AD-1735306 | CUGGCCGACUGGCUUCUGGAA | 2541 | 637-657 | UUCCAGAAGCCAGUCGGCCAGC | 2676 | 635-657 |
| | | | | U | | |
| AD-1735307 | GGUGCUGCACCUCACACCAGA | 2542 | 1220-1240 | UCUGGUGUGAGGUGCAGCACCC | 2677 | 1218-1240 |
| | | | | U | | |
| AD-1735308 | GGCUGCCUGGAGCAUGGAGCA | 2543 | 335-355 | UGCUCCAUGCUCCAGGCAGCCA | 2678 | 333-355 |
| | | | | A | | |
| AD-1735309 | CCUGCAGCUGUGCUGGGCAUA | 2544 | 1191-1211 | UAUGCCCAGCACAGCUGCAGGU | 2679 | 1189-1211 |
| | | | | G | | |
| AD-1735310 | AGUGGCCAUGCAGGCGGUGUA | 2545 | 929-949 | UACACCGCCUGCAUGGCCACUG | 2680 | 927-949 |
| | | | | A | | |
| AD-1735311 | GACUUGGCCUUGGGCAGCAUA | 2546 | 663-683 | UAUGCUGCCCAAGGCCAAGUCG | 2681 | 661-683 |
| | | | | G | | |
| AD-1735312 | GAGCGAAGUGCGGGUACCCUA | 2547 | 959-979 | UAGGGUACCCGCACUUCGCUCC | 2682 | 957-979 |
| | | | | U | | |
| AD-1735313 | CUGGUGGCCUCUGUGUGCAAA | 2548 | 279-299 | UUUGCACACAGAGGCCACCAGG | 2683 | 277-299 |
| | | | | G | | |
| AD-1735314 | AACCCACCAGCCGAGGUCGAA | 2549 | 1392-1412 | UUCGACCUCGGCUGGUGGGUUG | 2684 | 1390-1412 |
| | | | | U | | |
| AD-1735315 | UGAUGCUGCCAAGGCGCACUA | 2550 | 1826-1846 | UAGUGCGCCUUGGCAGCAUCAU | 2685 | 1824-1846 |
| | | | | C | | |
| AD-1735316 | CCAAUGAGCUGGCCUGCCGAA | 2551 | 391-411 | UUCGGCAGGCCAGCUCAUUGGC | 2686 | 389-411 |
| | | | | A | | |
| AD-1735317 | GUGCUGCAGCGGGUCCUGCAA | 2552 | 189-209 | UUGCAGGACCCGCUGCAGCACA | 2687 | 187-209 |
| | | | | U | | |
| AD-1735318 | GGGCGUGCAGAGCGCCAGUAA | 2553 | 311-331 | UUACUGGCGCUCUGCACGCCCU | 2688 | 309-331 |
| | | | | U | | |
| AD-1735319 | GGUGAGUGGCACCUGCGAAUA | 2554 | 218-238 | UAUUCGCAGGUGCCACUCACCA | 2689 | 216-238 |
| | | | | C | | |
| AD-1735320 | ACGGAGGGAGAGGACACGGAA | 2555 | 1032-1052 | UUCCGUGUCCUCUCCCUCCGUG | 2690 | 1030-1052 |
| | | | | U | | |

TABLE 11
Modified Sense and Antisense Strand Sequences of PLIN1 dsRNA Agents Comprising a GalNAc Derivative Targeting Ligand

| | | SEQ | | SEQ | | |
|---|---|---|---|---|---|---|
| Duplex | | ID | | ID | | SEQ ID |
| Name | Sense Sequence 5′ to 3′ | NO: | Antisense Sequence 5′ to 3′ | NO: | mRNA Target Sequence 5′ to 3 | NO: |
| AD- | csasucucUfuUfAfAfccaaacuu | 3096 | VPusCfsaagUfuUfGfguuaAfaGfagau | 2826 | UUCAUCUCUUUAACCAAACU | 2961 |
| 1735186 | sgsa | | gsasa | | UGU | |
| AD- | csuscuaaCfaAfAfUfaaacagaas | 3097 | VPusGfsuucUfgUfUfuauuUfgUfuaga | 2827 | UUCUCUAACAAAUAAACAGA | 2962 |
| 1735187 | csa | | gsasa | | ACC | |
| AD- | usgscauaGfuCfAfCfucuuuuga | 3098 | VPusAfsucaAfaAfGfagugAfcUfaugc | 2828 | CCUGCAUAGUCACUCUUUUG | 2963 |
| 1735188 | susa | | asgsg | | AUG | |
| AD- | asascuugAfuUfUfUfucaucucu | 3099 | VPusAfsagaGfaUfGfaaaaAfuCfaagu | 2829 | CUAACUUGAUUUUUCAUCUC | 2964 |
| 1735189 | susa | | usasg | | UUU | |
| AD- | gsascacaUfuCfUfUfagcacuga | 3100 | VPusUfsucaGfuGfCfuaagAfaUfgugu | 2830 | UUGACACAUUCUUAGCACUG | 2965 |
| 1735190 | sasa | | csasa | | AAC | |
| AD- | ascsgccuUfaUfUfUfgauuuaac | 3101 | VPusAfsguuAfaAfUfcaaaUfaAfggcg | 2831 | AUACGCCUUAUUUGAUUUAA | 2966 |
| 1735191 | susa | | usasu | | CUA | |
| AD- | usasgucuUfcGfAfAfauguuaau | 3102 | VPusUfsauuAfaCfAfuuucGfaAfgacu | 2832 | CCUAGUCUUCGAAAUGUUAA | 2967 |
| 1735192 | sasa | | asgsg | | UAU | |
| AD- | gsasuggaCfuUfUfUfaaguuguu | 3103 | VPusAfsaacAfaCfUfuaaaAfgUfccau | 2833 | AUGAUGGACUUUUAAGUUGU | 2968 |
| 1735193 | susa | | csasu | | UUC | |
| AD- | usgscuuuUfuUfCfAfcuuaauaa | 3104 | VPusAfsuuaUfuAfAfgugaAfaAfaagc | 2834 | CCUGCUUUUUUCACUUAAUA | 2969 |
| 1735194 | susa | | asgsg | | AUA | |
| AD- | ascsauaaUfaAfCfUfacugcauas | 3105 | VPusUfsuauGfcAfGfuaguUfaUfuaug | 2835 | CCACAUAAUAACUACUGCAU | 2970 |
| 1735195 | asa | | usgsg | | AAU | |
| AD- | usascuagUfgUfCfAfcuuucuga | 3106 | VPusCfsucaGfaAfAfgugaCfaCfuagu | 2836 | AAUACUAGUGUCACUUUCUG | 2971 |
| 1735196 | sgsa | | asusu | | AGU | |
| AD- | csasaucaGfaUfGfCfaaaagcucs | 3107 | VPusAfsgagCfuUfUfugcaUfcUfgauu | 2837 | AACAAUCAGAUGCAAAAGCU | 2972 |
| 1735197 | usa | | gsusu | | CUU | |
| AD- | usasagagUfaAfUfUfgccuaacu | 3108 | VPusAfsaguUfaGfGfcaauUfaCfucuu | 2838 | UAUAAGAGUAAUUGCCUAAC | 2973 |
| 1735198 | susa | | asusa | | UUG | |
| AD- | gsgscuugUfuUfAfUfgaacauua | 3109 | VPusUfsuaaUfgUfUfcauaAfaCfaagc | 2839 | AUGGCUUGUUUAUGAACAUU | 2974 |
| 1735199 | sasa | | csasu | | AAA | |
| AD- | ususuuugCfuAfCfUfgcaaacga | 3110 | VPusAfsucgUfuUfGfcaguAfgCfaaaa | 2840 | CUUUUUUGCUACUGCAAACG | 2975 |
| 1735200 | susa | | asasg | | AUG | |
| AD- | asascgauGfcUfAfUfaauaaaug | 3111 | VPusAfscauUfuAfUfuauaGfcAfucgu | 2841 | CAAACGAUGCUAUAAUAAAU | 2976 |
| 1735201 | susa | | ususg | | GUC | |
| AD- | usgsguugUfuAfCfUfauaagagu | 3112 | VPusUfsacuCfuUfAfuaguAfaCfaacc | 2842 | CUUGGUUGUUACUAUAAGAG | 2977 |
| 1735202 | sasa | | asasg | | UAA | |
| AD- | csusgaugAfaCfAfUfccucugau | 3113 | VPusCfsaucAfgAfGfgaugUfuCfauca | 2843 | CUCUGAUGAACAUCCUCUGA | 2978 |
| 1735203 | sgsa | | gsasg | | UGA | |
| AD- | csusgcggAfuAfAfAfuauuugcc | 3114 | VPusUfsggcAfaAfUfauuuAfuCfcgca | 2844 | CUCUGCGGAUAAAUAUUUGC | 2979 |
| 1735204 | sasa | | gsasg | | CAC | |
| AD- | cscsaaaaUfuCfAfGfauucugcc | 3115 | VPusAfsggcAfgAfAfucugAfaUfuuu | 2845 | UUCCAAAAUUCAGAUUCUGC | 2980 |
| 1735205 | susa | | ggsasa | | CUC | |
| AD- | asasggauGfuGfUfGfucuuucuc | 3116 | VPusGfsgagAfaAfGfacacAfcAfuccu | 2846 | AAAAGGAUGUGUGUCUUUCU | 2981 |
| 1735206 | scsa | | ususu | | CCC | |
| AD- | usgscgaaUfgCfUfUfccagaaga | 3117 | VPusGfsucuUfcUfGfgaagCfaUfucgc | 2847 | CCUGCGAAUGCUUCCAGAAG | 2982 |
| 1735207 | scsa | | asgsg | | ACC | |
| AD- | csgsaaugAfgUfAfAfcuccuguc | 3118 | VPusUfsgacAfgGfAfguuaCfuCfauuc | 2848 | CACGAAUGAGUAACUCCUGU | 2983 |
| 1735208 | sasa | | gsusg | | CAC | |
| AD- | usgsggugUfuUfAfUfuuaaaaua | 3119 | VPusGfsuauUfuUfAfaauaAfaCfaccc | 2849 | CUUGGGUGUUUAUUUAAAAU | 2984 |
| 1735209 | scsa | | asasg | | ACU | |
| AD- | csasaaagAfuAfUfUfugaccguu | 3120 | VPusAfsaacGfgUfCfaaauAfuCfuuuu | 2850 | GCCAAAAGAUAUUUGACCGU | 2985 |
| 1735210 | susa | | gsgsc | | UUC | |
| AD- | asusacagCfuUfGfGfagagauuu | 3121 | VPusAfsaaaUfcUfCfuccaAfgCfugua | 2851 | UAAUACAGCUUGGAGAGAUU | 2986 |
| 1735211 | susa | | ususa | | UUU | |
| AD- | asasaugcAfuUfCfAfuacaauua | 3122 | VPusGfsuaaUfuGfUfaugaAfuGfcauu | 2852 | GAAAAUGCAUUCAUACAAUU | 2987 |
| 1735212 | scsa | | ususc | | ACA | |
| AD- | uscsccacUfcGfCfUfcuuuuuga | 3123 | VPusAfsucaAfaAfAfgagcGfaGfuggg | 2853 | AAUCCCACUCGCUCUUUUUG | 2988 |
| 1735213 | susa | | asusu | | AUG | |
| AD- | gscsuuguGfuUfUfAfcacaagcu | 3124 | VPusCfsagcUfuGfUfguaaAfcAfcaag | 2854 | CCGCUUGUGUUUACACAAGC | 2989 |
| 1735214 | sgsa | | csgsg | | UGU | |
| AD- | cscsugccUfuAfCfAfuggcuugu | 3125 | VPusAfsacaAfgCfCfauguAfaGfgcag | 2855 | CACCUGCCUUACAUGGCUUG | 2990 |
| 1735215 | susa | | gsusg | | UUU | |
| AD- | gsasgauuUfuUfGfUfaucacauu | 3126 | VPusUfsaauGfuGfAfuacaAfaAfaucu | 2856 | GAGAGAUUUUUGUAUCACAU | 2991 |
| 1735216 | sasa | | csusc | | UAU | |
| AD- | asgscacuUfcAfGfAfcaaggucc | 3127 | VPusAfsggaCfcUfUfgucuGfaAfgugc | 2857 | CGAGCACUUCAGACAAGGUC | 2992 |
| 1735217 | susa | | uscsg | | CUG | |
| AD- | uscsacucUfcAfGfAfgccaguuu | 3128 | VPusAfsaaaCfuGfGfcucuGfaGfagug | 2858 | CUUCACUCUCAGAGCCAGUU | 2993 |
| 1735218 | susa | | asasg | | UUU | |
| AD- | ascsugaaCfuCfCfUfcugugauc | 3129 | VPusAfsgauCfaCfAfgaggAfgUfucag | 2859 | GCACUGAACUCCUCUGUGAU | 2994 |
| 1735219 | susa | | usgsc | | CUA | |
| AD- | usasguucCfcUfAfAfugauggac | 3130 | VPusAfsgucCfaUfCfauuaGfgGfaacu | 2860 | ACUAGUUCCCUAAUGAUGGA | 2995 |
| 1735220 | susa | | asgsu | | CUU | |
| AD- | gsgscguuAfcUfGfAfcaacgugg | 3131 | VPusAfsccaCfgUfUfgucaGfuAfacgc | 2861 | AGGGCGUUACUGACAACGUG | 2996 |
| 1735221 | susa | | cscsu | | GUG | |
| AD- | usgsaucuAfgGfAfUfgaucugu | 3132 | VPusGfsaacAfgAfUfcaucCfuAfgauc | 2862 | UGUGAUCUAGGAUGAUCUGU | 2997 |
| 1735222 | uscsa | | ascsa | | UCC | |
| AD- | gsusgaugAfuAfUfAfuagacuu | 3133 | VPusUfsaaaGfuCfUfauauAfuCfauca | 2863 | UGGUGAUGAUAUAUAGACUU | 2998 |
| 1735223 | usasa | | cscsa | | UAU | |
| AD- | gsgscuacUfuUfGfAfagggaaca | 3134 | VPusUfsuguUfcCfCfuucaAfaGfuagc | 2864 | CAGGCUACUUUGAAGGGAAC | 2999 |
| 1735224 | sasa | | csusg | | AAU | |
| AD- | csusgcucUfgAfUfUfcuauggcu | 3135 | VPusAfsagcCfaUfAfgaauCfaGfagca | 2865 | GCCUGCUCUGAUUCUAUGGC | 3000 |
| 1735225 | susa | | gsgsc | | UUG | |
| AD- | asgsauugCfuUfCfUfgagcugaa | 3136 | VPusCfsuucAfgCfUfcagaAfgCfaauc | 2866 | AAAGAUUGCUUCUGAGCUGA | 3001 |
| 1735226 | sgsa | | ususu | | AGG | |
| AD- | gscscaucUfcUfUfGfuguaugca | 3137 | VPusCfsugcAfuAfCfacaaGfaGfaugg | 2867 | GUGCCAUCUCUUGUGUAUGC | 3002 |
| 1735227 | sgsa | | csasc | | AGG | |
| AD- | asgsccacAfuUfUfCfcauuugca | 3138 | VPusAfsugcAfaAfUfggaaAfuGfuggc | 2868 | ACAGCCACAUUUCCAUUUGC | 3003 |
| 1735228 | susa | | usgsu | | AUC | |
| AD- | uscscagaCfaGfAfAfgguuuuga | 3139 | VPusGfsucaAfaAfCfcuucUfgUfcugg | 2869 | GGUCCAGACAGAAGGUUUUG | 3004 |
| 1735229 | scsa | | ascsc | | ACA | |
| AD- | csuscucgAfuAfCfAfccgugcag | 3140 | VPusUfscugCfaCfGfguguAfuCfgaga | 2870 | CUCUCUCGAUACACCGUGCA | 3005 |
| 1735230 | sasa | | gsasg | | GAC | |
| AD- | gsgscgcaCfuUfUfUfuauuuuua | 3141 | VPusAfsuaaAfaAfUfaaaaAfgUfgcgc | 2871 | AAGGCGCACUUUUUAUUUUU | 3006 |
| 1735231 | susa | | csusu | | AUU | |
| AD- | gsasgcguUfgCfCfAfcuuucaaa | 3142 | VPusCfsuuuGfaAfAfguggCfaAfcgcu | 2872 | GCGAGCGUUGCCACUUUCAA | 3007 |
| 1735232 | sgsa | | csgsc | | AGU | |
| AD- | ususgcauCfaUfUfAfcugccuuc | 3143 | VPusUfsgaaGfgCfAfguaaUfgAfugca | 2873 | AUUUGCAUCAUUACUGCCUU | 3008 |
| 1735233 | sasa | | asasu | | CAC | |
| AD- | gscsgcaaGfaAfGfAfgcugaguc | 3144 | VPusCfsgacUfcAfGfcucuUfcUfugcg | 2874 | CUGCGCAAGAAGAGCUGAGU | 3009 |
| 1735234 | sgsa | | csasg | | CGC | |
| AD- | usgscggaAfuUfUfGfcugccaac | 3145 | VPusUfsguuGfgCfAfgcaaAfuUfccgc | 2875 | ACUGCGGAAUUUGCUGCCAA | 3010 |
| 1735235 | sasa | | asgsu | | CAC | |
| AD- | gsusgugcAfaUfGfCfcuaugaga | 3146 | VPusUfsucuCfaUfAfggcaUfuGfcaca | 2876 | CUGUGUGCAAUGCCUAUGAG | 3011 |
| 1735236 | sasa | | csasg | | AAG | |
| AD- | gsasauucAfaAfUfAfuugcaaaa | 3147 | VPusCfsuuuUfgCfAfauauUfuGfaauu | 2877 | CAGAAUUCAAAUAUUGCAAA | 3012 |
| 1735237 | sgsa | | csusg | | AGG | |
| AD- | cscsugugUfgCfUfUfuguagagc | 3148 | VPusGfsgcuCfuAfCfaaagCfaCfacag | 2878 | GGCCUGUGUGCUUUGUAGAG | 3013 |
| 1735238 | scsa | | gscsc | | CCA | |
| AD- | uscscagaCfaAfGfGfaagaguca | 3149 | VPusCfsugaCfuCfUfuccuUfgUfcugg | 2879 | CCUCCAGACAAGGAAGAGUC | 3014 |
| 1735239 | sgsa | | asgsg | | AGC | |
| AD- | usgsccagAfaAfCfAfgcaucagc | 3150 | VPusCfsgcuGfaUfGfcuguUfuCfuggc | 2880 | AGUGCCAGAAACAGCAUCAG | 3015 |
| 1735240 | sgsa | | ascsu | | CGU | |
| AD- | gscsauaaUfaUfGfGfauacgccu | 3151 | VPusAfsaggCfgUfAfuccaUfaUfuaug | 2881 | CUGCAUAAUAUGGAUACGCC | 3016 |
| 1735241 | susa | | csasg | | UUA | |
| AD- | asgsccucAfuCfCfUfgaugaugc | 3152 | VPusAfsgcaUfcAfUfcaggAfuGfaggc | 2882 | UCAGCCUCAUCCUGAUGAUG | 3017 |
| 1735242 | susa | | usgsa | | CUG | |
| AD- | asasgccuCfuUfGfAfgcaggguu | 3153 | VPusCfsaacCfcUfGfcucaAfgAfggcu | 2883 | CCAAGCCUCUUGAGCAGGGU | 3018 |
| 1735243 | sgsa | | usgsg | | UGG | |
| AD- | usasaaggGfaAfGfAfaguugaag | 3154 | VPusGfscuuCfaAfCfuucuUfcCfcuuu | 2884 | AUUAAAGGGAAGAAGUUGAA | 3019 |
| 1735244 | scsa | | asasu | | GCU | |
| AD- | gsgscagcAfuUfGfAfgaaggugg | 3155 | VPusAfsccaCfcUfUfcucaAfuGfcugc | 2885 | UGGGCAGCAUUGAGAAGGUG | 3020 |
| 1735245 | susa | | cscsa | | GUG | |
| AD- | gsuscagcGfaCfAfGfcuucuucc | 3156 | VPusCfsggaAfgAfAfgcugUfcGfcuga | 2886 | GGGUCAGCGACAGCUUCUUC | 3021 |
| 1735246 | sgsa | | cscsc | | CGG | |
| AD- | csusgcugUfcUfCfCfucaaccaas | 3157 | VPusCfsuugGfuUfGfaggaGfaCfagca | 2887 | CCCUGCUGUCUCCUCAACCAA | 3022 |
| 1735247 | gsa | | gsgsg | | GG | |
| AD- | asgsgaggAfaGfAfAfuuggagac | 3158 | VPusAfsgucUfcCfAfauucUfuCfcucc | 2888 | GGAGGAGGAAGAAUUGGAGA | 3023 |
| 1735248 | susa | | uscsc | | CUG | |
| AD- | cscsugucAfcCfAfCfucugaagg | 3159 | VPusAfsccuUfcAfGfagugGfuGfacag | 2889 | CUCCUGUCACCACUCUGAAG | 3024 |
| 1735249 | susa | | gsasg | | GUC | |
| AD- | asgsacuuUfaUfGfUfauagccac | 3160 | VPusUfsgugGfcUfAfuacaUfaAfaguc | 2890 | AUAGACUUUAUGUAUAGCCA | 3025 |
| 1735250 | sasa | | usasu | | CAG | |
| AD- | gsusuacgCfaUfGfCfcugcuuuu | 3161 | VPusAfsaaaAfgCfAfggcaUfgCfguaa | 2891 | GUGUUACGCAUGCCUGCUUU | 3026 |
| 1735251 | susa | | csasc | | UUU | |
| AD- | cscsaguuCfaCfAfGfcugccaau | 3162 | VPusCfsauuGfgCfAfgcugUfgAfacug | 2892 | ACCCAGUUCACAGCUGCCAA | 3027 |
| 1735252 | sgsa | | gsgsu | | UGA | |
| AD- | csasggcaCfgUfGfUfguaugcac | 3163 | VPusAfsgugCfaUfAfcacaCfgUfgccu | 2893 | UGCAGGCACGUGUGUAUGCA | 3028 |
| 1735253 | susa | | gscsa | | CUC | |
| AD- | asusggcaGfuCfAfAfcaaaggcc | 3164 | VPusAfsggcCfuUfUfguugAfcUfgcca | 2894 | GGAUGGCAGUCAACAAAGGC | 3029 |
| 1735254 | susa | | uscsc | | CUC | |
| AD- | csasaacuUfgUfGfGfccaaaagas | 3165 | VPusAfsucuUfuUfGfgccaCfaAfguuu | 2895 | ACCAAACUUGUGGCCAAAAG | 3030 |
| 1735255 | usa | | gsgsu | | AUA | |
| AD- | uscsugacCfaAfCfAfcccucucu | 3166 | VPusGfsagaGfaGfGfguguUfgGfucag | 2896 | GCUCUGACCAACACCCUCUCU | 3031 |
| 1735256 | scsa | | asgsc | | CG | |
| AD- | uscsacauUfaUfAfAfaucccacu | 3167 | VPusGfsaguGfgGfAfuuuaUfaAfugu | 2897 | UAUCACAUUAUAAAUCCCAC | 3032 |
| 1735257 | scsa | | gasusa | | UCG | |
| AD- | gsasggagAfaCfAfAfguucagug | 3168 | VPusUfscacUfgAfAfcuugUfuCfuccu | 2898 | CUGAGGAGAACAAGUUCAGU | 3033 |
| 1735258 | sasa | | csasg | | GAG | |
| AD- | gsasgcagGfaGfAfAfugugcugc | 3169 | VPusUfsgcaGfcAfCfauucUfcCfugcu | 2899 | CUGAGCAGGAGAAUGUGCUG | 3034 |
| 1735259 | sasa | | csasg | | CAG | |
| AD- | gsasagacCfuAfCfAfccagcacus | 3170 | VPusUfsaguGfcUfGfguguAfgGfucu | 2900 | CAGAAGACCUACACCAGCAC | 3035 |
| 1735260 | asa | | ucsusg | | UAA | |
| AD- | asgsgccuCfaCfCfUfugcuggau | 3171 | VPusCfsaucCfaGfCfaaggUfgAfggcc | 2901 | AAAGGCCUCACCUUGCUGGA | 3036 |
| 1735261 | sgsa | | ususu | | UGG | |
| AD- | asgsccagCfuGfCfUfugcucaca | 3172 | VPusCfsuguGfaGfCfaagcAfgCfuggc | 2902 | AGAGCCAGCUGCUUGCUCAC | 3037 |
| 1735262 | sgsa | | uscsu | | AGC | |
| AD- | gsgsgcucUfgUfGfAfgacugagg | 3173 | VPusAfsccuCfaGfUfcucaCfaGfagccc | 2903 | CUGGGCUCUGUGAGACUGAG | 3038 |
| 1735263 | susa | | sasg | | GUG | |
| AD- | csgsagagCfgAfAfUfuccgggac | 3174 | VPusUfsgucCfcGfGfaauuCfgCfucuc | 2904 | CCCGAGAGCGAAUUCCGGGA | 3039 |
| 1735264 | sasa | | gsgsg | | CAU | |
| AD- | gsusggcaCfaUfAfCfccugcaga | 3175 | VPusUfsucuGfcAfGfgguaUfgUfgcca | 2905 | GUGUGGCACAUACCCUGCAG | 3040 |
| 1735265 | sasa | | csasc | | AAG | |
| AD- | gsusggacAfcAfGfUfggugcauu | 3176 | VPusUfsaauGfcAfCfcacuGfuGfucca | 2906 | UGGUGGACACAGUGGUGCAU | 3041 |
| 1735266 | sasa | | cscsa | | UAC | |
| AD- | asasgcccAfgAfAfGfucucccaa | 3177 | VPusCfsuugGfgAfGfacuuCfuGfggcu | 2907 | GCAAGCCCAGAAGUCUCCCA | 3042 |
| 1735267 | sgsa | | usgsc | | AGG | |
| AD- | gsgsccauGfuCfCfCfuaucagau | 3178 | VPusCfsaucUfgAfUfagggAfcAfuggc | 2908 | AGGGCCAUGUCCCUAUCAGA | 3043 |
| 1735268 | sgsa | | cscsu | | UGC | |
| AD- | gscscggcGfgGfUfUfucucuaac | 3179 | VPusUfsguuAfgAfGfaaacCfcGfccgg | 2909 | GGGCCGGCGGGUUUCUCUAA | 3044 |
| 1735269 | sasa | | cscsc | | CAA | |
| AD- | csusgaagGfaCfAfCfcaucuccas | 3180 | VPusGfsuggAfgAfUfggugUfcCfuuca | 2910 | AGCUGAAGGACACCAUCUCC | 3045 |
| 1735270 | csa | | gscsu | | ACC | |
| AD- | gsasccacCfaUfCfUfcggcugug | 3181 | VPusUfscacAfgCfCfgagaUfgGfuggu | 2911 | CAGACCACCAUCUCGGCUGU | 3046 |
| 1735271 | sasa | | csusg | | GAC | |
| AD- | cscsaguuUfuUfAfAfgggacacc | 3182 | VPusUfsgguGfuCfCfcuuaAfaAfacug | 2912 | AGCCAGUUUUUAAGGGACAC | 3047 |
| 1735272 | sasa | | gscsu | | CAG | |
| AD- | gsgsccagAfgAfCfAfcugcggaa | 3183 | VPusAfsuucCfgCfAfguguCfuCfuggc | 2913 | GUGGCCAGAGACACUGCGGA | 3048 |
| 1735273 | susa | | csasc | | AUU | |
| AD- | csgsuuccCfaUfCfGfcgagcacu | 3184 | VPusAfsaguGfcUfCfgcgaUfgGfgaac | 2914 | AGCGUUCCCAUCGCGAGCAC | 3049 |
| 1735274 | susa | | gscsu | | UUC | |
| AD- | cscsgggaCfaUfCfGfacaacccas | 3185 | VPusGfsuggGfuUfGfucgaUfgUfcccg | 2915 | UUCCGGGACAUCGACAACCC | 3050 |
| 1735275 | csa | | gsasa | | ACC | |
| AD- | uscsugauGfaUfCfUfaggcuccc | 3186 | VPusUfsgggAfgCfCfuagaUfcAfucag | 2916 | CCUCUGAUGAUCUAGGCUCC | 3051 |
| 1735276 | sasa | | asgsg | | CAG | |
| AD- | csusgcagAfaGfAfCfccuccaga | 3187 | VPusGfsucuGfgAfGfggucUfuCfugca | 2917 | CCCUGCAGAAGACCCUCCAGA | 3052 |
| 1735277 | scsa | | gsgsg | | CC | |
| AD- | csgsccagUfaGfCfUfuggcugcc | 3188 | VPusAfsggcAfgCfCfaagcUfaCfuggc | 2918 | AGCGCCAGUAGCUUGGCUGC | 3053 |
| 1735278 | susa | | gscsu | | CUG | |
| AD- | csgscuucAfcAfGfGfcugagucc | 3189 | VPusUfsggaCfuCfAfgccuGfuGfaagc | 2919 | GCCGCUUCACAGGCUGAGUC | 3054 |
| 1735279 | sasa | | gsgsc | | CAG | |
| AD- | ususuuuuUfaGfCfAfuccuuuu | 3190 | VPusCfscaaAfaGfGfaugcUfaAfaaaaa | 2920 | UUUUUUUUUAGCAUCCUUUU | 3055 |
| 1735280 | gsgsa | | sasa | | GGG | |
| AD- | gsasagccAfaAfGfCfgcaggguc | 3191 | VPusUfsgacCfcUfGfcgcuUfuGfgcuu | 2921 | GAGAAGCCAAAGCGCAGGGU | 3056 |
| 1735281 | sasa | | csusc | | CAG | |
| AD- | gsasggagGfaUfCfAfugaggacc | 3192 | VPusUfsgguCfcUfCfaugaUfcCfuccu | 2922 | AGGAGGAGGAUCAUGAGGAC | 3057 |
| 1735282 | sasa | | cscsu | | CAG | |
| AD- | gscsacgcAfuUfAfCfagccagcu | 3193 | VPusCfsagcUfgGfCfuguaAfuGfcgug | 2923 | CCGCACGCAUUACAGCCAGCU | 3058 |
| 1735283 | sgsa | | csgsg | | GC | |
| AD- | csusucauUfgAfAfAfaccaccac | 3194 | VPusCfsgugGfuGfGfuuuuCfaAfugaa | 2924 | CCCUUCAUUGAAAACCACCAC | 3059 |
| 1735284 | sgsa | | gsgsg | | GG | |
| AD- | ususuuugAfuGfGfCfcacauaau | 3195 | VPusUfsauuAfuGfUfggccAfuCfaaaa | 2925 | UCUUUUUGAUGGCCACAUAA | 3060 |
| 1735285 | sasa | | asgsa | | UAA | |
| AD- | cscsaccuGfgAfGfGfaaaagauc | 3196 | VPusGfsgauCfuUfUfuccuCfcAfggug | 2926 | GACCACCUGGAGGAAAAGAU | 3061 |
| 1735286 | scsa | | gsusc | | CCC | |
| AD- | csasaggcCfaAfGfCfcaagccucs | 3197 | VPusAfsgagGfcUfUfggcuUfgGfccuu | 2927 | CCCAAGGCCAAGCCAAGCCUC | 3062 |
| 1735287 | usa | | gsgsg | | UU | |
| AD- | gsasggacCfaGfAfCfagacacgg | 3198 | VPusUfsccgUfgUfCfugucUfgGfuccu | 2928 | AUGAGGACCAGACAGACACG | 3063 |
| 1735288 | sasa | | csasu | | GAG | |
| AD- | gsasugccCfuGfAfAfgggcguua | 3199 | VPusGfsuaaCfgCfCfcuucAfgGfgcau | 2929 | CAGAUGCCCUGAAGGGCGUU | 3064 |
| 1735289 | scsa | | csusg | | ACU | |
| AD- | cscsaacaCfuCfGfAfgcuggccg | 3200 | VPusUfscggCfcAfGfcucgAfgUfguug | 2930 | UGCCAACACUCGAGCUGGCC | 3065 |
| 1735290 | sasa | | gscsa | | GAC | |
| AD- | csasgggcUfaUfGfCfaccugcag | 3201 | VPusCfscugCfaGfGfugcaUfaGfcccu | 2931 | UGCAGGGCUAUGCACCUGCA | 3066 |
| 1735291 | sgsa | | gscsa | | GGC | |
| AD- | asasggugGfuGfGfAfguaccucc | 3202 | VPusAfsggaGfgUfAfcuccAfcCfaccu | 2932 | AGAAGGUGGUGGAGUACCUC | 3067 |
| 1735292 | susa | | uscsu | | CUC | |
| AD- | ususgaagCfuUfGfAfggagcgag | 3203 | VPusCfscucGfcUfCfcucaAfgCfuuca | 2933 | AGUUGAAGCUUGAGGAGCGA | 3068 |
| 1735293 | sgsa | | ascsu | | GGA | |
| AD- | csgsuggcCfaUfGfUfggauccca | 3204 | VPusCfsuggGfaUfCfcacaUfgGfccac | 2934 | ACCGUGGCCAUGUGGAUCCC | 3069 |
| 1735294 | sgsa | | gsgsu | | AGG | |
| AD- | csasgcacUfaAfGfGfaagcccacs | 3205 | VPusGfsgugGfgCfUfuccuUfaGfugcu | 2935 | ACCAGCACUAAGGAAGCCCA | 3070 |
| 1735295 | csa | | gsgsu | | CCC | |
| AD- | gsuscgcuGfaUfGfGfagcccgag | 3206 | VPusUfscucGfgGfCfuccaUfcAfgcga | 2936 | CUGUCGCUGAUGGAGCCCGA | 3071 |
| 1735296 | sasa | | csasg | | GAG | |
| AD- | ususcuucCfgGfCfCfcagcguca | 3207 | VPusAfsugaCfgCfUfgggcCfgGfaaga | 2937 | GCUUCUUCCGGCCCAGCGUCA | 3072 |
| 1735297 | susa | | asgsc | | UG | |
| AD- | csusgcucCfuGfGfAfcaccagca | 3208 | VPusUfsugcUfgGfUfguccAfgGfagca | 2938 | CCCUGCUCCUGGACACCAGCA | 3073 |
| 1735298 | sasa | | gsgsg | | AG | |
| AD- | ususucugAfgUfAfCfccgccgcu | 3209 | VPusAfsagcGfgCfGfgguaCfuCfagaa | 2939 | ACUUUCUGAGUACCCGCCGC | 3074 |
| 1735299 | susa | | asgsu | | UUC | |
| AD- | csgscaggCfuGfUfCfcacccagu | 3210 | VPusAfsacuGfgGfUfggacAfgCfcugc | 2940 | UCCGCAGGCUGUCCACCCAGU | 3075 |
| 1735300 | susa | | gsgsa | | UC | |
| AD- | gsgscuguGfaCfAfUfgggcaccu | 3211 | VPusCfsaggUfgCfCfcaugUfcAfcagc | 2941 | UCGGCUGUGACAUGGGCACC | 3076 |
| 1735301 | sgsa | | csgsa | | UGC | |
| AD- | uscsagugAfgGfUfAfgcagcccu | 3212 | VPusCfsaggGfcUfGfcuacCfuCfacug | 2942 | GUUCAGUGAGGUAGCAGCCC | 3077 |
| 1735302 | sgsa | | asasc | | UGC | |
| AD- | asgscgucAfuGfGfAfgcccaucc | 3213 | VPusAfsggaUfgGfGfcuccAfuGfacgc | 2943 | CCAGCGUCAUGGAGCCCAUCC | 3078 |
| 1735303 | susa | | usgsg | | UG | |
| AD- | csusggauGfgAfGfAfccucccug | 3214 | VPusUfscagGfgAfGfgucuCfcAfucca | 2944 | UGCUGGAUGGAGACCUCCCU | 3079 |
| 1735304 | sasa | | gscsa | | GAG | |
| AD- | uscsagccGfgAfGfUfgaguguug | 3215 | VPusCfscaaCfaCfUfcacuCfcGfgcuga | 2945 | GGUCAGCCGGAGUGAGUGUU | 3080 |
| 1735305 | sgsa | | scsc | | GGG | |
| AD- | csusggccGfaCfUfGfgcuucugg | 3216 | VPusUfsccaGfaAfGfccagUfcGfgcca | 2946 | AGCUGGCCGACUGGCUUCUG | 3081 |
| 1735306 | sasa | | gscsu | | GAG | |
| AD- | gsgsugcuGfcAfCfCfucacacca | 3217 | VPusCfsuggUfgUfGfagguGfcAfgcac | 2947 | AGGGUGCUGCACCUCACACC | 3082 |
| 1735307 | sgsa | | cscsu | | AGC | |
| AD- | gsgscugcCfuGfGfAfgcauggag | 3218 | VPusGfscucCfaUfGfcuccAfgGfcagc | 2948 | UUGGCUGCCUGGAGCAUGGA | 3083 |
| 1735308 | scsa | | csasa | | GCC | |
| AD- | cscsugcaGfcUfGfUfgcugggca | 3219 | VPusAfsugcCfcAfGfcacaGfcUfgcag | 2949 | CACCUGCAGCUGUGCUGGGC | 3084 |
| 1735309 | susa | | gsusg | | AUG | |
| AD- | asgsuggcCfaUfGfCfaggcggug | 3220 | VPusAfscacCfgCfCfugcaUfgGfccac | 2950 | UCAGUGGCCAUGCAGGCGGU | 3085 |
| 1735310 | susa | | usgsa | | GUC | |
| AD- | gsascuugGfcCfUfUfgggcagca | 3221 | VPusAfsugcUfgCfCfcaagGfcCfaagu | 2951 | CCGACUUGGCCUUGGGCAGC | 3086 |
| 1735311 | susa | | csgsg | | AUU | |
| AD- | gsasgcgaAfgUfGfCfggguaccc | 3222 | VPusAfsgggUfaCfCfcgcaCfuUfcgcu | 2952 | AGGAGCGAAGUGCGGGUACC | 3087 |
| 1735312 | susa | | cscsu | | CUG | |
| AD- | csusggugGfcCfUfCfugugugca | 3223 | VPusUfsugcAfcAfCfagagGfcCfacca | 2953 | CCCUGGUGGCCUCUGUGUGC | 3088 |
| 1735313 | sasa | | gsgsg | | AAU | |
| AD- | asascccaCfcAfGfCfcgaggucgs | 3224 | VPusUfscgaCfcUfCfggcuGfgUfgggu | 2954 | ACAACCCACCAGCCGAGGUCG | 3089 |
| 1735314 | asa | | usgsu | | AG | |
| AD- | usgsaugcUfgCfCfAfaggcgcac | 3225 | VPusAfsgugCfgCfCfuuggCfaGfcauc | 2955 | GAUGAUGCUGCCAAGGCGCA | 3090 |
| 1735315 | susa | | asusc | | CUU | |
| AD- | cscsaaugAfgCfUfGfgccugccg | 3226 | VPusUfscggCfaGfGfccagCfuCfauug | 2956 | UGCCAAUGAGCUGGCCUGCC | 3091 |
| 1735316 | sasa | | gscsa | | GAG | |
| AD- | gsusgcugCfaGfCfGfgguccugc | 3227 | VPusUfsgcaGfgAfCfccgcUfgCfagca | 2957 | AUGUGCUGCAGCGGGUCCUG | 3092 |
| 1735317 | sasa | | csasu | | CAG | |
| AD- | gsgsgcguGfcAfGfAfgcgccagu | 3228 | VPusUfsacuGfgCfGfcucuGfcAfcgcc | 2958 | AAGGGCGUGCAGAGCGCCAG | 3093 |
| 1735318 | sasa | | csusu | | UAG | |
| AD- | gsgsugagUfgGfCfAfccugcgaa | 3229 | VPusAfsuucGfcAfGfgugcCfaCfucac | 2959 | GUGGUGAGUGGCACCUGCGA | 3094 |
| 1735319 | susa | | csasc | | AUG | |
| AD- | ascsggagGfgAfGfAfggacacgg | 3230 | VPusUfsccgUfgUfCfcucuCfcCfuccg | 2960 | ACACGGAGGGAGAGGACACG | 3095 |
| 1735320 | sasa | | usgsu | | GAG | |

TABLE 12
Unmodified Sense and Antisense Strand Sequences of PDE3B dsRNA Agents Comprising an Unsaturated
C22 Hydrocarbon Chain Conjugated to Position 6 on the Sense Strand, Counting from the 5′-end of
the Sense Strand

| | | SEQ | Range in | | SEQ | Range in |
|---|---|---|---|---|---|---|
| Duplex | Sense Sequence | ID | NM_ | Antisense Sequence | ID | NM_ |
| Name | 5′ to 3′ | NO: | 000922.4 | 5′ to 3′ | NO: | 000922.4 |
| AD-1735321 | UUCCUUCUUCAUCUUGAUCAA | 3231 | 2880-2900 | UUGAUCAAGAUGAAGAAGGAAG | 3500 | 2878-2900 |
| | | | | U | | |
| AD-1735322 | CACUCUAAAACUGAUGUUCA | 3232 | 4621-4641 | UUGAACAUCAGUUUUAGAGUGA | 3501 | 4619-4641 |
| | A | | | A | | |
| AD-1735323 | UCUUCUGUAUCACUGACUCAA | 3233 | 1752-1772 | UUGAGUCAGUGAUACAGAAGAU | 3502 | 1750-1772 |
| | | | | G | | |
| AD-1735324 | CAGAUCUUCUGACUGAUCCAA | 3234 | 1363-1383 | UUGGAUCAGUCAGAAGAUCUGA | 3503 | 1361-1383 |
| | | | | C | | |
| AD-1735325 | UGACACAUUUUUCUCCAUAA | 3235 | 5958-5978 | UUUAUGGAGAAAAAUGUGUCAG | 3504 | 5956-5978 |
| | A | | | U | | |
| AD-1735326 | GGAAACUCAUUUUUACAUAA | 3236 | 5617-5637 | UUUAUGUAAAAAUGAGUUUCCA | 3505 | 5615-5637 |
| | A | | | G | | |
| AD-1735327 | AUCAGCAACUUAGAAAUUCU | 3237 | 1966-1986 | UAGAAUUUCUAAGUUGCUGAUA | 3506 | 1964-1986 |
| | A | | | A | | |
| AD-1735328 | CUUAUAUUUCUCUAGAGUAC | 3238 | 5351-5371 | UGUACUCUAGAGAAAUAUAAGG | 3507 | 5349-5371 |
| | A | | | A | | |
| AD-1735329 | AACUCCAAGAAUCUUUUAUC | 3239 | 3229-3249 | UGAUAAAAGAUUCUUGGAGUUU | 3508 | 3227-3249 |
| | A | | | U | | |
| AD-1735330 | CUUCAAACAUUCCUGCAUUAA | 3240 | 2680-2700 | UUAAUGCAGGAAUGUUUGAAGA | 3509 | 2678-2700 |
| | | | | C | | |
| AD-1735331 | UCGUUCUUCUCCUCAACUAGA | 3241 | 3206-3226 | UCUAGUUGAGGAGAAGAACGAU | 3510 | 3204-3226 |
| | | | | C | | |
| AD-1735332 | AAAGAUUAAUCCUCUCACACA | 3242 | 1460-1480 | UGUGUGAGAGGAUUAAUCUUUG | 3511 | 1458-1480 |
| | | | | G | | |
| AD-1735333 | ACUAACCUCAUCAAAGAUACA | 3243 | 4501-4521 | UGUAUCUUUGAUGAGGUUAGUU | 3512 | 4499-4521 |
| | | | | U | | |
| AD-1735334 | CACCACUUAUUACUAAUAAA | 3244 | 5283-5303 | UUUUAUUAGUAAUAAGUGGUGG | 3513 | 5281-5303 |
| | A | | | G | | |
| AD-1735335 | UGGUACUAGAAAUAUUCUUU | 3245 | 5915-5935 | UAAAGAAUAUUUCUAGUACCAG | 3514 | 5913-5935 |
| | A | | | C | | |
| AD-1735336 | GCUGUCAUUUGUUCACUCUA | 3246 | 4608-4628 | UUAGAGUGAACAAAUGACAGCU | 3515 | 4606-4628 |
| | A | | | A | | |
| AD-1735337 | ACUCAACAAUUUAUGAACUA | 3247 | 2421-2441 | UUAGUUCAUAAAUUGUUGAGUG | 3516 | 2419-2441 |
| | A | | | G | | |
| AD-1735338 | AGUAUGACUCAUUAAUAGAA | 3248 | 2269-2289 | UUUCUAUUAAUGAGUCAUACUC | 3517 | 2267-2289 |
| | A | | | U | | |
| AD-1735339 | CUGCUGAUUUUCUUAAUAAG | 3249 | 1891-1911 | UCUUAUUAAGAAAAUCAGCAGU | 3518 | 1889-1911 |
| | A | | | A | | |
| AD-1735340 | UAUCUUUAGAUCCACAUCUU | 3250 | 4587-4607 | UAAGAUGUGGAUCUAAAGAUAA | 3519 | 4585-4607 |
| | A | | | C | | |
| AD-1735341 | CGAGACAUUCCUUAUCACAAA | 3251 | 2466-2486 | UUUGUGAUAAGGAAUGUCUCGA | 3520 | 2464-2486 |
| | | | | U | | |
| AD-1735342 | UACUGAAUCAGAUUAAUUUC | 3252 | 5850-5870 | UGAAAUUAAUCUGAUUCAGUAA | 3521 | 5848-5870 |
| | A | | | C | | |
| AD-1735343 | CUUACUUAAAUCCUUCACUGA | 3253 | 3855-3875 | UCAGUGAAGGAUUUAAGUAAGG | 3522 | 3853-3875 |
| | | | | G | | |
| AD-1735344 | UCGAAAGAAUCAUUCAAACU | 3254 | 2100-2120 | UAGUUUGAAUGAUUCUUUCGAG | 3523 | 2098-2120 |
| | A | | | A | | |
| AD-1735345 | AAAUGACCUAUCACUACUUA | 3255 | 4682-4702 | UUAAGUAGUGAUAGGUCAUUUC | 3524 | 4680-4702 |
| | A | | | U | | |
| AD-1735346 | CAAGUCAUUUCCUCUCUACGA | 3256 | 1395-1415 | UCGUAGAGAGGAAAUGACUUGU | 3525 | 1393-1415 |
| | | | | G | | |
| AD-1735347 | AUGCAGUUUCUUACUUAUCU | 3257 | 5079-5099 | UAGAUAAGUAAGAAACUGCAUG | 3526 | 5077-5099 |
| | A | | | C | | |
| AD-1735348 | UCAAUGCAAUACACUGUUCA | 3258 | 4124-4144 | UUGAACAGUGUAUUGCAUUGAG | 3527 | 4122-4144 |
| | A | | | C | | |
| AD-1735349 | UCUAUGUACCUACUGACACAA | 3259 | 5945-5965 | UUGUGUCAGUAGGUACAUAGAU | 3528 | 5943-5965 |
| | | | | A | | |
| AD-1735350 | UGAAUUCCAGUCUUAUCUUA | 3260 | 4312-4332 | UUAAGAUAAGACUGGAAUUCAA | 3529 | 4310-4332 |
| | A | | | A | | |
| AD-1735351 | UUGCUGUAAUACCAAAACUA | 3261 | 4485-4505 | UUAGUUUUGGUAUUACAGCAAA | 3530 | 4483-4505 |
| | A | | | U | | |
| AD-1735352 | GGAUCACUUCUUUCAAAUCA | 3262 | 1061-1081 | UUGAUUUGAAAGAAGUGAUCCA | 3531 | 1059-1081 |
| | A | | | A | | |
| AD-1735353 | GAACUAGAAAACUAUUCUUA | 3263 | 3795-3815 | UUAAGAAUAGUUUUCUAGUUCC | 3532 | 3793-3815 |
| | A | | | U | | |
| AD-1735354 | ACAUUUCCAUACUGUCUGUU | 3264 | 5484-5504 | UAACAGACAGUAUGGAAAUGUG | 3533 | 5482-5504 |
| | A | | | A | | |
| AD-1735355 | UGAUCCUUCACAGUGUCAAU | 3265 | 5158-5178 | UAUUGACACUGUGAAGGAUCAA | 3534 | 5156-5178 |
| | A | | | A | | |
| AD-1735356 | GAUUUCUGAGAACAAGUAAA | 3266 | 4729-4749 | UUUUACUUGUUCUCAGAAAUCA | 3535 | 4727-4749 |
| | A | | | G | | |
| AD-1735357 | CCUACUUGUGAAAUACAUUU | 3267 | 4906-4926 | UAAAUGUAUUUCACAAGUAGGG | 3536 | 4904-4926 |
| | A | | | U | | |
| AD-1735358 | CAACUGGAAUUUUCCAAUUU | 3268 | 2297-2317 | UAAAUUGGAAAAUUCCAGUUGC | 3537 | 2295-2317 |
| | A | | | U | | |
| AD-1735359 | UCUAAUCCUGAUGAGAGUUA | 3269 | 2649-2669 | UUAACUCUCAUCAGGAUUAGAG | 3538 | 2647-2669 |
| | A | | | C | | |
| AD-1735360 | AGCCUCAUUAUCAAAAUUCU | 3270 | 1288-1308 | UAGAAUUUUGAUAAUGAGGCUU | 3539 | 1286-1308 |
| | A | | | A | | |
| AD-1735361 | AAUUUCUGAUGCUUUUUACU | 3271 | 4220-4240 | UAGUAAAAAGCAUCAGAAAUUG | 3540 | 4218-4240 |
| | A | | | A | | |
| AD-1735362 | UACCAUUAGAUGAAAUCUUA | 3272 | 5788-5808 | UUAAGAUUUCAUCUAAUGGUAC | 3541 | 5786-5808 |
| | A | | | A | | |
| AD-1735363 | CUGUGAAUUCUUCCAACCAUA | 3273 | 1816-1836 | UAUGGUUGGAAGAAUUCACAGG | 3542 | 1814-1836 |
| | | | | A | | |
| AD-1735364 | CUAAUACUCCAGAUUUUUAU | 3274 | 1948-1968 | UAUAAAAAUCUGGAGUAUUAGG | 3543 | 1946-1968 |
| | A | | | U | | |
| AD-1735365 | GGACACAUACAUUGAAUAAA | 3275 | 4550-4570 | UUUUAUUCAAUGUAUGUGUCCU | 3544 | 4548-4570 |
| | A | | | U | | |
| AD-1735366 | UUUGUCAUAAUGCUGCUUUG | 3276 | 3887-3907 | UCAAAGCAGCAUUAUGACAAAG | 3545 | 3885-3907 |
| | A | | | U | | |
| AD-1735367 | UUCAUCUUUCUGUUAAUUUC | 3277 | 4637-4657 | UGAAAUUAACAGAAAGAUGAAC | 3546 | 4635-4657 |
| | A | | | A | | |
| AD-1735368 | CAGUGAAACCAUUAAUUUUC | 3278 | 5028-5048 | UGAAAAUUAAUGGUUUCACUGU | 3547 | 5026-5048 |
| | A | | | G | | |
| AD-1735369 | UAACUGCAAGACUGAUUUCU | 3279 | 4716-4736 | UAGAAAUCAGUCUUGCAGUUAG | 3548 | 4714-4736 |
| | A | | | G | | |
| AD-1735370 | AGAAUUCCUCCUUACCUCAAA | 3280 | 3547-3567 | UUUGAGGUAAGGAGGAAUUCUC | 3549 | 3545-3567 |
| | | | | C | | |
| AD-1735371 | UAUUACAGAUCUUACUUUGU | 3281 | 5830-5850 | UACAAAGUAAGAUCUGUAAUAU | 3550 | 5828-5850 |
| | A | | | G | | |
| AD-1735372 | UUAUCUGAAAGAUAUCAAUU | 3282 | 5111-5131 | UAAUUGAUAUCUUUCAGAUAAG | 3551 | 5109-5131 |
| | A | | | C | | |
| AD-1735373 | AGAUCUGUUCUGGAAAAUCA | 3283 | 2811-2831 | UUGAUUUUCCAGAACAGAUCUG | 3552 | 2809-2831 |
| | A | | | U | | |
| AD-1735374 | CCCAGAAUACAACUUCCUUCA | 3284 | 2867-2887 | UGAAGGAAGUUGUAUUCUGGGC | 3553 | 2865-2887 |
| | | | | G | | |
| AD-1735375 | GUUGAUCUUUCAGUGCUAAA | 3285 | 1323-1343 | UUUUAGCACUGAAAGAUCAACU | 3554 | 1321-1343 |
| | A | | | C | | |
| AD-1735376 | CUAAGCUUUAUUUAUUAGAC | 3286 | 5191-5211 | UGUCUAAUAAAUAAAGCUUAGU | 3555 | 5189-5211 |
| | A | | | G | | |
| AD-1735377 | AGCUUGGAAUCUAUAUCUUU | 3287 | 2843-2863 | UAAAGAUAUAGAUUCCAAGCUG | 3556 | 2841-2863 |
| | A | | | A | | |
| AD-1735378 | UUAUUAUUUCUGAAGCCUAA | 3288 | 4699-4719 | UUUAGGCUUCAGAAAUAAUAAG | 3557 | 4697-4719 |
| | A | | | U | | |
| AD-1735379 | CCUUUGUUGUAUUUAACAAA | 3289 | 4187-4207 | UUUUGUUAAAUACAACAAAGGU | 3558 | 4185-4207 |
| | A | | | C | | |
| AD-1735380 | GCUCUCUAACUAAUCGAUCAA | 3290 | 1852-1872 | UUGAUCGAUUAGUUAGAGAGCC | 3559 | 1850-1872 |
| | | | | A | | |
| AD-1735381 | AAAGACUACAUGACAGAAAU | 3291 | 4666-4686 | UAUUUCUGUCAUGUAGUCUUUA | 3560 | 4664-4686 |
| | A | | | G | | |
| AD-1735382 | CAGGAUUCGUAUUUUUAAAG | 3292 | 4418-4438 | UCUUUAAAAAUACGAAUCCUGA | 3561 | 4416-4438 |
| | A | | | G | | |
| AD-1735383 | CCUUGCUAAGUAAUUGACAU | 3293 | 5659-5679 | UAUGUCAAUUACUUAGCAAGGG | 3562 | 5657-5679 |
| | A | | | U | | |
| AD-1735384 | CCUAUGCACUUUCACAGGAAA | 3294 | 3778-3798 | UUUCCUGUGAAAGUGCAUAGGA | 3563 | 3776-3798 |
| | | | | G | | |
| AD-1735385 | AUGCUGAAAUAUGUUUCAAC | 3295 | 2019-2039 | UGUUGAAACAUAUUUCAGCAUU | 3564 | 2017-2039 |
| | A | | | U | | |
| AD-1735386 | CCUUUUAAUUCAAAUCUACU | 3296 | 1710-1730 | UAGUAGAUUUGAAUUAAAAGGC | 3565 | 1708-1730 |
| | A | | | C | | |
| AD-1735387 | ACUGGACUUAUUGGAUUUAA | 3297 | 5577-5597 | UUUAAAUCCAAUAAGUCCAGUA | 3566 | 5575-5597 |
| | A | | | U | | |
| AD-1735388 | CAUCUGAAUCAGAUGGUACA | 3298 | 2038-2058 | UUGUACCAUCUGAUUCAGAUGU | 3567 | 2036-2058 |
| | A | | | U | | |
| AD-1735389 | AAUUCUGAUAGCAAUCUGUG | 3299 | 1980-2000 | UCACAGAUUGCUAUCAGAAUUU | 3568 | 1978-2000 |
| | A | | | C | | |
| AD-1735390 | UCAAGUCAAGGAUGCUAUCU | 3300 | 1683-1703 | UAGAUAGCAUCCUUGACUUGAA | 3569 | 1681-1703 |
| | A | | | A | | |
| AD-1735391 | UCACUGAAAACCACAAGAUA | 3301 | 3466-3486 | UUAUCUUGUGGUUUUCAGUGAG | 3570 | 3464-3486 |
| | A | | | G | | |
| AD-1735392 | ACCUGUUGAACAGUCUUCAA | 3302 | 1616-1636 | UUUGAAGACUGUUCAACAGGUA | 3571 | 1614-1636 |
| | A | | | G | | |
| AD-1735393 | UCAAGUGACAUAUUUCAGUU | 3303 | 3957-3977 | UAACUGAAAUAUGUCACUUGAG | 3572 | 3955-3977 |
| | A | | | U | | |
| AD-1735394 | UCAGGAACUUCAGGAUUGCU | 3304 | 1596-1616 | UAGCAAUCCUGAAGUUCCUGAG | 3573 | 1594-1616 |
| | A | | | C | | |
| AD-1735395 | ACGGAGUAUUAGUAGCUUAA | 3305 | 1412-1432 | UUUAAGCUACUAAUACUCCGUA | 3574 | 1410-1432 |
| | A | | | G | | |
| AD-1735396 | AUUGUCAAUGAAUUUUAUGA | 3306 | 3135-3155 | UUCAUAAAAUUCAUUGACAAUG | 3575 | 3133-3155 |
| | A | | | C | | |
| AD-1735397 | GAACAGCAAACAAAUAUUGA | 3307 | 2214-2234 | UUCAAUAUUUGUUUGCUGUUCA | 3576 | 2212-2234 |
| | A | | | C | | |
| AD-1735398 | UGAACUAUUUUCGUGCAUUA | 3308 | 2434-2454 | UUAAUGCACGAAAAUAGUUCAU | 3577 | 2432-2454 |
| | A | | | A | | |
| AD-1735399 | ACUGGAAUACUUAUUUUUCA | 3309 | 4751-4771 | UUGAAAAAUAAGUAUUCCAGUU | 3578 | 4749-4771 |
| | A | | | C | | |
| AD-1735400 | UUAUCUUGCAGAGAUCUCUG | 3310 | 1918-1938 | UCAGAGAUCUCUGCAAGAUAAC | 3579 | 1916-1938 |
| | A | | | G | | |
| AD-1735401 | GAAGUGUUAGAAUUUUUGAU | 3311 | 5142-5162 | UAUCAAAAAUUCUAACACUUCC | 3580 | 5140-5162 |
| | A | | | A | | |
| AD-1735402 | UCAAUUUAAGAUCUCUGGAA | 3312 | 5125-5145 | UUUCCAGAGAUCUUAAAUUGAU | 3581 | 5123-5145 |
| | A | | | A | | |
| AD-1735403 | UGGACCAUAUUUACAAUGUU | 3313 | 4856-4876 | UAACAUUGUAAAUAUGGUCCAU | 3582 | 4854-4876 |
| | A | | | U | | |
| AD-1735404 | UAGUCAUUGAAGCAAUCCUU | 3314 | 2926-2946 | UAAGGAUUGCUUCAAUGACUAA | 3583 | 2924-2946 |
| | A | | | A | | |
| AD-1735405 | AGCUGUUUAGGUUUAACAAU | 3315 | 4353-4373 | UAUUGUUAAACCUAAACAGCUU | 3584 | 4351-4373 |
| | A | | | U | | |
| AD-1735406 | CAAGGCAAAUGAUGUAAAUA | 3316 | 2993-3013 | UUAUUUACAUCAUUUGCCUUGG | 3585 | 2991-3013 |
| | A | | | C | | |
| AD-1735407 | AUCCAAUUACUACUGGAAAC | 3317 | 5603-5623 | UGUUUCCAGUAGUAAUUGGAUU | 3586 | 5601-5623 |
| | A | | | U | | |
| AD-1735408 | ACUUACAAUAUAUAUAUCCU | 3318 | 5328-5348 | UAGGAUAUAUAUAUUGUAAGUG | 3587 | 5326-5348 |
| | A | | | C | | |
| AD-1735409 | AUGCAGUUUGGUAUCUGACA | 3319 | 2512-2532 | UUGUCAGAUACCAAACUGCAUG | 3588 | 2510-2532 |
| | A | | | U | | |
| AD-1735410 | CCUUAUUUCAAGACACUGGU | 3320 | 2377-2397 | UACCAGUGUCUUGAAAUAAGGU | 3589 | 2375-2397 |
| | A | | | A | | |
| AD-1735411 | GAAGGGAUUUAUUCUUUAGU | 3321 | 4373-4393 | UACUAAAGAAUAAAUCCCUUCA | 3590 | 4371-4393 |
| | A | | | U | | |
| AD-1735412 | AUCCUUGCUACGGAUCUUAA | 3322 | 2940-2960 | UUUAAGAUCCGUAGCAAGGAUU | 3591 | 2938-2960 |
| | A | | | G | | |
| AD-1735413 | ACUGACUAUCCCGAAGCAAAA | 3323 | 1727-1747 | UUUUGCUUCGGGAUAGUCAGUA | 3592 | 1725-1747 |
| | | | | G | | |
| AD-1735414 | UGUAUUUCUGCUAUUAUUUC | 3324 | 5390-5410 | UGAAAUAAUAGCAGAAAUACAC | 3593 | 5388-5410 |
| | A | | | U | | |
| AD-1735415 | UGUAACAAUAACUAGCCUAA | 3325 | 5680-5700 | UUUAGGCUAGUUAUUGUUACAU | 3594 | 5678-5700 |
| | A | | | A | | |
| AD-1735416 | GUUGUUUUUACUCUAGCUCA | 3326 | 4400-4420 | UUGAGCUAGAGUAAAAACAACA | 3595 | 4398-4420 |
| | A | | | A | | |
| AD-1735417 | CAGGCAGUUUUAUACAAUGA | 3327 | 2790-2810 | UUCAUUGUAUAAAACUGCCUGA | 3596 | 2788-2810 |
| | A | | | G | | |
| AD-1735418 | AGGAUUCUCAGUCAGGUUAU | 3328 | 2352-2372 | UAUAACCUGACUGAGAAUCCUU | 3597 | 2350-2372 |
| | A | | | C | | |
| AD-1735419 | AUUUUCCAUCAUGUUUAAGU | 3329 | 5371-5391 | UACUUAAACAUGAUGGAAAAUG | 3598 | 5369-5391 |
| | A | | | U | | |
| AD-1735420 | UGCCACUUUUGUUACCAUUG | 3330 | 5238-5258 | UCAAUGGUAACAAAAGUGGCAG | 3599 | 5236-5258 |
| | A | | | C | | |
| AD-1735421 | ACUUGCUAGUGUGUGGAUAU | 3331 | 4882-4902 | UAUAUCCACACACUAGCAAGUU | 3600 | 4880-4902 |
| | A | | | U | | |
| AD-1735422 | AAUCUUACUUGAGAAAUUGC | 3332 | 5801-5821 | UGCAAUUUCUCAAGUAAGAUUU | 3601 | 5799-5821 |
| | A | | | C | | |
| AD-1735423 | AGUUCGAGACUUGCAUUUGA | 3333 | 3101-3121 | UUCAAAUGCAAGUCUCGAACUU | 3602 | 3099-3121 |
| | A | | | U | | |
| AD-1735424 | CCAUAGAAUUUCCUGAUACU | 3334 | 1873-1893 | UAGUAUCAGGAAAUUCUAUGGG | 3603 | 1871-1893 |
| | A | | | U | | |
| AD-1735425 | AGGUAAUUCCUUUAGAAUAU | 3335 | 5050-5070 | UAUAUUCUAAAGGAAUUACCUU | 3604 | 5048-5070 |
| | A | | | G | | |
| AD-1735426 | CUUAUGGAAACUCAACAAGA | 3336 | 2118-2138 | UUCUUGUUGAGUUUCCAUAAGU | 3605 | 2116-2138 |
| | A | | | U | | |
| AD-1735427 | AAGCAGCAUUUUAAAUUACG | 3337 | 5554-5574 | UCGUAAUUUAAAAUGCUGCUUU | 3606 | 5552-5574 |
| | A | | | U | | |
| AD-1735428 | UGACUCUCAACUGACCAUUCA | 3338 | 3699-3719 | UGAAUGGUCAGUUGAGAGUCAG | 3607 | 3697-3719 |
| | | | | C | | |
| AD-1735429 | AGGUUUAUCCAUGAAGGACU | 3339 | 4161-4181 | UAGUCCUUCAUGGAUAAACCUA | 3608 | 4159-4181 |
| | A | | | G | | |
| AD-1735430 | ACCAAGAAUUUGGCAUUUCA | 3340 | 1666-1686 | UUGAAAUGCCAAAUUCUUGGUG | 3609 | 1664-1686 |
| | A | | | A | | |
| AD-1735431 | UAUCUAGAAUAUUUGGCUUA | 3341 | 5094-5114 | UUAAGCCAAAUAUUCUAGAUAA | 3610 | 5092-5114 |
| | A | | | G | | |
| AD-1735432 | CUCCUGCAGAAUACAUACAAA | 3342 | 5412-5432 | UUUGUAUGUAUUCUGCAGGAGA | 3611 | 5410-5432 |
| | | | | G | | |
| AD-1735433 | UCACACCAUUUCCUGGAUUUA | 3343 | 1474-1494 | UAAAUCCAGGAAAUGGUGUGAG | 3612 | 1472-1494 |
| | | | | A | | |
| AD-1735434 | AUGUGGAAUUCAAGCGCUUU | 3344 | 2899-2919 | UAAAGCGCUUGAAUUCCACAUG | 3613 | 2897-2919 |
| | A | | | A | | |
| AD-1735435 | AUUGUGUAUUAUCUACUAUG | 3345 | 4240-4260 | UCAUAGUAGAUAAUACACAAUA | 3614 | 4238-4260 |
| | A | | | G | | |
| AD-1735436 | AAUGGAGUAAUGAAAAUGAU | 3346 | 3025-3045 | UAUCAUUUUCAUUACUCCAUUC | 3615 | 3023-3045 |
| | A | | | U | | |
| AD-1735437 | ACUGGUUUAUUGGAAAUAUU | 3347 | 2391-2411 | UAAUAUUUCCAAUAAACCAGUG | 3616 | 2389-2411 |
| | A | | | U | | |
| AD-1735438 | CAAGUGUAUGUGUAUAAAGU | 3348 | 5429-5449 | UACUUUAUACACAUACACUUGU | 3617 | 5427-5449 |
| | A | | | A | | |
| AD-1735439 | UACAAGCAUGCAUAUUGAGA | 3349 | 5457-5477 | UUCUCAAUAUGCAUGCUUGUAC | 3618 | 5455-5477 |
| | A | | | A | | |
| AD-1735440 | UGUGUCUUUUAUGUCUUUGA | 3350 | 4036-4056 | UUCAAAGACAUAAAAGACACAC | 3619 | 4034-4056 |
| | A | | | U | | |
| AD-1735441 | AUUUUCUCGCAGAAUUCAAU | 3351 | 2971-2991 | UAUUGAAUUCUGCGAGAAAAUC | 3620 | 2969-2991 |
| | A | | | A | | |
| AD-1735442 | UAGCGACAGUUUGAGUAAAA | 3352 | 3609-3629 | UUUUUACUCAAACUGUCGCUAU | 3621 | 3607-3629 |
| | A | | | U | | |
| AD-1735443 | CUGGUGUAUGAAUACUUUGU | 3353 | 3872-3892 | UACAAAGUAUUCAUACACCAGU | 3622 | 3870-3892 |
| | A | | | G | | |
| AD-1735444 | GUGAUAAGUGGCUAACAGAA | 3354 | 2182-2202 | UUUCUGUUAGCCACUUAUCACC | 3623 | 2180-2202 |
| | A | | | U | | |
| AD-1735445 | GUAGGCUAAUAUUUUCUAUU | 3355 | 4962-4982 | UAAUAGAAAAUAUUAGCCUACC | 3624 | 4960-4982 |
| | A | | | A | | |
| AD-1735446 | CCUCUUCAUCCUCGACUGUCA | 3356 | 1089-1109 | UGACAGUCGAGGAUGAAGAGGC | 3625 | 1087-1109 |
| | | | | G | | |
| AD-1735447 | AAUUGCCAUAAGCCAUAUUA | 3357 | 5815-5835 | UUAAUAUGGCUUAUGGCAAUUU | 3626 | 5813-5835 |
| | A | | | C | | |
| AD-1735448 | GCGAAUAUUUUGUCAGCUAA | 3358 | 3437-3457 | UUUAGCUGACAAAAUAUUCGCC | 3627 | 3435-3457 |
| | A | | | G | | |
| AD-1735449 | AUCCAGUGUUGCCUUUCUGA | 3359 | 4093-4113 | UUCAGAAAGGCAACACUGGAUU | 3628 | 4091-4113 |
| | A | | | C | | |
| AD-1735450 | AAAGUCUAUGCCUGUCUAAA | 3360 | 4068-4088 | UUUUAGACAGGCAUAGACUUUU | 3629 | 4066-4088 |
| | A | | | C | | |
| AD-1735451 | GGACAUCAGAAGUUUGAAUU | 3361 | 4298-4318 | UAAUUCAAACUUCUGAUGUCCA | 3630 | 4296-4318 |
| | A | | | U | | |
| AD-1735452 | GGCGAAUUGCUUAUAUUUCU | 3362 | 2617-2637 | UAGAAAUAUAAGCAAUUCGCCC | 3631 | 2615-2637 |
| | A | | | A | | |
| AD-1735453 | CACACUAUGUGUAAACCAGU | 3363 | 5261-5281 | UACUGGUUUACACAUAGUGUGU | 3632 | 5259-5281 |
| | A | | | G | | |
| AD-1735454 | CAGGUGAAGAAGAAAACAUU | 3364 | 2077-2097 | UAAUGUUUUCUUCUUCACCUGA | 3633 | 2075-2097 |
| | A | | | U | | |
| AD-1735455 | GUGAGCUCUUAUUUUUCACU | 3365 | 3914-3934 | UAGUGAAAAAUAAGAGCUCACU | 3634 | 3912-3934 |
| | A | | | A | | |
| AD-1735456 | AAAGCUGAUGGGAAUAAACU | 3366 | 3519-3539 | UAGUUUAUUCCCAUCAGCUUUA | 3635 | 3517-3539 |
| | A | | | C | | |
| AD-1735457 | GUGUCGUUAGGAGAAACUGC | 3367 | 1164-1184 | UGCAGUUUCUCCUAACGACACG | 3636 | 1162-1184 |
| | A | | | C | | |
| AD-1735458 | GGGACUUAAAACAAUGGUAU | 3368 | 1267-1287 | UAUACCAUUGUUUUAAGUCCCA | 3637 | 1265-1287 |
| | A | | | A | | |
| AD-1735459 | CUGAUGGUAGAAUUAACCAU | 3369 | 2596-2616 | UAUGGUUAAUUCUACCAUCAGA | 3638 | 2594-2616 |
| | A | | | A | | |
| AD-1735460 | ACUAUGUGUGUUUUAUUUCU | 3370 | 4254-4274 | UAGAAAUAAAACACACAUAGUA | 3639 | 4252-4274 |
| | A | | | G | | |
| AD-1735461 | CUGAUAAUUUAUAUUUGCAC | 3371 | 5310-5330 | UGUGCAAAUAUAAAUUAUCAGU | 3640 | 5308-5330 |
| | A | | | C | | |
| AD-1735462 | GUCCUUAAAUUAUUUAACCC | 3372 | 5641-5661 | UGGGUUAAAUAAUUUAAGGACU | 3641 | 5639-5661 |
| | A | | | A | | |
| AD-1735463 | CGCAAUAUGGUGUCAGAUCU | 3373 | 1350-1370 | UAGAUCUGACACCAUAUUGCGA | 3642 | 1348-1370 |
| | A | | | G | | |
| AD-1735464 | UUCGAAGAGCUGCUCUAAUC | 3374 | 2636-2656 | UGAUUAGAGCAGCUCUUCGAAG | 3643 | 2634-2656 |
| | A | | | A | | |
| AD-1735465 | UUUCUGCUGAGAGUAUUCAG | 3375 | 4269-4289 | UCUGAAUACUCUCAGCAGAAAU | 3644 | 4267-4289 |
| | A | | | A | | |
| AD-1735466 | UUGAACAGGAAGUAUCACUG | 3376 | 2230-2250 | UCAGUGAUACUUCCUGUUCAAU | 3645 | 2228-2250 |
| | A | | | A | | |
| AD-1735467 | UGCCUUGUAUUUCCAGAGAA | 3377 | 1228-1248 | UUUCUCUGGAAAUACAAGGCAA | 3646 | 1226-1248 |
| | A | | | C | | |
| AD-1735468 | GUUACUAUGGCAGUUGCAAA | 3378 | 1189-1209 | UUUUGCAACUGCCAUAGUAACU | 3647 | 1187-1209 |
| | A | | | G | | |
| AD-1735469 | AUGGCUGAAUUUUAAAGCUG | 3379 | 4338-4358 | UCAGCUUUAAAAUUCAGCCAUG | 3648 | 4336-4358 |
| | A | | | G | | |
| AD-1735470 | GUCCAUUCAUGGAUCGUUCU | 3380 | 3193-3213 | UAGAACGAUCCAUGAAUGGACU | 3649 | 3191-3213 |
| | A | | | G | | |
| AD-1735471 | UGUGUAACUCCUAUGAUGCU | 3381 | 3268-3288 | UAGCAUCAUAGGAGUUACACAG | 3650 | 3266-3288 |
| | A | | | G | | |
| AD-1735472 | UGGCAGUUUCCCACUCCUAUA | 3382 | 3763-3783 | UAUAGGAGUGGGAAACUGCCAG | 3651 | 3761-3783 |
| | | | | C | | |
| AD-1735473 | CCUCAAGCAGAUGAGAUUCA | 3383 | 3561-3581 | UUGAAUCUCAUCUGCUUGAGGU | 3652 | 3559-3581 |
| | A | | | A | | |
| AD-1735474 | AUGUUGUUUUCUCAAAAGCA | 3384 | 5539-5559 | UUGCUUUUGAGAAAACAACAUA | 3653 | 5537-5559 |
| | A | | | A | | |
| AD-1735475 | GAGGGAUUUCUGCUCAAUGC | 3385 | 4111-4131 | UGCAUUGAGCAGAAAUCCCUCA | 3654 | 4109-4131 |
| | A | | | G | | |
| AD-1735476 | GCCUUCUUCUUCCUCACCUGA | 3386 | 654-674 | UCAGGUGAGGAAGAAGAAGGCA | 3655 | 652-674 |
| | | | | C | | |
| AD-1735477 | UUGAGAUUGAAUCACAUUUC | 3387 | 5471-5491 | UGAAAUGUGAUUCAAUCUCAAU | 3656 | 5469-5491 |
| | A | | | A | | |
| AD-1735478 | CUGUUCAGUGCUAUUCUCCCA | 3388 | 4137-4157 | UGGGAGAAUAGCACUGAACAGU | 3657 | 4135-4157 |
| | | | | G | | |
| AD-1735479 | CCUGGCUUACAGCAGAUCCAA | 3389 | 2544-2564 | UUGGAUCUGCUGUAAGCCAGGA | 3658 | 2542-2564 |
| | | | | A | | |
| AD-1735480 | GACAGCAGAAAAUUAUUUCA | 3390 | 2157-2177 | UUGAAAUAAUUUUCUGCUGUCU | 3659 | 2155-2177 |
| | A | | | U | | |
| AD-1735481 | UUGGGUUUCUUUAGUUUAUG | 3391 | 5522-5542 | UCAUAAACUAAAGAAACCCAAU | 3660 | 5520-5542 |
| | A | | | A | | |
| AD-1735482 | CACCAUGUAGGUCUCAGAAG | 3392 | 1770-1790 | UCUUCUGAGACCUACAUGGUGA | 3661 | 1768-1790 |
| | A | | | G | | |
| AD-1735483 | GUUGUGGAACAGGAAAUGAA | 3393 | 2569-2589 | UUUCAUUUCCUGUUCCACAACC | 3662 | 2567-2589 |
| | A | | | A | | |
| AD-1735484 | GGAGAACAUAUCAUAUUUUG | 3394 | 4988-5008 | UCAAAAUAUGAUAUGUUCUCCA | 3663 | 4986-5008 |
| | A | | | A | | |
| AD-1735485 | CAGCCAAAAUGAUGGCAAAA | 3395 | 4940-4960 | UUUUUGCCAUCAUUUUGGCUGC | 3664 | 4938-4960 |
| | A | | | U | | |
| AD-1735486 | CCAAUUUUUGAACUUGUAGA | 3396 | 2310-2330 | UUCUACAAGUUCAAAAAUUGGA | 3665 | 2308-2330 |
| | A | | | A | | |
| AD-1735487 | AUAGGAAUAGUUUGCCAACU | 3397 | 1558-1578 | UAGUUGGCAAACUAUUCCUAUU | 3666 | 1556-1578 |
| | A | | | U | | |
| AD-1735488 | UUUGAAUGUUUUGGAGAAAA | 3398 | 4051-4071 | UUUUUCUCCAAAACAUUCAAAG | 3667 | 4049-4071 |
| | A | | | A | | |
| AD-1735489 | GUCAAUAUUUAAUGAAUCAC | 3399 | 5172-5192 | UGUGAUUCAUUAAAUAUUGACA | 3668 | 5170-5192 |
| | A | | | C | | |
| AD-1735490 | UGAGAAUAUAUUAAAUGCAC | 3400 | 5764-5784 | UGUGCAUUUAAUAUAUUCUCAC | 3669 | 5762-5784 |
| | A | | | A | | |
| AD-1735491 | UAACAAGGGACUAAAUAGGA | 3401 | 1544-1564 | UUCCUAUUUAGUCCCUUGUUAA | 3670 | 1542-1564 |
| | A | | | G | | |
| AD-1735492 | GGCUUCUUCUUCCACCUCUGA | 3402 | 408-428 | UCAGAGGUGGAAGAAGAAGCCG | 3671 | 406-428 |
| | | | | C | | |
| AD-1735493 | UUGGAACAUGUGGUUAUCUU | 3403 | 4573-4593 | UAAGAUAACCACAUGUUCCAAU | 3672 | 4571-4593 |
| | A | | | U | | |
| AD-1735494 | CAGAGAACAGAUGAUUCUUU | 3404 | 1241-1261 | UAAAGAAUCAUCUGUUCUCUGG | 3673 | 1239-1261 |
| | A | | | A | | |
| AD-1735495 | CUGUUAUUUUAUUGGGUUUU | 3405 | 5499-5519 | UAAAACCCAAUAAAAUAACAGA | 3674 | 5497-5519 |
| | A | | | C | | |
| AD-1735496 | AUGAAGAAGCAAAUCUUGGU | 3406 | 3163-3183 | UACCAAGAUUUGCUUCUUCAUC | 3675 | 3161-3183 |
| | A | | | U | | |
| AD-1735497 | UUUGGAAUCAUGCAAUUUUG | 3407 | 5004-5024 | UCAAAAUUGCAUGAUUCCAAAA | 3676 | 5002-5024 |
| | A | | | U | | |
| AD-1735498 | CAAUGUUUUGUAAACUUGCU | 3408 | 4869-4889 | UAGCAAGUUUACAAAACAUUGU | 3677 | 4867-4889 |
| | A | | | A | | |
| AD-1735499 | GGAUCGUAAUAAUGGCAAAA | 3409 | 1640-1660 | UUUUUGCCAUUAUUACGAUCCC | 3678 | 1638-1660 |
| | A | | | A | | |
| AD-1735500 | GUGCUUUCUCAGGUUCCUGU | 3410 | 1435-1455 | UACAGGAACCUGAGAAAGCACC | 3679 | 1433-1455 |
| | A | | | C | | |
| AD-1735501 | AUGAUACUGAAAGUGGUGAU | 3411 | 3331-3351 | UAUCACCACUUUCAGUAUCAUU | 3680 | 3329-3351 |
| | A | | | A | | |
| AD-1735502 | UCACUGGACCUGAUUUUAGU | 3412 | 2244-2264 | UACUAAAAUCAGGUCCAGUGAU | 3681 | 2242-2264 |
| | A | | | A | | |
| AD-1735503 | GAACUUUUUGCUUUUAUGAA | 3413 | 3991-4011 | UUUCAUAAAAGCAAAAAGUUCC | 3682 | 3989-4011 |
| | A | | | U | | |
| AD-1735504 | GAACACAGCACAGAUUUGUU | 3414 | 4451-4471 | UAACAAAUCUGUGCUGUGUUCA | 3683 | 4449-4471 |
| | A | | | U | | |
| AD-1735505 | AUAUGGAAGGAAAUCGUAGA | 3415 | 3483-3503 | UUCUACGAUUUCCUUCCAUAUC | 3684 | 3481-3503 |
| | A | | | U | | |
| AD-1735506 | GCUAUCUAAAUGGGCCUUUU | 3416 | 1696-1716 | UAAAAGGCCCAUUUAGAUAGCA | 3685 | 1694-1716 |
| | A | | | U | | |
| AD-1735507 | CAAAACCACCAAGAAGGAAA | 3417 | 3409-3429 | UUUUCCUUCUUGGUGGUUUUGG | 3686 | 3407-3429 |
| | A | | | A | | |
| AD-1735508 | CCACAGAUGUGCUACAUGCAA | 3418 | 2497-2517 | UUGCAUGUAGCACAUCUGUGGC | 3687 | 2495-2517 |
| | | | | A | | |
| AD-1735509 | AAAGUCAUACAUGUACAAGC | 3419 | 5444-5464 | UGCUUGUACAUGUAUGACUUUA | 3688 | 5442-5464 |
| | A | | | U | | |
| AD-1735510 | UAGAAGCAGAAGAGGAUAAU | 3420 | 3313-3333 | UAUUAUCCUCUUCUGCUUCUAA | 3689 | 3311-3333 |
| | A | | | C | | |
| AD-1735511 | CGUGUGUUCGCACAGCUUGA | 3421 | 611-631 | UUCAAGCUGUGCGAACACACGC | 3690 | 609-631 |
| | A | | | U | | |
| AD-1735512 | GCUGGUGUUUUGUCCAGUCU | 3422 | 1791-1811 | UAGACUGGACAAAACACCAGCU | 3691 | 1789-1811 |
| | A | | | C | | |
| AD-1735513 | AUGGAAAACAAUCUAAAUCC | 3423 | 3390-3410 | UGGAUUUAGAUUGUUUUCCAUU | 3692 | 3388-3410 |
| | A | | | U | | |
| AD-1735514 | CAUUAGAAAAUGGCUAUCGA | 3424 | 2449-2469 | UUCGAUAGCCAUUUUCUAAUGC | 3693 | 2447-2469 |
| | A | | | A | | |
| AD-1735515 | AUGGACAGAAGGCAUUGUCA | 3425 | 3122-3142 | UUGACAAUGCCUUCUGUCCAUU | 3694 | 3120-3142 |
| | A | | | U | | |
| AD-1735516 | CAGAUUGCUGCAGUGGAAAA | 3426 | 2056-2076 | UUUUUCCACUGCAGCAAUCUGU | 3695 | 2054-2076 |
| | A | | | A | | |
| AD-1735517 | AGGUGGAAAUGGAGUUGAUC | 3427 | 1310-1330 | UGAUCAACUCCAUUUCCACCUC | 3696 | 1308-1330 |
| | A | | | C | | |
| AD-1735518 | CUGGGCAAUGCACCUAAUACA | 3428 | 1935-1955 | UGUAUUAGGUGCAUUGCCCAGA | 3697 | 1933-1955 |
| | | | | G | | |
| AD-1735519 | AUUUCCCUCUGCCUAAAGACA | 3429 | 4652-4672 | UGUCUUUAGGCAGAGGGAAAUU | 3698 | 4650-4672 |
| | | | | A | | |
| AD-1735520 | CGCUUCUGCAACGUGGAGCUA | 3430 | 429-449 | UAGCUCCACGUUGCAGAAGCGG | 3699 | 427-449 |
| | | | | C | | |
| AD-1735521 | AGAUUCAUAUUGUAUUUCCC | 3431 | 4014-4034 | UGGGAAAUACAAUAUGAAUCUA | 3700 | 4012-4034 |
| | A | | | U | | |
| AD-1735522 | AGGACAAAUGCAUUUCUAGU | 3432 | 2754-2774 | UACUAGAAAUGCAUUUGUCCUC | 3701 | 2752-2774 |
| | A | | | C | | |
| AD-1735523 | UUAGACGUGUUGAGUGAGUG | 3433 | 5205-5225 | UCACUCACUCAACACGUCUAAU | 3702 | 5203-5225 |
| | A | | | A | | |
| AD-1735524 | CUGUGGACAUCAAAUGCUGA | 3434 | 2006-2026 | UUCAGCAUUUGAUGUCCACAGC | 3703 | 2004-2026 |
| | A | | | U | | |
| AD-1735525 | AGGCCUUAAUACUGUGAGAG | 3435 | 3729-3749 | UCUCUCACAGUAUUAAGGCCUG | 3704 | 3727-3749 |
| | A | | | U | | |
| AD-1735526 | AGAAAUCAUUGCCUAGUGUU | 3436 | 3672-3692 | UAACACUAGGCAAUGAUUUCUG | 3705 | 3670-3692 |
| | A | | | C | | |
| AD-1735527 | UGAGUGCUGAGUUCCUUGCU | 3437 | 5219-5239 | UAGCAAGGAACUCAGCACUCAC | 3706 | 5217-5239 |
| | A | | | U | | |
| AD-1735528 | GCCAUGCAUGAUUAUGAUCA | 3438 | 2727-2747 | UUGAUCAUAAUCAUGCAUGGCA | 3707 | 2725-2747 |
| | A | | | G | | |
| AD-1735529 | UGCUGCUGGUUUGCUACCAG | 3439 | 3284-3304 | UCUGGUAGCAAACCAGCAGCAU | 3708 | 3282-3304 |
| | A | | | C | | |
| AD-1735530 | CAGAUGAAGAGGAAUAGCGA | 3440 | 3595-3615 | UUCGCUAUUCCUCUUCAUCUGC | 3709 | 3593-3615 |
| | A | | | C | | |
| AD-1735531 | AUCCAGGUGCAUCAAUUUCU | 3441 | 4207-4227 | UAGAAAUUGAUGCACCUGGAUU | 3710 | 4205-4227 |
| | A | | | U | | |
| AD-1735532 | AAUAAGCCAAGCGUUAUCUU | 3442 | 1905-1925 | UAAGAUAACGCUUGGCUUAUUA | 3711 | 1903-1925 |
| | A | | | A | | |
| AD-1735533 | GAGAGGAUCCUUGCUCUGCU | 3443 | 3744-3764 | UAGCAGAGCAAGGAUCCUCUCA | 3712 | 3742-3764 |
| | A | | | C | | |
| AD-1735534 | AUGAUGAAGACGGUGAAGAA | 3444 | 3349-3369 | UUUCUUCACCGUCUUCAUCAUC | 3713 | 3347-3369 |
| | A | | | A | | |
| AD-1735535 | UCGUAAGUGUAAGAAAGAAU | 3445 | 5743-5763 | UAUUCUUUCUUACACUUACGAA | 3714 | 5741-5763 |
| | A | | | U | | |
| AD-1735536 | AUCUGUGUAACAGCUGUGGA | 3446 | 1993-2013 | UUCCACAGCUGUUACACAGAUU | 3715 | 1991-2013 |
| | A | | | G | | |
| AD-1735537 | AUUUAAAAUUCCCACUCAACA | 3447 | 2408-2428 | UGUUGAGUGGGAAUUUUAAAUA | 3716 | 2406-2428 |
| | | | | U | | |
| AD-1735538 | GACCAGUGUCUACUGGCUCUA | 3448 | 1837-1857 | UAGAGCCAGUAGACACUGGUCC | 3717 | 1835-1857 |
| | | | | A | | |
| AD-1735539 | CGCUUUCGUUUUUUAGUCAU | 3449 | 2913-2933 | UAUGACUAAAAAACGAAAGCGC | 3718 | 2911-2933 |
| | A | | | U | | |
| AD-1735540 | UCCGUGUUGACCCAUGUUGCA | 3450 | 3829-3849 | UGCAACAUGGGUCAACACGGAU | 3719 | 3827-3849 |
| | | | | G | | |
| AD-1735541 | AUACAGAAGAUGAAGAAAUG | 3451 | 3373-3393 | UCAUUUCUUCAUCUUCUGUAUC | 3720 | 3371-3393 |
| | A | | | U | | |
| AD-1735542 | UCUCCCGAGCUGAAACUUAAA | 3452 | 5719-5739 | UUUAAGUUUCAGCUCGGGAGAG | 3721 | 5717-5739 |
| | | | | A | | |
| AD-1735543 | UGCAUCAAACUGGCAGAUAU | 3453 | 3066-3086 | UAUAUCUGCCAGUUUGAUGCAC | 3722 | 3064-3086 |
| | A | | | A | | |
| AD-1735544 | UUGCAAAAUAUUCAGGAGAC | 3454 | 1202-1222 | UGUCUCCUGAAUAUUUUGCAAC | 3723 | 1200-1222 |
| | A | | | U | | |
| AD-1735545 | ACAAUCGUAUACAUGCCACAA | 3455 | 2482-2502 | UUGUGGCAUGUAUACGAUUGUG | 3724 | 2480-2502 |
| | | | | A | | |
| AD-1735546 | AAUAGAAAAGAUGAGCAACU | 3456 | 2282-2302 | UAGUUGCUCAUCUUUUCUAUUA | 3725 | 2280-2302 |
| | A | | | A | | |
| AD-1735547 | UAUCUUAUGUUCCAUGGCUG | 3457 | 4325-4345 | UCAGCCAUGGAACAUAAGAUAA | 3726 | 4323-4345 |
| | A | | | G | | |
| AD-1735548 | CUACGUGAAGAGCUGCGUGA | 3458 | 362-382 | UUCACGCAGCUCUUCACGUAGC | 3727 | 360-382 |
| | A | | | C | | |
| AD-1735549 | GAAUUGAUGGCUCUAUACGU | 3459 | 2700-2720 | UACGUAUAGAGCCAUCAAUUCU | 3728 | 2698-2720 |
| | A | | | A | | |
| AD-1735550 | UUCAGGUAAUUGAAGAGGCA | 3460 | 3577-3597 | UUGCCUCUUCAAUUACCUGAAU | 3729 | 3575-3597 |
| | A | | | C | | |
| AD-1735551 | AAGGACUGAGUGACCUUUGU | 3461 | 4174-4194 | UACAAAGGUCACUCAGUCCUUC | 3730 | 4172-4194 |
| | A | | | A | | |
| AD-1735552 | CGAGAGUCUGAGGAACGGCU | 3462 | 344-364 | UAGCCGUUCCUCAGACUCUCGG | 3731 | 342-364 |
| | A | | | G | | |
| AD-1735553 | AUUCUUUGGGAUUGGGACUU | 3463 | 1254-1274 | UAAGUCCCAAUCCCAAAGAAUC | 3732 | 1252-1274 |
| | A | | | A | | |
| AD-1735554 | UACCAGGUCAGUGGUUAGAA | 3464 | 3298-3318 | UUUCUAACCACUGACCUGGUAG | 3733 | 3296-3318 |
| | A | | | C | | |
| AD-1735555 | AUUCAGGUUUGCCAUGGACA | 3465 | 4283-4303 | UUGUCCAUGGCAAACCUGAAUA | 3734 | 4281-4303 |
| | A | | | C | | |
| AD-1735556 | GCAGCUAAACUGGUCCUGGA | 3466 | 34-54 | UUCCAGGACCAGUUUAGCUGCC | 3735 | 32-54 |
| | A | | | G | | |
| AD-1735557 | AGUAAUGGCAUAGAAUGGAG | 3467 | 3012-3032 | UCUCCAUUCUAUGCCAUUACUA | 3736 | 3010-3032 |
| | A | | | U | | |
| AD-1735558 | AAUUGCAAGAAAAUGGACCA | 3468 | 4843-4863 | UUGGUCCAUUUUCUUGCAAUUA | 3737 | 4841-4863 |
| | A | | | U | | |
| AD-1735559 | CGGCACUGCGUUCUGGUGCUA | 3469 | 921-941 | UAGCACCAGAACGCAGUGCCGG | 3738 | 919-941 |
| | | | | A | | |
| AD-1735560 | AGUCAUAUUGAAGAAGCCCA | 3470 | 3633-3653 | UUGGGCUUCUUCAAUAUGACUU | 3739 | 3631-3653 |
| | A | | | U | | |
| AD-1735561 | UCAUCAUGCUGCGUCAGCUUA | 3471 | 2828-2848 | UAAGCUGACGCAGCAUGAUGAU | 3740 | 2826-2848 |
| | | | | U | | |
| AD-1735562 | AAAUGAUCGCCUCUUGGUAU | 3472 | 3038-3058 | UAUACCAAGAGGCGAUCAUUUU | 3741 | 3036-3058 |
| | A | | | C | | |
| AD-1735563 | AUUUGAAGAUAUAAAGAGCA | 3473 | 4922-4942 | UUGCUCUUUAUAUCUUCAAAUG | 3742 | 4920-4942 |
| | A | | | U | | |
| AD-1735564 | GGUCUCCUUCACCAGCCUCGA | 3474 | 965-985 | UCGAGGCUGGUGAAGGAGACCC | 3743 | 963-985 |
| | | | | A | | |
| AD-1735565 | GAAACAGAGAAGAAAGACAG | 3475 | 2142-2162 | UCUGUCUUUCUUCUCUGUUUCC | 3744 | 2140-2162 |
| | A | | | U | | |
| AD-1735566 | UUCUAGUGGCUACAAAUGCC | 3476 | 2767-2787 | UGGCAUUUGUAGCCACUAGAAA | 3745 | 2765-2787 |
| | A | | | U | | |
| AD-1735567 | GGAGAGAAAUCAGGAAGGAU | 3477 | 2337-2357 | UAUCCUUCCUGAUUUCUCUCCC | 3746 | 2335-2357 |
| | A | | | A | | |
| AD-1735568 | AUAUAGUGAGCCCUAAAGGA | 3478 | 4533-4553 | UUCCUUUAGGGCUCACUAUAUU | 3747 | 4531-4553 |
| | A | | | U | | |
| AD-1735569 | GCUGCCUUUGUCCUCGCCCUA | 3479 | 528-548 | UAGGGCGAGGACAAAGGCAGCC | 3748 | 526-548 |
| | | | | A | | |
| AD-1735570 | GGCAAAAGACCUCACCAAGAA | 3480 | 1653-1673 | UUCUUGGUGAGGUCUUUUGCCA | 3749 | 1651-1673 |
| | | | | U | | |
| AD-1735571 | UUCAGCAUCGCCUGUGCCUUA | 3481 | 639-659 | UAAGGCACAGGCGAUGCUGAAG | 3750 | 637-659 |
| | | | | A | | |
| AD-1735572 | GCUAAAUGAGGCUCGCAAUA | 3482 | 1337-1357 | UUAUUGCGAGCCUCAUUUAGCA | 3751 | 1335-1357 |
| | A | | | C | | |
| AD-1735573 | CAGCUUCGUCUGGUGGGUCU | 3483 | 950-970 | UAGACCCACCAGACGAAGCUGG | 3752 | 948-970 |
| | A | | | C | | |
| AD-1735574 | AUAUGGUAUUGGCAUGCAGU | 3484 | 5066-5086 | UACUGCAUGCCAAUACCAUAUU | 3753 | 5064-5086 |
| | A | | | C | | |
| AD-1735575 | AAACUGCAGGUGGAGAAUUC | 3485 | 3534-3554 | UGAAUUCUCCACCUGCAGUUUA | 3754 | 3532-3554 |
| | A | | | U | | |
| AD-1735576 | UAUGGCUGCCUGUCUUCAAA | 3486 | 2667-2687 | UUUUGAAGACAGGCAGCCAUAA | 3755 | 2665-2687 |
| | A | | | C | | |
| AD-1735577 | CUGUUCUGAAAUAGAGGACC | 3487 | 1499-1519 | UGGUCCUCUAUUUCAGAACAGG | 3756 | 1497-1519 |
| | A | | | G | | |
| AD-1735578 | UCUAUUUUUAAAGCCGCUGG | 3488 | 5898-5918 | UCCAGCGGCUUUAAAAAUAGAA | 3757 | 5896-5918 |
| | A | | | A | | |
| AD-1735579 | GCUGAGGAGAAGCUCAGGAA | 3489 | 1583-1603 | UUUCCUGAGCUUCUCCUCAGCU | 3758 | 1581-1603 |
| | A | | | G | | |
| AD-1735580 | CAAGCCUUCCACCACAAGUCA | 3490 | 1381-1401 | UGACUUGUGGUGGAAGGCUUGG | 3759 | 1379-1401 |
| | | | | A | | |
| AD-1735581 | UUCAGUUACCAAAGUGGCCA | 3491 | 3970-3990 | UUGGCCACUUUGGUAACUGAAA | 3760 | 3968-3990 |
| | A | | | U | | |
| AD-1735582 | CACCUGCUUCCUCACCCGGAA | 3492 | 668-688 | UUCCGGGUGAGGAAGCAGGUGA | 3761 | 666-688 |
| | | | | G | | |
| AD-1735583 | UUUUAUCACCCACAUAGUGG | 3493 | 3242-3262 | UCCACUAUGUGGGUGAUAAAAG | 3762 | 3240-3262 |
| | A | | | A | | |
| AD-1735584 | AGGAGACCGUCGUUGCCUUG | 3494 | 1215-1235 | UCAAGGCAACGACGGUCUCCUG | 3763 | 1213-1235 |
| | A | | | A | | |
| AD-1735585 | AUGGCCCAGCAAAAGUUCGA | 3495 | 3088-3108 | UUCGAACUUUUGCUGGGCCAUU | 3764 | 3086-3108 |
| | A | | | U | | |
| AD-1735586 | AGACGCCAAAGCCAUGCGGUA | 3496 | 290-310 | UACCGCAUGGCUUUGGCGUCUC | 3765 | 288-310 |
| | | | | G | | |
| AD-1735587 | CAGCUAAUGCACCACCUCACA | 3497 | 3450-3470 | UGUGAGGUGGUGCAUUAGCUGA | 3766 | 3448-3470 |
| | | | | C | | |
| AD-1735588 | GGAAAAGCAGACGGCGAAUA | 3498 | 3424-3444 | UUAUUCGCCGUCUGCUUUUCCU | 3767 | 3422-3444 |
| | A | | | U | | |
| AD-1735589 | GCUUUGCUGGGUAGUGAGCU | 3499 | 3901-3921 | UAGCUCACUACCCAGCAAAGCA | 3768 | 3899-3921 |
| | A | | | G | | |

TABLE 13
Modified Sense and Antisense Strand Sequences of PDE3B dsRNA Agents Comprising an Unsaturated C22 Hydrocarbon Chain
Conjugated to Position 6 on the Sense Strand, Counting from the 5′-end of the Sense Strand

| | | SEQ | | SEQ | | SEQ |
|---|---|---|---|---|---|---|
| Duplex | | ID | | ID | mRNA | ID |
| Name | Sense Sequence 5′ to 3 | NO: | Antisense Sequence 5′ to 3′ | NO: | Target Sequence 5′ to 3′ | NO: |
| AD- | ususccu(Uda)CfuUfCfAfucuugauc | 3769 | VPusUfsgauCfaAfGfaugaAfgAfaggaas | 4038 | ACUUCCUUCUUCAUCUUGA | 4307 |
| 1735321 | sasa | | gsu | | UCAU | |
| AD- | csascuc(Uda)AfaAfAfCfugauguuc | 3770 | VPusUfsgaaCfaUfCfaguuUfuAfgagugs | 4039 | UUCACUCUAAAACUGAUGU | 4308 |
| 1735322 | sasa | | asa | | UCAU | |
| AD- | uscsuuc(Uda)GfuAfUfCfacugacuc | 3771 | VPusUfsgagUfcAfGfugauAfcAfgaagas | 4040 | CAUCUUCUGUAUCACUGAC | 4309 |
| 1735323 | sasa | | usg | | UCAC | |
| AD- | csasgau(Cda)UfuCfUfGfacugaucc | 3772 | VPusUfsggaUfcAfGfucagAfaGfaucugs | 4041 | GUCAGAUCUUCUGACUGAU | 4310 |
| 1735324 | sasa | | asc | | CCAA | |
| AD- | usgsaca(Cda)AfuUfUfUfucuccaua | 3773 | VPusUfsuauGfgAfGfaaaaAfuGfugucas | 4042 | ACUGACACAUUUUUCUCCA | 4311 |
| 1735325 | sasa | | gsu | | UAAA | |
| AD- | gsgsaaa(Cda)UfcAfUfUfuuuacaua | 3774 | VPusUfsuauGfuAfAfaaauGfaGfuuuccs | 4043 | CUGGAAACUCAUUUUUACA | 4312 |
| 1735326 | sasa | | asg | | UAAU | |
| AD- | asuscag(Cda)AfaCfUfUfagaaauuc | 3775 | VPusAfsgaaUfuUfCfuaagUfuGfcugaus | 4044 | UUAUCAGCAACUUAGAAAU | 4313 |
| 1735327 | susa | | asa | | UCUG | |
| AD- | csusuau(Ada)UfuUfCfUfcuagagua | 3776 | VPusGfsuacUfcUfAfgagaAfaUfauaags | 4045 | UCCUUAUAUUUCUCUAGAG | 4314 |
| 1735328 | scsa | | gsa | | UACA | |
| AD- | asascuc(Cda)AfaGfAfAfucuuuuau | 3777 | VPusGfsauaAfaAfGfauucUfuGfgaguus | 4046 | AAAACUCCAAGAAUCUUUU | 4315 |
| 1735329 | scsa | | usu | | AUCA | |
| AD- | csusuca(Ada)AfcAfUfUfccugcauu | 3778 | VPusUfsaauGfcAfGfgaauGfuUfugaags | 4047 | GUCUUCAAACAUUCCUGCA | 4316 |
| 1735330 | sasa | | asc | | UUAG | |
| AD- | uscsguu(Cda)UfuCfUfCfcucaacua | 3779 | VPusCfsuagUfuGfAfggagAfaGfaacgas | 4048 | GAUCGUUCUUCUCCUCAAC | 4317 |
| 1735331 | sgsa | | usc | | UAGC | |
| AD- | asasaga(Uda)UfaAfUfCfcucucaca | 3780 | VPusGfsuguGfaGfAfggauUfaAfucuuu | 4049 | CCAAAGAUUAAUCCUCUCA | 4318 |
| 1735332 | scsa | | sgsg | | CACC | |
| AD- | ascsuaa(Cda)CfuCfAfUfcaaagaua | 3781 | VPusGfsuauCfuUfUfgaugAfgGfuuagu | 4050 | AAACUAACCUCAUCAAAGA | 4319 |
| 1735333 | scsa | | susu | | UACA | |
| AD- | csascca(Cda)UfuAfUfUfacuaauaa | 3782 | VPusUfsuuaUfuAfGfuaauAfaGfuggug | 4051 | CCCACCACUUAUUACUAAU | 4320 |
| 1735334 | sasa | | sgsg | | AAAA | |
| AD- | usgsgua(Cda)UfaGfAfAfauauucu | 3783 | VPusAfsaagAfaUfAfuuucUfaGfuaccas | 4052 | GCUGGUACUAGAAAUAUUC | 4321 |
| 1735335 | ususa | | gsc | | UUUU | |
| AD- | gscsugu(Cda)AfuUfUfGfuucacuc | 3784 | VPusUfsagaGfuGfAfacaaAfuGfacagcs | 4053 | UAGCUGUCAUUUGUUCACU | 4322 |
| 1735336 | usasa | | usa | | CUAA | |
| AD- | ascsuca(Ada)CfaAfUfUfuaugaacu | 3785 | VPusUfsaguUfcAfUfaaauUfgUfugagus | 4054 | CCACUCAACAAUUUAUGAA | 4323 |
| 1735337 | sasa | | gsg | | CUAU | |
| AD- | asgsuau(Gda)AfcUfCfAfuuaauaga | 3786 | VPusUfsucuAfuUfAfaugaGfuCfauacus | 4055 | AGAGUAUGACUCAUUAAUA | 4324 |
| 1735338 | sasa | | csu | | GAAA | |
| AD- | csusgcu(Gda)AfuUfUfUfcuuaauaa | 3787 | VPusCfsuuaUfuAfAfgaaaAfuCfagcags | 4056 | UACUGCUGAUUUUCUUAAU | 4325 |
| 1735339 | sgsa | | usa | | AAGC | |
| AD- | usasucu(Uda)UfaGfAfUfccacaucu | 3788 | VPusAfsagaUfgUfGfgaucUfaAfagauas | 4057 | GUUAUCUUUAGAUCCACAU | 4326 |
| 1735340 | susa | | asc | | CUUA | |
| AD- | csgsaga(Cda)AfuUfCfCfuuaucaca | 3789 | VPusUfsuguGfaUfAfaggaAfuGfucucg | 4058 | AUCGAGACAUUCCUUAUCA | 4327 |
| 1735341 | sasa | | sasu | | CAAU | |
| AD- | usascug(Ada)AfuCfAfGfauuaauu | 3790 | VPusGfsaaaUfuAfAfucugAfuUfcaguas | 4059 | GUUACUGAAUCAGAUUAAU | 4328 |
| 1735342 | uscsa | | asc | | UUCU | |
| AD- | csusuac(Uda)UfaAfAfUfccuucacu | 3791 | VPusCfsaguGfaAfGfgauuUfaAfguaags | 4060 | CCCUUACUUAAAUCCUUCA | 4329 |
| 1735343 | sgsa | | gsg | | CUGG | |
| AD- | uscsgaa(Ada)GfaAfUfCfauucaaac | 3792 | VPusAfsguuUfgAfAfugauUfcUfuucga | 4061 | UCUCGAAAGAAUCAUUCAA | 4330 |
| 1735344 | susa | | sgsa | | ACUU | |
| AD- | asasaug(Ada)CfcUfAfUfcacuacuu | 3793 | VPusUfsaagUfaGfUfgauaGfgUfcauuus | 4062 | AGAAAUGACCUAUCACUAC | 4331 |
| 1735345 | sasa | | csu | | UUAU | |
| AD- | csasagu(Cda)AfuUfUfCfcucucuac | 3794 | VPusCfsguaGfaGfAfggaaAfuGfacuugs | 4063 | CACAAGUCAUUUCCUCUCU | 4332 |
| 1735346 | sgsa | | usg | | ACGG | |
| AD- | asusgca(Gda)UfuUfCfUfuacuuauc | 3795 | VPusAfsgauAfaGfUfaagaAfaCfugcaus | 4064 | GCAUGCAGUUUCUUACUUA | 4333 |
| 1735347 | susa | | gsc | | UCUA | |
| AD- | uscsaau(Gda)CfaAfUfAfcacuguuc | 3796 | VPusUfsgaaCfaGfUfguauUfgCfauugas | 4065 | GCUCAAUGCAAUACACUGU | 4334 |
| 1735348 | sasa | | gsc | | UCAG | |
| AD- | uscsuau(Gda)UfaCfCfUfacugacac | 3797 | VPusUfsgugUfcAfGfuaggUfaCfauagas | 4066 | UAUCUAUGUACCUACUGAC | 4335 |
| 1735349 | sasa | | usa | | ACAU | |
| AD- | usgsaau(Uda)CfcAfGfUfcuuaucuu | 3798 | VPusUfsaagAfuAfAfgacuGfgAfauucas | 4067 | UUUGAAUUCCAGUCUUAUC | 4336 |
| 1735350 | sasa | | asa | | UUAU | |
| AD- | ususgcu(Gda)UfaAfUfAfccaaaacu | 3799 | VPusUfsaguUfuUfGfguauUfaCfagcaas | 4068 | AUUUGCUGUAAUACCAAAA | 4337 |
| 1735351 | sasa | | asu | | CUAA | |
| AD- | gsgsauc(Ada)CfuUfCfUfuucaaauc | 3800 | VPusUfsgauUfuGfAfaagaAfgUfgauccs | 4069 | UUGGAUCACUUCUUUCAAA | 4338 |
| 1735352 | sasa | | asa | | UCAG | |
| AD- | gsasacu(Ada)GfaAfAfAfcuauucuu | 3801 | VPusUfsaagAfaUfAfguuuUfcUfaguucs | 4070 | AGGAACUAGAAAACUAUUC | 4339 |
| 1735353 | sasa | | csu | | UUAA | |
| AD- | ascsauu(Uda)CfcAfUfAfcugucugu | 3802 | VPusAfsacaGfaCfAfguauGfgAfaaugus | 4071 | UCACAUUUCCAUACUGUCU | 4340 |
| 1735354 | susa | | gsa | | GUUA | |
| AD- | usgsauc(Cda)UfuCfAfCfagugucaa | 3803 | VPusAfsuugAfcAfCfugugAfaGfgaucas | 4072 | UUUGAUCCUUCACAGUGUC | 4341 |
| 1735355 | susa | | asa | | AAUA | |
| AD- | gsasuuu(Cda)UfgAfGfAfacaaguaa | 3804 | VPusUfsuuaCfuUfGfuucuCfaGfaaaucs | 4073 | CUGAUUUCUGAGAACAAGU | 4342 |
| 1735356 | sasa | | asg | | AAAG | |
| AD- | cscsuac(Uda)UfgUfGfAfaauacauu | 3805 | VPusAfsaauGfuAfUfuucaCfaAfguaggs | 4074 | ACCCUACUUGUGAAAUACA | 4343 |
| 1735357 | susa | | gsu | | UUUG | |
| AD- | csasacu(Gda)GfaAfUfUfuuccaauu | 3806 | VPusAfsaauUfgGfAfaaauUfcCfaguugs | 4075 | AGCAACUGGAAUUUUCCAA | 4344 |
| 1735358 | susa | | csu | | UUUU | |
| AD- | uscsuaa(Uda)CfcUfGfAfugagaguu | 3807 | VPusUfsaacUfcUfCfaucaGfgAfuuagas | 4076 | GCUCUAAUCCUGAUGAGAG | 4345 |
| 1735359 | sasa | | gsc | | UUAU | |
| AD- | asgsccu(Cda)AfuUfAfUfcaaaauuc | 3808 | VPusAfsgaaUfuUfUfgauaAfuGfaggcus | 4077 | UAAGCCUCAUUAUCAAAAU | 4346 |
| 1735360 | susa | | usa | | UCUG | |
| AD- | asasuuu(Cda)UfgAfUfGfcuuuuua | 3809 | VPusAfsguaAfaAfAfgcauCfaGfaaauus | 4078 | UCAAUUUCUGAUGCUUUUU | 4347 |
| 1735361 | csusa | | gsa | | ACUA | |
| AD- | usascca(Uda)UfaGfAfUfgaaaucuu | 3810 | VPusUfsaagAfuUfUfcaucUfaAfugguas | 4079 | UGUACCAUUAGAUGAAAUC | 4348 |
| 1735362 | sasa | | csa | | UUAC | |
| AD- | csusgug(Ada)AfuUfCfUfuccaacca | 3811 | VPusAfsuggUfuGfGfaagaAfuUfcacags | 4080 | UCCUGUGAAUUCUUCCAAC | 4349 |
| 1735363 | susa | | gsa | | CAUG | |
| AD- | csusaau(Ada)CfuCfCfAfgauuuuua | 3812 | VPusAfsuaaAfaAfUfcuggAfgUfauuags | 4081 | ACCUAAUACUCCAGAUUUU | 4350 |
| 1735364 | susa | | gsu | | UAUC | |
| AD- | gsgsaca(Cda)AfuAfCfAfuugaauaa | 3813 | VPusUfsuuaUfuCfAfauguAfuGfugucc | 4082 | AAGGACACAUACAUUGAAU | 4351 |
| 1735365 | sasa | | susu | | AAAU | |
| AD- | ususugu(Cda)AfuAfAfUfgcugcuu | 3814 | VPusCfsaaaGfcAfGfcauuAfuGfacaaas | 4083 | ACUUUGUCAUAAUGCUGCU | 4352 |
| 1735366 | usgsa | | gsu | | UUGC | |
| AD- | ususcau(Cda)UfuUfCfUfguuaauu | 3815 | VPusGfsaaaUfuAfAfcagaAfaGfaugaas | 4084 | UGUUCAUCUUUCUGUUAAU | 4353 |
| 1735367 | uscsa | | csa | | UUCC | |
| AD- | csasgug(Ada)AfaCfCfAfuuaauuuu | 3816 | VPusGfsaaaAfuUfAfauggUfuUfcacugs | 4085 | CACAGUGAAACCAUUAAUU | 4354 |
| 1735368 | scsa | | usg | | UUCC | |
| AD- | usasacu(Gda)CfaAfGfAfcugauuuc | 3817 | VPusAfsgaaAfuCfAfgucuUfgCfaguuas | 4086 | CCUAACUGCAAGACUGAUU | 4355 |
| 1735369 | susa | | gsg | | UCUG | |
| AD- | asgsaau(Uda)CfcUfCfCfuuaccuca | 3818 | VPusUfsugaGfgUfAfaggaGfgAfauucu | 4087 | GGAGAAUUCCUCCUUACCU | 4356 |
| 1735370 | sasa | | scsc | | CAAG | |
| AD- | usasuua(Cda)AfgAfUfCfuuacuuu | 3819 | VPusAfscaaAfgUfAfagauCfuGfuaauas | 4088 | CAUAUUACAGAUCUUACUU | 4357 |
| 1735371 | gsusa | | usg | | UGUU | |
| AD- | ususauc(Uda)GfaAfAfGfauaucaau | 3820 | VPusAfsauuGfaUfAfucuuUfcAfgauaas | 4089 | GCUUAUCUGAAAGAUAUCA | 4358 |
| 1735372 | susa | | gsc | | AUUU | |
| AD- | asgsauc(Uda)GfuUfCfUfggaaaauc | 3821 | VPusUfsgauUfuUfCfcagaAfcAfgaucus | 4090 | ACAGAUCUGUUCUGGAAAA | 4359 |
| 1735373 | sasa | | gsu | | UCAU | |
| AD- | cscscag(Ada)AfuAfCfAfacuuccuu | 3822 | VPusGfsaagGfaAfGfuuguAfuUfcuggg | 4091 | CGCCCAGAAUACAACUUCC | 4360 |
| 1735374 | scsa | | scsg | | UUCU | |
| AD- | gsusuga(Uda)CfuUfUfCfagugcuaa | 3823 | VPusUfsuuaGfcAfCfugaaAfgAfucaacs | 4092 | GAGUUGAUCUUUCAGUGCU | 4361 |
| 1735375 | sasa | | usc | | AAAU | |
| AD- | csusaag(Cda)UfuUfAfUfuuauuaga | 3824 | VPusGfsucuAfaUfAfaauaAfaGfcuuags | 4093 | CACUAAGCUUUAUUUAUUA | 4362 |
| 1735376 | scsa | | usg | | GACG | |
| AD- | asgscuu(Gda)GfaAfUfCfuauaucuu | 3825 | VPusAfsaagAfuAfUfagauUfcCfaagcus | 4094 | UCAGCUUGGAAUCUAUAUC | 4363 |
| 1735377 | susa | | gsa | | UUUC | |
| AD- | ususauu(Ada)UfuUfCfUfgaagccua | 3826 | VPusUfsuagGfcUfUfcagaAfaUfaauaas | 4095 | ACUUAUUAUUUCUGAAGCC | 4364 |
| 1735378 | sasa | | gsu | | UAAC | |
| AD- | cscsuuu(Gda)UfuGfUfAfuuuaacaa | 3827 | VPusUfsuugUfuAfAfauacAfaCfaaaggs | 4096 | GACCUUUGUUGUAUUUAAC | 4365 |
| 1735379 | sasa | | usc | | AAAA | |
| AD- | gscsucu(Cda)UfaAfCfUfaaucgauc | 3828 | VPusUfsgauCfgAfUfuaguUfaGfagagcs | 4097 | UGGCUCUCUAACUAAUCGA | 4366 |
| 1735380 | sasa | | csa | | UCAC | |
| AD- | asasaga(Cda)UfaCfAfUfgacagaaa | 3829 | VPusAfsuuuCfuGfUfcaugUfaGfucuuu | 4098 | CUAAAGACUACAUGACAGA | 4367 |
| 1735381 | susa | | sasg | | AAUG | |
| AD- | csasgga(Uda)UfcGfUfAfuuuuuaaa | 3830 | VPusCfsuuuAfaAfAfauacGfaAfuccugs | 4099 | CUCAGGAUUCGUAUUUUUA | 4368 |
| 1735382 | sgsa | | asg | | AAGA | |
| AD- | cscsuug(Cda)UfaAfGfUfaauugaca | 3831 | VPusAfsuguCfaAfUfuacuUfaGfcaaggs | 4100 | ACCCUUGCUAAGUAAUUGA | 4369 |
| 1735383 | susa | | gsu | | CAUA | |
| AD- | cscsuau(Gda)CfaCfUfUfucacagga | 3832 | VPusUfsuccUfgUfGfaaagUfgCfauaggs | 4101 | CUCCUAUGCACUUUCACAG | 4370 |
| 1735384 | sasa | | asg | | GAAC | |
| AD- | asusgcu(Gda)AfaAfUfAfuguuuca | 3833 | VPusGfsuugAfaAfCfauauUfuCfagcaus | 4102 | AAAUGCUGAAAUAUGUUUC | 4371 |
| 1735385 | ascsa | | usu | | AACA | |
| AD- | cscsuuu(Uda)AfaUfUfCfaaaucuac | 3834 | VPusAfsguaGfaUfUfugaaUfuAfaaaggs | 4103 | GGCCUUUUAAUUCAAAUCU | 4372 |
| 1735386 | susa | | csc | | ACUG | |
| AD- | ascsugg(Ada)CfuUfAfUfuggauuu | 3835 | VPusUfsuaaAfuCfCfaauaAfgUfccagus | 4104 | AUACUGGACUUAUUGGAUU | 4373 |
| 1735387 | asasa | | asu | | UAAU | |
| AD- | csasucu(Gda)AfaUfCfAfgaugguac | 3836 | VPusUfsguaCfcAfUfcugaUfuCfagaugs | 4105 | AACAUCUGAAUCAGAUGGU | 4374 |
| 1735388 | sasa | | usu | | ACAG | |
| AD- | asasuuc(Uda)GfaUfAfGfcaaucugu | 3837 | VPusCfsacaGfaUfUfgcuaUfcAfgaauus | 4106 | GAAAUUCUGAUAGCAAUCU | 4375 |
| 1735389 | sgsa | | usc | | GUGU | |
| AD- | uscsaag(Uda)CfaAfGfGfaugcuauc | 3838 | VPusAfsgauAfgCfAfuccuUfgAfcuugas | 4107 | UUUCAAGUCAAGGAUGCUA | 4376 |
| 1735390 | susa | | asa | | UCUA | |
| AD- | uscsacu(Gda)AfaAfAfCfcacaagau | 3839 | VPusUfsaucUfuGfUfgguuUfuCfaguga | 4108 | CCUCACUGAAAACCACAAG | 4377 |
| 1735391 | sasa | | sgsg | | AUAU | |
| AD- | ascscug(Uda)UfgAfAfCfagucuuca | 3840 | VPusUfsugaAfgAfCfuguuCfaAfcaggus | 4109 | CUACCUGUUGAACAGUCUU | 4378 |
| 1735392 | sasa | | asg | | CAAG | |
| AD- | uscsaag(Uda)GfaCfAfUfauuucagu | 3841 | VPusAfsacuGfaAfAfuaugUfcAfcuugas | 4110 | ACUCAAGUGACAUAUUUCA | 4379 |
| 1735393 | susa | | gsu | | GUUA | |
| AD- | uscsagg(Ada)AfcUfUfCfaggauugc | 3842 | VPusAfsgcaAfuCfCfugaaGfuUfccugas | 4111 | GCUCAGGAACUUCAGGAUU | 4380 |
| 1735394 | susa | | gsc | | GCUA | |
| AD- | ascsgga(Gda)UfaUfUfAfguagcuua | 3843 | VPusUfsuaaGfcUfAfcuaaUfaCfuccgus | 4112 | CUACGGAGUAUUAGUAGCU | 4381 |
| 1735395 | sasa | | asg | | UAAU | |
| AD- | asusugu(Cda)AfaUfGfAfauuuuau | 3844 | VPusUfscauAfaAfAfuucaUfuGfacaaus | 4113 | GCAUUGUCAAUGAAUUUUA | 4382 |
| 1735396 | gsasa | | gsc | | UGAG | |
| AD- | gsasaca(Gda)CfaAfAfCfaaauauug | 3845 | VPusUfscaaUfaUfUfuguuUfgCfuguucs | 4114 | GUGAACAGCAAACAAAUAU | 4383 |
| 1735397 | sasa | | asc | | UGAA | |
| AD- | usgsaac(Uda)AfuUfUfUfcgugcau | 3846 | VPusUfsaauGfcAfCfgaaaAfuAfguucas | 4115 | UAUGAACUAUUUUCGUGCA | 4384 |
| 1735398 | usasa | | usa | | UUAG | |
| AD- | ascsugg(Ada)AfuAfCfUfuauuuuu | 3847 | VPusUfsgaaAfaAfUfaaguAfuUfccagus | 4116 | GAACUGGAAUACUUAUUUU | 4385 |
| 1735399 | csasa | | usc | | UCAU | |
| AD- | ususauc(Uda)UfgCfAfGfagaucucu | 3848 | VPusCfsagaGfaUfCfucugCfaAfgauaas | 4117 | CGUUAUCUUGCAGAGAUCU | 4386 |
| 1735400 | sgsa | | csg | | CUGG | |
| AD- | gsasagu(Gda)UfuAfGfAfauuuuug | 3849 | VPusAfsucaAfaAfAfuucuAfaCfacuucs | 4118 | UGGAAGUGUUAGAAUUUU | 4387 |
| 1735401 | asusa | | csa | | UGAUC | |
| AD- | uscsaau(Uda)UfaAfGfAfucucugga | 3850 | VPusUfsuccAfgAfGfaucuUfaAfauugas | 4119 | UAUCAAUUUAAGAUCUCUG | 4388 |
| 1735402 | sasa | | usa | | GAAG | |
| AD- | usgsgac(Cda)AfuAfUfUfuacaaugu | 3851 | VPusAfsacaUfuGfUfaaauAfuGfguccas | 4120 | AAUGGACCAUAUUUACAAU | 4389 |
| 1735403 | susa | | usu | | GUUU | |
| AD- | usasguc(Ada)UfuGfAfAfgcaauccu | 3852 | VPusAfsaggAfuUfGfcuucAfaUfgacuas | 4121 | UUUAGUCAUUGAAGCAAUC | 4390 |
| 1735404 | susa | | asa | | CUUG | |
| AD- | asgscug(Uda)UfuAfGfGfuuuaacaa | 3853 | VPusAfsuugUfuAfAfaccuAfaAfcagcus | 4122 | AAAGCUGUUUAGGUUUAAC | 4391 |
| 1735405 | susa | | usu | | AAUG | |
| AD- | csasagg(Cda)AfaAfUfGfauguaaau | 3854 | VPusUfsauuUfaCfAfucauUfuGfccuugs | 4123 | GCCAAGGCAAAUGAUGUAA | 4392 |
| 1735406 | sasa | | gsc | | AUAG | |
| AD- | asuscca(Ada)UfuAfCfUfacuggaaa | 3855 | VPusGfsuuuCfcAfGfuaguAfaUfuggau | 4124 | AAAUCCAAUUACUACUGGA | 4393 |
| 1735407 | scsa | | susu | | AACU | |
| AD- | ascsuua(Cda)AfaUfAfUfauauaucc | 3856 | VPusAfsggaUfaUfAfuauaUfuGfuaagus | 4125 | GCACUUACAAUAUAUAUAU | 4394 |
| 1735408 | susa | | gsc | | CCUG | |
| AD- | asusgca(Gda)UfuUfGfGfuaucugac | 3857 | VPusUfsgucAfgAfUfaccaAfaCfugcaus | 4126 | ACAUGCAGUUUGGUAUCUG | 4395 |
| 1735409 | sasa | | gsu | | ACAA | |
| AD- | cscsuua(Uda)UfuCfAfAfgacacugg | 3858 | VPusAfsccaGfuGfUfcuugAfaAfuaaggs | 4127 | UACCUUAUUUCAAGACACU | 4396 |
| 1735410 | susa | | usa | | GGUU | |
| AD- | gsasagg(Gda)AfuUfUfAfuucuuua | 3859 | VPusAfscuaAfaGfAfauaaAfuCfccuucs | 4128 | AUGAAGGGAUUUAUUCUUU | 4397 |
| 1735411 | gsusa | | asu | | AGUC | |
| AD- | asusccu(Uda)GfcUfAfCfggaucuua | 3860 | VPusUfsuaaGfaUfCfcguaGfcAfaggaus | 4129 | CAAUCCUUGCUACGGAUCU | 4398 |
| 1735412 | sasa | | usg | | UAAA | |
| AD- | ascsuga(Cda)UfaUfCfCfcgaagcaa | 3861 | VPusUfsuugCfuUfCfgggaUfaGfucagus | 4130 | CUACUGACUAUCCCGAAGC | 4399 |
| 1735413 | sasa | | asg | | AAAG | |
| AD- | usgsuau(Uda)UfcUfGfCfuauuauu | 3862 | VPusGfsaaaUfaAfUfagcaGfaAfauacas | 4131 | AGUGUAUUUCUGCUAUUAU | 4400 |
| 1735414 | uscsa | | csu | | UUCC | |
| AD- | usgsuaa(Cda)AfaUfAfAfcuagccua | 3863 | VPusUfsuagGfcUfAfguuaUfuGfuuacas | 4132 | UAUGUAACAAUAACUAGCC | 4401 |
| 1735415 | sasa | | usa | | UAAA | |
| AD- | gsusugu(Uda)UfuUfAfCfucuagcu | 3864 | VPusUfsgagCfuAfGfaguaAfaAfacaacs | 4133 | UUGUUGUUUUUACUCUAGC | 4402 |
| 1735416 | csasa | | asa | | UCAG | |
| AD- | csasggc(Ada)GfuUfUfUfauacaaug | 3865 | VPusUfscauUfgUfAfuaaaAfcUfgccugs | 4134 | CUCAGGCAGUUUUAUACAA | 4403 |
| 1735417 | sasa | | asg | | UGAC | |
| AD- | asgsgau(Uda)CfuCfAfGfucagguua | 3866 | VPusAfsuaaCfcUfGfacugAfgAfauccus | 4135 | GAAGGAUUCUCAGUCAGGU | 4404 |
| 1735418 | susa | | usc | | UAUG | |
| AD- | asusuuu(Cda)CfaUfCfAfuguuuaag | 3867 | VPusAfscuuAfaAfCfaugaUfgGfaaaaus | 4136 | ACAUUUUCCAUCAUGUUUA | 4405 |
| 1735419 | susa | | gsu | | AGUG | |
| AD- | usgscca(Cda)UfuUfUfGfuuaccauu | 3868 | VPusCfsaauGfgUfAfacaaAfaGfuggcas | 4137 | GCUGCCACUUUUGUUACCA | 4406 |
| 1735420 | sgsa | | gsc | | UUGU | |
| AD- | ascsuug(Cda)UfaGfUfGfuguggau | 3869 | VPusAfsuauCfcAfCfacacUfaGfcaagus | 4138 | AAACUUGCUAGUGUGUGGA | 4407 |
| 1735421 | asusa | | usu | | UAUG | |
| AD- | asasucu(Uda)AfcUfUfGfagaaauug | 3870 | VPusGfscaaUfuUfCfucaaGfuAfagauus | 4139 | GAAAUCUUACUUGAGAAAU | 4408 |
| 1735422 | scsa | | usc | | UGCC | |
| AD- | asgsuuc(Gda)AfgAfCfUfugcauuu | 3871 | VPusUfscaaAfuGfCfaaguCfuCfgaacus | 4140 | AAAGUUCGAGACUUGCAUU | 4409 |
| 1735423 | gsasa | | usu | | UGAA | |
| AD- | cscsaua(Gda)AfaUfUfUfccugauac | 3872 | VPusAfsguaUfcAfGfgaaaUfuCfuauggs | 4141 | ACCCAUAGAAUUUCCUGAU | 4410 |
| 1735424 | susa | | gsu | | ACUG | |
| AD- | asgsgua(Ada)UfuCfCfUfuuagaaua | 3873 | VPusAfsuauUfcUfAfaaggAfaUfuaccus | 4142 | CAAGGUAAUUCCUUUAGAA | 4411 |
| 1735425 | susa | | usg | | UAUG | |
| AD- | csusuau(Gda)GfaAfAfCfucaacaag | 3874 | VPusUfscuuGfuUfGfaguuUfcCfauaags | 4143 | AACUUAUGGAAACUCAACA | 4412 |
| 1735426 | sasa | | usu | | AGAA | |
| AD- | asasgca(Gda)CfaUfUfUfuaaauuac | 3875 | VPusCfsguaAfuUfUfaaaaUfgCfugcuus | 4144 | AAAAGCAGCAUUUUAAAUU | 4413 |
| 1735427 | sgsa | | usu | | ACGA | |
| AD- | usgsacu(Cda)UfcAfAfCfugaccauu | 3876 | VPusGfsaauGfgUfCfaguuGfaGfagucas | 4145 | GCUGACUCUCAACUGACCA | 4414 |
| 1735428 | scsa | | gsc | | UUCC | |
| AD- | asgsguu(Uda)AfuCfCfAfugaaggac | 3877 | VPusAfsgucCfuUfCfauggAfuAfaaccus | 4146 | CUAGGUUUAUCCAUGAAGG | 4415 |
| 1735429 | susa | | asg | | ACUG | |
| AD- | ascscaa(Gda)AfaUfUfUfggcauuuc | 3878 | VPusUfsgaaAfuGfCfcaaaUfuCfuuggus | 4147 | UCACCAAGAAUUUGGCAUU | 4416 |
| 1735430 | sasa | | gsa | | UCAA | |
| AD- | usasucu(Ada)GfaAfUfAfuuuggcu | 3879 | VPusUfsaagCfcAfAfauauUfcUfagauas | 4148 | CUUAUCUAGAAUAUUUGGC | 4417 |
| 1735431 | usasa | | asg | | UUAU | |
| AD- | csusccu(Gda)CfaGfAfAfuacauaca | 3880 | VPusUfsuguAfuGfUfauucUfgCfaggag | 4149 | CUCUCCUGCAGAAUACAUA | 4418 |
| 1735432 | sasa | | sasg | | CAAG | |
| AD- | uscsaca(Cda)CfaUfUfUfccuggauu | 3881 | VPusAfsaauCfcAfGfgaaaUfgGfugugas | 4150 | UCUCACACCAUUUCCUGGA | 4419 |
| 1735433 | susa | | gsa | | UUUU | |
| AD- | asusgug(Gda)AfaUfUfCfaagcgcuu | 3882 | VPusAfsaagCfgCfUfugaaUfuCfcacaus | 4151 | UCAUGUGGAAUUCAAGCGC | 4420 |
| 1735434 | susa | | gsa | | UUUC | |
| AD- | asusugu(Gda)UfaUfUfAfucuacua | 3883 | VPusCfsauaGfuAfGfauaaUfaCfacaaus | 4152 | CUAUUGUGUAUUAUCUACU | 4421 |
| 1735435 | usgsa | | asg | | AUGU | |
| AD- | asasugg(Ada)GfuAfAfUfgaaaauga | 3884 | VPusAfsucaUfuUfUfcauuAfcUfccauus | 4153 | AGAAUGGAGUAAUGAAAA | 4422 |
| 1735436 | susa | | csu | | UGAUC | |
| AD- | ascsugg(Uda)UfuAfUfUfggaaaua | 3885 | VPusAfsauaUfuUfCfcaauAfaAfccagus | 4154 | ACACUGGUUUAUUGGAAAU | 4423 |
| 1735437 | ususa | | gsu | | AUUU | |
| AD- | csasagu(Gda)UfaUfGfUfguauaaag | 3886 | VPusAfscuuUfaUfAfcacaUfaCfacuugs | 4155 | UACAAGUGUAUGUGUAUAA | 4424 |
| 1735438 | susa | | usa | | AGUC | |
| AD- | usascaa(Gda)CfaUfGfCfauauugag | 3887 | VPusUfscucAfaUfAfugcaUfgCfuuguas | 4156 | UGUACAAGCAUGCAUAUUG | 4425 |
| 1735439 | sasa | | csa | | AGAU | |
| AD- | usgsugu(Cda)UfuUfUfAfugucuuu | 3888 | VPusUfscaaAfgAfCfauaaAfaGfacacas | 4157 | AGUGUGUCUUUUAUGUCUU | 4426 |
| 1735440 | gsasa | | csu | | UGAA | |
| AD- | asusuuu(Cda)UfcGfCfAfgaauucaa | 3889 | VPusAfsuugAfaUfUfcugcGfaGfaaaaus | 4158 | UGAUUUUCUCGCAGAAUUC | 4427 |
| 1735441 | susa | | csa | | AAUG | |
| AD- | usasgcg(Ada)CfaGfUfUfugaguaaa | 3890 | VPusUfsuuuAfcUfCfaaacUfgUfcgcuas | 4159 | AAUAGCGACAGUUUGAGUA | 4428 |
| 1735442 | sasa | | usu | | AAAG | |
| AD- | csusggu(Gda)UfaUfGfAfauacuuu | 3891 | VPusAfscaaAfgUfAfuucaUfaCfaccags | 4160 | CACUGGUGUAUGAAUACUU | 4429 |
| 1735443 | gsusa | | usg | | UGUC | |
| AD- | gsusgau(Ada)AfgUfGfGfcuaacaga | 3892 | VPusUfsucuGfuUfAfgccaCfuUfaucacs | 4161 | AGGUGAUAAGUGGCUAACA | 4430 |
| 1735444 | sasa | | csu | | GAAG | |
| AD- | gsusagg(Cda)UfaAfUfAfuuuucua | 3893 | VPusAfsauaGfaAfAfauauUfaGfccuacs | 4162 | UGGUAGGCUAAUAUUUUCU | 4431 |
| 1735445 | ususa | | csa | | AUUA | |
| AD- | cscsucu(Uda)CfaUfCfCfucgacugu | 3894 | VPusGfsacaGfuCfGfaggaUfgAfagaggs | 4163 | CGCCUCUUCAUCCUCGACU | 4432 |
| 1735446 | scsa | | csg | | GUCC | |
| AD- | asasuug(Cda)CfaUfAfAfgccauauu | 3895 | VPusUfsaauAfuGfGfcuuaUfgGfcaauus | 4164 | GAAAUUGCCAUAAGCCAUA | 4433 |
| 1735447 | sasa | | usc | | UUAC | |
| AD- | gscsgaa(Uda)AfuUfUfUfgucagcua | 3896 | VPusUfsuagCfuGfAfcaaaAfuAfuucgcs | 4165 | CGGCGAAUAUUUUGUCAGC | 4434 |
| 1735448 | sasa | | csg | | UAAU | |
| AD- | asuscca(Gda)UfgUfUfGfccuuucug | 3897 | VPusUfscagAfaAfGfgcaaCfaCfuggaus | 4166 | GAAUCCAGUGUUGCCUUUC | 4435 |
| 1735449 | sasa | | usc | | UGAG | |
| AD- | asasagu(Cda)UfaUfGfCfcugucuaa | 3898 | VPusUfsuuaGfaCfAfggcaUfaGfacuuus | 4167 | GAAAAGUCUAUGCCUGUCU | 4436 |
| 1735450 | sasa | | usc | | AAAA | |
| AD- | gsgsaca(Uda)CfaGfAfAfguuugaau | 3899 | VPusAfsauuCfaAfAfcuucUfgAfuguccs | 4168 | AUGGACAUCAGAAGUUUGA | 4437 |
| 1735451 | susa | | asu | | AUUC | |
| AD- | gsgscga(Ada)UfuGfCfUfuauauuu | 3900 | VPusAfsgaaAfuAfUfaagcAfaUfucgccs | 4169 | UGGGCGAAUUGCUUAUAUU | 4438 |
| 1735452 | csusa | | csa | | UCUU | |
| AD- | csascac(Uda)AfuGfUfGfuaaaccag | 3901 | VPusAfscugGfuUfUfacacAfuAfgugug | 4170 | CACACACUAUGUGUAAACC | 4439 |
| 1735453 | susa | | susg | | AGUC | |
| AD- | csasggu(Gda)AfaGfAfAfgaaaacau | 3902 | VPusAfsaugUfuUfUfcuucUfuCfaccugs | 4171 | AUCAGGUGAAGAAGAAAAC | 4440 |
| 1735454 | susa | | asu | | AUUU | |
| AD- | gsusgag(Cda)UfcUfUfAfuuuuuca | 3903 | VPusAfsgugAfaAfAfauaaGfaGfcucacs | 4172 | UAGUGAGCUCUUAUUUUUC | 4441 |
| 1735455 | csusa | | usa | | ACUG | |
| AD- | asasagc(Uda)GfaUfGfGfgaauaaac | 3904 | VPusAfsguuUfaUfUfcccaUfcAfgcuuus | 4173 | GUAAAGCUGAUGGGAAUAA | 4442 |
| 1735456 | susa | | asc | | ACUG | |
| AD- | gsusguc(Gda)UfuAfGfGfagaaacu | 3905 | VPusGfscagUfuUfCfuccuAfaCfgacacs | 4174 | GCGUGUCGUUAGGAGAAAC | 4443 |
| 1735457 | gscsa | | gsc | | UGCA | |
| AD- | gsgsgac(Uda)UfaAfAfAfcaauggua | 3906 | VPusAfsuacCfaUfUfguuuUfaAfgucccs | 4175 | UUGGGACUUAAAACAAUGG | 4444 |
| 1735458 | susa | | asa | | UAUA | |
| AD- | csusgau(Gda)GfuAfGfAfauuaacca | 3907 | VPusAfsuggUfuAfAfuucuAfcCfaucags | 4176 | UUCUGAUGGUAGAAUUAAC | 4445 |
| 1735459 | susa | | asa | | CAUG | |
| AD- | ascsuau(Gda)UfgUfGfUfuuuauuu | 3908 | VPusAfsgaaAfuAfAfaacaCfaCfauagus | 4177 | CUACUAUGUGUGUUUUAUU | 4446 |
| 1735460 | csusa | | asg | | UCUG | |
| AD- | csusgau(Ada)AfuUfUfAfuauuugc | 3909 | VPusGfsugcAfaAfUfauaaAfuUfaucags | 4178 | GACUGAUAAUUUAUAUUUG | 4447 |
| 1735461 | ascsa | | usc | | CACU | |
| AD- | gsusccu(Uda)AfaAfUfUfauuuaacc | 3910 | VPusGfsgguUfaAfAfuaauUfuAfaggacs | 4179 | UAGUCCUUAAAUUAUUUAA | 4448 |
| 1735462 | scsa | | usa | | CCCU | |
| AD- | csgscaa(Uda)AfuGfGfUfgucagauc | 3911 | VPusAfsgauCfuGfAfcaccAfuAfuugcgs | 4180 | CUCGCAAUAUGGUGUCAGA | 4449 |
| 1735463 | susa | | asg | | UCUU | |
| AD- | ususcga(Ada)GfaGfCfUfgcucuaau | 3912 | VPusGfsauuAfgAfGfcagcUfcUfucgaas | 4181 | UCUUCGAAGAGCUGCUCUA | 4450 |
| 1735464 | scsa | | gsa | | AUCC | |
| AD- | ususucu(Gda)CfuGfAfGfaguauuc | 3913 | VPusCfsugaAfuAfCfucucAfgCfagaaas | 4182 | UAUUUCUGCUGAGAGUAUU | 4451 |
| 1735465 | asgsa | | usa | | CAGG | |
| AD- | ususgaa(Cda)AfgGfAfAfguaucacu | 3914 | VPusCfsaguGfaUfAfcuucCfuGfuucaas | 4183 | UAUUGAACAGGAAGUAUCA | 4452 |
| 1735466 | sgsa | | usa | | CUGG | |
| AD- | usgsccu(Uda)GfuAfUfUfuccagaga | 3915 | VPusUfsucuCfuGfGfaaauAfcAfaggcas | 4184 | GUUGCCUUGUAUUUCCAGA | 4453 |
| 1735467 | sasa | | asc | | GAAC | |
| AD- | gsusuac(Uda)AfuGfGfCfaguugcaa | 3916 | VPusUfsuugCfaAfCfugccAfuAfguaacs | 4185 | CAGUUACUAUGGCAGUUGC | 4454 |
| 1735468 | sasa | | usg | | AAAA | |
| AD- | asusggc(Uda)GfaAfUfUfuuaaagcu | 3917 | VPusCfsagcUfuUfAfaaauUfcAfgccaus | 4186 | CCAUGGCUGAAUUUUAAAG | 4455 |
| 1735469 | sgsa | | gsg | | CUGU | |
| AD- | gsuscca(Uda)UfcAfUfGfgaucguuc | 3918 | VPusAfsgaaCfgAfUfccauGfaAfuggacs | 4187 | CAGUCCAUUCAUGGAUCGU | 4456 |
| 1735470 | susa | | usg | | UCUU | |
| AD- | usgsugu(Ada)AfcUfCfCfuaugaug | 3919 | VPusAfsgcaUfcAfUfaggaGfuUfacacas | 4188 | CCUGUGUAACUCCUAUGAU | 4457 |
| 1735471 | csusa | | gsg | | GCUG | |
| AD- | usgsgca(Gda)UfuUfCfCfcacuccua | 3920 | VPusAfsuagGfaGfUfgggaAfaCfugccas | 4189 | GCUGGCAGUUUCCCACUCC | 4458 |
| 1735472 | susa | | gsc | | UAUG | |
| AD- | cscsuca(Ada)GfcAfGfAfugagauuc | 3921 | VPusUfsgaaUfcUfCfaucuGfcUfugaggs | 4190 | UACCUCAAGCAGAUGAGAU | 4459 |
| 1735473 | sasa | | usa | | UCAG | |
| AD- | asusguu(Gda)UfuUfUfCfucaaaagc | 3922 | VPusUfsgcuUfuUfGfagaaAfaCfaacaus | 4191 | UUAUGUUGUUUUCUCAAAA | 4460 |
| 1735474 | sasa | | asa | | GCAG | |
| AD- | gsasggg(Ada)UfuUfCfUfgcucaau | 3923 | VPusGfscauUfgAfGfcagaAfaUfcccucs | 4192 | CUGAGGGAUUUCUGCUCAA | 4461 |
| 1735475 | gscsa | | asg | | UGCA | |
| AD- | gscscuu(Cda)UfuCfUfUfccucaccu | 3924 | VPusCfsaggUfgAfGfgaagAfaGfaaggcs | 4193 | GUGCCUUCUUCUUCCUCAC | 4462 |
| 1735476 | sgsa | | asc | | CUGC | |
| AD- | ususgag(Ada)UfuGfAfAfucacauu | 3925 | VPusGfsaaaUfgUfGfauucAfaUfcucaas | 4194 | UAUUGAGAUUGAAUCACAU | 4463 |
| 1735477 | uscsa | | usa | | UUCC | |
| AD- | csusguu(Cda)AfgUfGfCfuauucucc | 3926 | VPusGfsggaGfaAfUfagcaCfuGfaacags | 4195 | CACUGUUCAGUGCUAUUCU | 4464 |
| 1735478 | scsa | | usg | | CCCA | |
| AD- | cscsugg(Cda)UfuAfCfAfgcagaucc | 3927 | VPusUfsggaUfcUfGfcuguAfaGfccaggs | 4196 | UUCCUGGCUUACAGCAGAU | 4465 |
| 1735479 | sasa | | asa | | CCAC | |
| AD- | gsascag(Cda)AfgAfAfAfauuauuuc | 3928 | VPusUfsgaaAfuAfAfuuuuCfuGfcuguc | 4197 | AAGACAGCAGAAAAUUAUU | 4466 |
| 1735480 | sasa | | susu | | UCAG | |
| AD- | ususggg(Uda)UfuCfUfUfuaguuua | 3929 | VPusCfsauaAfaCfUfaaagAfaAfcccaas | 4198 | UAUUGGGUUUCUUUAGUUU | 4467 |
| 1735481 | usgsa | | usa | | AUGU | |
| AD- | csascca(Uda)GfuAfGfGfucucagaa | 3930 | VPusCfsuucUfgAfGfaccuAfcAfuggugs | 4199 | CUCACCAUGUAGGUCUCAG | 4468 |
| 1735482 | sgsa | | asg | | AAGA | |
| AD- | gsusugu(Gda)GfaAfCfAfggaaaug | 3931 | VPusUfsucaUfuUfCfcuguUfcCfacaacs | 4200 | UGGUUGUGGAACAGGAAAU | 4469 |
| 1735483 | asasa | | csa | | GAAA | |
| AD- | gsgsaga(Ada)CfaUfAfUfcauauuuu | 3932 | VPusCfsaaaAfuAfUfgauaUfgUfucuccs | 4201 | UUGGAGAACAUAUCAUAUU | 4470 |
| 1735484 | sgsa | | asa | | UUGG | |
| AD- | csasgcc(Ada)AfaAfUfGfauggcaaa | 3933 | VPusUfsuuuGfcCfAfucauUfuUfggcug | 4202 | AGCAGCCAAAAUGAUGGCA | 4471 |
| 1735485 | sasa | | scsu | | AAAU | |
| AD- | cscsaau(Uda)UfuUfGfAfacuuguag | 3934 | VPusUfscuaCfaAfGfuucaAfaAfauuggs | 4203 | UUCCAAUUUUUGAACUUGU | 4472 |
| 1735486 | sasa | | asa | | AGAA | |
| AD- | asusagg(Ada)AfuAfGfUfuugccaac | 3935 | VPusAfsguuGfgCfAfaacuAfuUfccuaus | 4204 | AAAUAGGAAUAGUUUGCCA | 4473 |
| 1735487 | susa | | usu | | ACUC | |
| AD- | ususuga(Ada)UfgUfUfUfuggagaa | 3936 | VPusUfsuuuCfuCfCfaaaaCfaUfucaaas | 4205 | UCUUUGAAUGUUUUGGAGA | 4474 |
| 1735488 | asasa | | gsa | | AAAG | |
| AD- | gsuscaa(Uda)AfuUfUfAfaugaauca | 3937 | VPusGfsugaUfuCfAfuuaaAfuAfuugacs | 4206 | GUGUCAAUAUUUAAUGAAU | 4475 |
| 1735489 | scsa | | asc | | CACU | |
| AD- | usgsaga(Ada)UfaUfAfUfuaaaugca | 3938 | VPusGfsugcAfuUfUfaauaUfaUfucucas | 4207 | UGUGAGAAUAUAUUAAAU | 4476 |
| 1735490 | scsa | | csa | | GCACA | |
| AD- | usasaca(Ada)GfgGfAfCfuaaauagg | 3939 | VPusUfsccuAfuUfUfagucCfcUfuguuas | 4208 | CUUAACAAGGGACUAAAUA | 4477 |
| 1735491 | sasa | | asg | | GGAA | |
| AD- | gsgscuu(Cda)UfuCfUfUfccaccucu | 3940 | VPusCfsagaGfgUfGfgaagAfaGfaagccs | 4209 | GCGGCUUCUUCUUCCACCU | 4478 |
| 1735492 | sgsa | | gsc | | CUGC | |
| AD- | ususgga(Ada)CfaUfGfUfgguuauc | 3941 | VPusAfsagaUfaAfCfcacaUfgUfuccaas | 4210 | AAUUGGAACAUGUGGUUAU | 4479 |
| 1735493 | ususa | | usu | | CUUU | |
| AD- | csasgag(Ada)AfcAfGfAfugauucu | 3942 | VPusAfsaagAfaUfCfaucuGfuUfcucugs | 4211 | UCCAGAGAACAGAUGAUUC | 4480 |
| 1735494 | ususa | | gsa | | UUUG | |
| AD- | csusguu(Ada)UfuUfUfAfuuggguu | 3943 | VPusAfsaaaCfcCfAfauaaAfaUfaacagsa | 4212 | GUCUGUUAUUUUAUUGGGU | 4481 |
| 1735495 | ususa | | sc | | UUUA | |
| AD- | asusgaa(Gda)AfaGfCfAfaaucuugg | 3944 | VPusAfsccaAfgAfUfuugcUfuCfuucaus | 4213 | AGAUGAAGAAGCAAAUCUU | 4482 |
| 1735496 | susa | | csu | | GGUC | |
| AD- | ususugg(Ada)AfuCfAfUfgcaauuu | 3945 | VPusCfsaaaAfuUfGfcaugAfuUfccaaas | 4214 | AUUUUGGAAUCAUGCAAUU | 4483 |
| 1735497 | usgsa | | asu | | UUGC | |
| AD- | csasaug(Uda)UfuUfGfUfaaacuugc | 3946 | VPusAfsgcaAfgUfUfuacaAfaAfcauugs | 4215 | UACAAUGUUUUGUAAACUU | 4484 |
| 1735498 | susa | | usa | | GCUA | |
| AD- | gsgsauc(Gda)UfaAfUfAfauggcaaa | 3947 | VPusUfsuuuGfcCfAfuuauUfaCfgauccs | 4216 | UGGGAUCGUAAUAAUGGCA | 4485 |
| 1735499 | sasa | | csa | | AAAG | |
| AD- | gsusgcu(Uda)UfcUfCfAfgguuccu | 3948 | VPusAfscagGfaAfCfcugaGfaAfagcacs | 4217 | GGGUGCUUUCUCAGGUUCC | 4486 |
| 1735500 | gsusa | | csc | | UGUA | |
| AD- | asusgau(Ada)CfuGfAfAfaguggug | 3949 | VPusAfsucaCfcAfCfuuucAfgUfaucaus | 4218 | UAAUGAUACUGAAAGUGGU | 4487 |
| 1735501 | asusa | | usa | | GAUG | |
| AD- | uscsacu(Gda)GfaCfCfUfgauuuuag | 3950 | VPusAfscuaAfaAfUfcaggUfcCfagugas | 4219 | UAUCACUGGACCUGAUUUU | 4488 |
| 1735502 | susa | | usa | | AGUA | |
| AD- | gsasacu(Uda)UfuUfGfCfuuuuaug | 3951 | VPusUfsucaUfaAfAfagcaAfaAfaguucs | 4220 | AGGAACUUUUUGCUUUUAU | 4489 |
| 1735503 | asasa | | csu | | GAAA | |
| AD- | gsasaca(Cda)AfgCfAfCfagauuugu | 3952 | VPusAfsacaAfaUfCfugugCfuGfuguucs | 4221 | AUGAACACAGCACAGAUUU | 4490 |
| 1735504 | susa | | asu | | GUUA | |
| AD- | asusaug(Gda)AfaGfGfAfaaucguag | 3953 | VPusUfscuaCfgAfUfuuccUfuCfcauaus | 4222 | AGAUAUGGAAGGAAAUCGU | 4491 |
| 1735505 | sasa | | csu | | AGAG | |
| AD- | gscsuau(Cda)UfaAfAfUfgggccuu | 3954 | VPusAfsaaaGfgCfCfcauuUfaGfauagcs | 4223 | AUGCUAUCUAAAUGGGCCU | 4492 |
| 1735506 | ususa | | asu | | UUUA | |
| AD- | csasaaa(Cda)CfaCfCfAfagaaggaas | 3955 | VPusUfsuucCfuUfCfuuggUfgGfuuuug | 4224 | UCCAAAACCACCAAGAAGG | 4493 |
| 1735507 | asa | | sgsa | | AAAA | |
| AD- | cscsaca(Gda)AfuGfUfGfcuacaugc | 3956 | VPusUfsgcaUfgUfAfgcacAfuCfuguggs | 4225 | UGCCACAGAUGUGCUACAU | 4494 |
| 1735508 | sasa | | csa | | GCAG | |
| AD- | asasagu(Cda)AfuAfCfAfuguacaag | 3957 | VPusGfscuuGfuAfCfauguAfuGfacuuu | 4226 | AUAAAGUCAUACAUGUACA | 4495 |
| 1735509 | scsa | | sasu | | AGCA | |
| AD- | usasgaa(Gda)CfaGfAfAfgaggauaa | 3958 | VPusAfsuuaUfcCfUfcuucUfgCfuucuas | 4227 | GUUAGAAGCAGAAGAGGAU | 4496 |
| 1735510 | susa | | asc | | AAUG | |
| AD- | csgsugu(Gda)UfuCfGfCfacagcuug | 3959 | VPusUfscaaGfcUfGfugcgAfaCfacacgs | 4228 | AGCGUGUGUUCGCACAGCU | 4497 |
| 1735511 | sasa | | csu | | UGAG | |
| AD- | gscsugg(Uda)GfuUfUfUfguccagu | 3960 | VPusAfsgacUfgGfAfcaaaAfcAfccagcs | 4229 | GAGCUGGUGUUUUGUCCAG | 4498 |
| 1735512 | csusa | | usc | | UCUG | |
| AD- | asusgga(Ada)AfaCfAfAfucuaaauc | 3961 | VPusGfsgauUfuAfGfauugUfuUfuccau | 4230 | AAAUGGAAAACAAUCUAAA | 4499 |
| 1735513 | scsa | | susu | | UCCA | |
| AD- | csasuua(Gda)AfaAfAfUfggcuaucg | 3962 | VPusUfscgaUfaGfCfcauuUfuCfuaaugs | 4231 | UGCAUUAGAAAAUGGCUAU | 4500 |
| 1735514 | sasa | | csa | | CGAG | |
| AD- | asusgga(Cda)AfgAfAfGfgcauugu | 3963 | VPusUfsgacAfaUfGfccuuCfuGfuccaus | 4232 | AAAUGGACAGAAGGCAUUG | 4501 |
| 1735515 | csasa | | usu | | UCAA | |
| AD- | csasgau(Uda)GfcUfGfCfaguggaaa | 3964 | VPusUfsuuuCfcAfCfugcaGfcAfaucugs | 4233 | UACAGAUUGCUGCAGUGGA | 4502 |
| 1735516 | sasa | | usa | | AAAU | |
| AD- | asgsgug(Gda)AfaAfUfGfgaguuga | 3965 | VPusGfsaucAfaCfUfccauUfuCfcaccus | 4234 | GGAGGUGGAAAUGGAGUU | 4503 |
| 1735517 | uscsa | | CSC | | GAUCU | |
| AD- | csusggg(Cda)AfaUfGfCfaccuaaua | 3966 | VPusGfsuauUfaGfGfugcaUfuGfcccags | 4235 | CUCUGGGCAAUGCACCUAA | 4504 |
| 1735518 | scsa | | asg | | UACU | |
| AD- | asusuuc(Cda)CfuCfUfGfccuaaaga | 3967 | VPusGfsucuUfuAfGfgcagAfgGfgaaaus | 4236 | UAAUUUCCCUCUGCCUAAA | 4505 |
| 1735519 | scsa | | usa | | GACU | |
| AD- | csgscuu(Cda)UfgCfAfAfcguggagc | 3968 | VPusAfsgcuCfcAfCfguugCfaGfaagcgs | 4237 | GCCGCUUCUGCAACGUGGA | 4506 |
| 1735520 | susa | | gsc | | GCUG | |
| AD- | asgsauu(Cda)AfuAfUfUfguauuuc | 3969 | VPusGfsggaAfaUfAfcaauAfuGfaaucus | 4238 | AUAGAUUCAUAUUGUAUUU | 4507 |
| 1735521 | cscsa | | asu | | CCCA | |
| AD- | asgsgac(Ada)AfaUfGfCfauuucuag | 3970 | VPusAfscuaGfaAfAfugcaUfuUfguccus | 4239 | GGAGGACAAAUGCAUUUCU | 4508 |
| 1735522 | susa | | CSC | | AGUG | |
| AD- | ususaga(Cda)GfuGfUfUfgagugag | 3971 | VPusCfsacuCfaCfUfcaacAfcGfucuaas | 4240 | UAUUAGACGUGUUGAGUGA | 4509 |
| 1735523 | usgsa | | usa | | GUGC | |
| AD- | csusgug(Gda)AfcAfUfCfaaaugcug | 3972 | VPusUfscagCfaUfUfugauGfuCfcacags | 4241 | AGCUGUGGACAUCAAAUGC | 4510 |
| 1735524 | sasa | | csu | | UGAA | |
| AD- | asgsgcc(Uda)UfaAfUfAfcugugaga | 3973 | VPusCfsucuCfaCfAfguauUfaAfggccus | 4242 | ACAGGCCUUAAUACUGUGA | 4511 |
| 1735525 | sgsa | | gsu | | GAGG | |
| AD- | asgsaaa(Uda)CfaUfUfGfccuagugu | 3974 | VPusAfsacaCfuAfGfgcaaUfgAfuuucus | 4243 | GCAGAAAUCAUUGCCUAGU | 4512 |
| 1735526 | susa | | gsc | | GUUC | |
| AD- | usgsagu(Gda)CfuGfAfGfuuccuug | 3975 | VPusAfsgcaAfgGfAfacucAfgCfacucas | 4244 | AGUGAGUGCUGAGUUCCUU | 4513 |
| 1735527 | csusa | | csu | | GCUG | |
| AD- | gscscau(Gda)CfaUfGfAfuuaugauc | 3976 | VPusUfsgauCfaUfAfaucaUfgCfauggcs | 4245 | CUGCCAUGCAUGAUUAUGA | 4514 |
| 1735528 | sasa | | asg | | UCAC | |
| AD- | usgscug(Cda)UfgGfUfUfugcuacca | 3977 | VPusCfsuggUfaGfCfaaacCfaGfcagcas | 4246 | GAUGCUGCUGGUUUGCUAC | 4515 |
| 1735529 | sgsa | | usc | | CAGG | |
| AD- | csasgau(Gda)AfaGfAfGfgaauagcg | 3978 | VPusUfscgcUfaUfUfccucUfuCfaucugs | 4247 | GGCAGAUGAAGAGGAAUAG | 4516 |
| 1735530 | sasa | | CSC | | CGAC | |
| AD- | asuscca(Gda)GfuGfCfAfucaauuuc | 3979 | VPusAfsgaaAfuUfGfaugcAfcCfuggaus | 4248 | AAAUCCAGGUGCAUCAAUU | 4517 |
| 1735531 | susa | | usu | | UCUG | |
| AD- | asasuaa(Gda)CfcAfAfGfcguuaucu | 3980 | VPusAfsagaUfaAfCfgcuuGfgCfuuauus | 4249 | UUAAUAAGCCAAGCGUUAU | 4518 |
| 1735532 | susa | | asa | | CUUG | |
| AD- | gsasgag(Gda)AfuCfCfUfugcucugc | 3981 | VPusAfsgcaGfaGfCfaaggAfuCfcucucs | 4250 | GUGAGAGGAUCCUUGCUCU | 4519 |
| 1735533 | susa | | asc | | GCUG | |
| AD- | asusgau(Gda)AfaGfAfCfggugaaga | 3982 | VPusUfsucuUfcAfCfcgucUfuCfaucaus | 4251 | UGAUGAUGAAGACGGUGAA | 4520 |
| 1735534 | sasa | | csa | | GAAU | |
| AD- | uscsgua(Ada)GfuGfUfAfagaaagaa | 3983 | VPusAfsuucUfuUfCfuuacAfcUfuacgas | 4252 | AUUCGUAAGUGUAAGAAAG | 4521 |
| 1735535 | susa | | asu | | AAUG | |
| AD- | asuscug(Uda)GfuAfAfCfagcugug | 3984 | VPusUfsccaCfaGfCfuguuAfcAfcagaus | 4253 | CAAUCUGUGUAACAGCUGU | 4522 |
| 1735536 | gsasa | | usg | | GGAC | |
| AD- | asusuua(Ada)AfaUfUfCfccacucaa | 3985 | VPusGfsuugAfgUfGfggaaUfuUfuaaau | 4254 | AUAUUUAAAAUUCCCACUC | 4523 |
| 1735537 | scsa | | sasu | | AACA | |
| AD- | gsascca(Gda)UfgUfCfUfacuggcuc | 3986 | VPusAfsgagCfcAfGfuagaCfaCfuggucs | 4255 | UGGACCAGUGUCUACUGGC | 4524 |
| 1735538 | susa | | csa | | UCUC | |
| AD- | csgscuu(Uda)CfgUfUfUfuuuaguc | 3987 | VPusAfsugaCfuAfAfaaaaCfgAfaagcgs | 4256 | AGCGCUUUCGUUUUUUAGU | 4525 |
| 1735539 | asusa | | csu | | CAUU | |
| AD- | uscscgu(Gda)UfuGfAfCfccauguu | 3988 | VPusGfscaaCfaUfGfggucAfaCfacggas | 4257 | CAUCCGUGUUGACCCAUGU | 4526 |
| 1735540 | gscsa | | usg | | UGCA | |
| AD- | asusaca(Gda)AfaGfAfUfgaagaaau | 3989 | VPusCfsauuUfcUfUfcaucUfuCfuguaus | 4258 | AGAUACAGAAGAUGAAGAA | 4527 |
| 1735541 | sgsa | | csu | | AUGG | |
| AD- | uscsucc(Cda)GfaGfCfUfgaaacuua | 3990 | VPusUfsuaaGfuUfUfcagcUfcGfggagas | 4259 | UCUCUCCCGAGCUGAAACU | 4528 |
| 1735542 | sasa | | gsa | | UAAA | |
| AD- | usgscau(Cda)AfaAfCfUfggcagaua | 3991 | VPusAfsuauCfuGfCfcaguUfuGfaugcas | 4260 | UGUGCAUCAAACUGGCAGA | 4529 |
| 1735543 | susa | | csa | | UAUA | |
| AD- | ususgca(Ada)AfaUfAfUfucaggaga | 3992 | VPusGfsucuCfcUfGfaauaUfuUfugcaas | 4261 | AGUUGCAAAAUAUUCAGGA | 4530 |
| 1735544 | scsa | | csu | | GACC | |
| AD- | ascsaau(Cda)GfuAfUfAfcaugccac | 3993 | VPusUfsgugGfcAfUfguauAfcGfauugu | 4262 | UCACAAUCGUAUACAUGCC | 4531 |
| 1735545 | sasa | | sgsa | | ACAG | |
| AD- | asasuag(Ada)AfaAfGfAfugagcaac | 3994 | VPusAfsguuGfcUfCfaucuUfuUfcuauus | 4263 | UUAAUAGAAAAGAUGAGCA | 4532 |
| 1735546 | susa | | asa | | ACUG | |
| AD- | usasucu(Uda)AfuGfUfUfccauggc | 3995 | VPusCfsagcCfaUfGfgaacAfuAfagauas | 4264 | CUUAUCUUAUGUUCCAUGG | 4533 |
| 1735547 | usgsa | | asg | | CUGA | |
| AD- | csusacg(Uda)GfaAfGfAfgcugcgu | 3996 | VPusUfscacGfcAfGfcucuUfcAfcguags | 4265 | GGCUACGUGAAGAGCUGCG | 4534 |
| 1735548 | gsasa | | CSC | | UGAG | |
| AD- | gsasauu(Gda)AfuGfGfCfucuauacg | 3997 | VPusAfscguAfuAfGfagccAfuCfaauucs | 4266 | UAGAAUUGAUGGCUCUAUA | 4535 |
| 1735549 | susa | | usa | | CGUG | |
| AD- | ususcag(Gda)UfaAfUfUfgaagaggc | 3998 | VPusUfsgccUfcUfUfcaauUfaCfcugaas | 4267 | GAUUCAGGUAAUUGAAGAG | 4536 |
| 1735550 | sasa | | usc | | GCAG | |
| AD- | asasgga(Cda)UfgAfGfUfgaccuuug | 3999 | VPusAfscaaAfgGfUfcacuCfaGfuccuus | 4268 | UGAAGGACUGAGUGACCUU | 4537 |
| 1735551 | susa | | csa | | UGUU | |
| AD- | csgsaga(Gda)UfcUfGfAfggaacggc | 4000 | VPusAfsgccGfuUfCfcucaGfaCfucucgs | 4269 | CCCGAGAGUCUGAGGAACG | 4538 |
| 1735552 | susa | | gsg | | GCUA | |
| AD- | asusucu(Uda)UfgGfGfAfuugggac | 4001 | VPusAfsaguCfcCfAfauccCfaAfagaaus | 4270 | UGAUUCUUUGGGAUUGGGA | 4539 |
| 1735553 | ususa | | csa | | CUUA | |
| AD- | usascca(Gda)GfuCfAfGfugguuaga | 4002 | VPusUfsucuAfaCfCfacugAfcCfugguas | 4271 | GCUACCAGGUCAGUGGUUA | 4540 |
| 1735554 | sasa | | gsc | | GAAG | |
| AD- | asusuca(Gda)GfuUfUfGfccauggac | 4003 | VPusUfsgucCfaUfGfgcaaAfcCfugaaus | 4272 | GUAUUCAGGUUUGCCAUGG | 4541 |
| 1735555 | sasa | | asc | | ACAU | |
| AD- | gscsagc(Uda)AfaAfCfUfgguccugg | 4004 | VPusUfsccaGfgAfCfcaguUfuAfgcugcs | 4273 | CGGCAGCUAAACUGGUCCU | 4542 |
| 1735556 | sasa | | csg | | GGAG | |
| AD- | asgsuaa(Uda)GfgCfAfUfagaaugga | 4005 | VPusCfsuccAfuUfCfuaugCfcAfuuacus | 4274 | AUAGUAAUGGCAUAGAAUG | 4543 |
| 1735557 | sgsa | | asu | | GAGU | |
| AD- | asasuug(Cda)AfaGfAfAfaauggacc | 4006 | VPusUfsgguCfcAfUfuuucUfuGfcaauus | 4275 | AUAAUUGCAAGAAAAUGGA | 4544 |
| 1735558 | sasa | | asu | | CCAU | |
| AD- | csgsgca(Cda)UfgCfGfUfucuggugc | 4007 | VPusAfsgcaCfcAfGfaacgCfaGfugccgs | 4276 | UCCGGCACUGCGUUCUGGU | 4545 |
| 1735559 | susa | | gsa | | GCUG | |
| AD- | asgsuca(Uda)AfuUfGfAfagaagccc | 4008 | VPusUfsgggCfuUfCfuucaAfuAfugacus | 4277 | AAAGUCAUAUUGAAGAAGC | 4546 |
| 1735560 | sasa | | usu | | CCAG | |
| AD- | uscsauc(Ada)UfgCfUfGfcgucagcu | 4009 | VPusAfsagcUfgAfCfgcagCfaUfgaugas | 4278 | AAUCAUCAUGCUGCGUCAG | 4547 |
| 1735561 | susa | | usu | | CUUG | |
| AD- | asasaug(Ada)UfcGfCfCfucuuggua | 4010 | VPusAfsuacCfaAfGfaggcGfaUfcauuus | 4279 | GAAAAUGAUCGCCUCUUGG | 4548 |
| 1735562 | susa | | usc | | UAUG | |
| AD- | asusuug(Ada)AfgAfUfAfuaaagag | 4011 | VPusUfsgcuCfuUfUfauauCfuUfcaaaus | 4280 | ACAUUUGAAGAUAUAAAGA | 4549 |
| 1735563 | csasa | | gsu | | GCAG | |
| AD- | gsgsucu(Cda)CfuUfCfAfccagccuc | 4012 | VPusCfsgagGfcUfGfgugaAfgGfagaccs | 4281 | UGGGUCUCCUUCACCAGCC | 4550 |
| 1735564 | sgsa | | csa | | UCGG | |
| AD- | gsasaac(Ada)GfaGfAfAfgaaagaca | 4013 | VPusCfsuguCfuUfUfcuucUfcUfguuucs | 4282 | AGGAAACAGAGAAGAAAGA | 4551 |
| 1735565 | sgsa | | csu | | CAGC | |
| AD- | ususcua(Gda)UfgGfCfUfacaaaugc | 4014 | VPusGfsgcaUfuUfGfuagcCfaCfuagaas | 4283 | AUUUCUAGUGGCUACAAAU | 4552 |
| 1735566 | scsa | | asu | | GCCC | |
| AD- | gsgsaga(Gda)AfaAfUfCfaggaagga | 4015 | VPusAfsuccUfuCfCfugauUfuCfucuccs | 4284 | UGGGAGAGAAAUCAGGAAG | 4553 |
| 1735567 | susa | | csa | | GAUU | |
| AD- | asusaua(Gda)UfgAfGfCfccuaaagg | 4016 | VPusUfsccuUfuAfGfggcuCfaCfuauaus | 4285 | AAAUAUAGUGAGCCCUAAA | 4554 |
| 1735568 | sasa | | usu | | GGAC | |
| AD- | gscsugc(Cda)UfuUfGfUfccucgccc | 4017 | VPusAfsgggCfgAfGfgacaAfaGfgcagcs | 4286 | UGGCUGCCUUUGUCCUCGC | 4555 |
| 1735569 | susa | | csa | | CCUG | |
| AD- | gsgscaa(Ada)AfgAfCfCfucaccaag | 4018 | VPusUfscuuGfgUfGfagguCfuUfuugcc | 4287 | AUGGCAAAAGACCUCACCA | 4556 |
| 1735570 | sasa | | sasu | | AGAA | |
| AD- | ususcag(Cda)AfuCfGfCfcugugccu | 4019 | VPusAfsaggCfaCfAfggcgAfuGfcugaas | 4288 | UCUUCAGCAUCGCCUGUGC | 4557 |
| 1735571 | susa | | gsa | | CUUC | |
| AD- | gscsuaa(Ada)UfgAfGfGfcucgcaau | 4020 | VPusUfsauuGfcGfAfgccuCfaUfuuagcs | 4289 | GUGCUAAAUGAGGCUCGCA | 4558 |
| 1735572 | sasa | | asc | | AUAU | |
| AD- | csasgcu(Uda)CfgUfCfUfggugggu | 4021 | VPusAfsgacCfcAfCfcagaCfgAfagcugs | 4290 | GCCAGCUUCGUCUGGUGGG | 4559 |
| 1735573 | csusa | | gsc | | UCUC | |
| AD- | asusaug(Gda)UfaUfUfGfgcaugcag | 4022 | VPusAfscugCfaUfGfccaaUfaCfcauaus | 4291 | GAAUAUGGUAUUGGCAUGC | 4560 |
| 1735574 | susa | | usc | | AGUU | |
| AD- | asasacu(Gda)CfaGfGfUfggagaauu | 4023 | VPusGfsaauUfcUfCfcaccUfgCfaguuus | 4292 | AUAAACUGCAGGUGGAGAA | 4561 |
| 1735575 | scsa | | asu | | UUCC | |
| AD- | usasugg(Cda)UfgCfCfUfgucuucaa | 4024 | VPusUfsuugAfaGfAfcaggCfaGfccauas | 4293 | GUUAUGGCUGCCUGUCUUC | 4562 |
| 1735576 | sasa | | asc | | AAAC | |
| AD- | csusguu(Cda)UfgAfAfAfuagagga | 4025 | VPusGfsgucCfuCfUfauuuCfaGfaacags | 4294 | CCCUGUUCUGAAAUAGAGG | 4563 |
| 1735577 | cscsa | | gsg | | ACCC | |
| AD- | uscsuau(Uda)UfuUfAfAfagccgcu | 4026 | VPusCfscagCfgGfCfuuuaAfaAfauagas | 4295 | UUUCUAUUUUUAAAGCCGC | 4564 |
| 1735578 | gsgsa | | asa | | UGGU | |
| AD- | gscsuga(Gda)GfaGfAfAfgcucagga | 4027 | VPusUfsuccUfgAfGfcuucUfcCfucagcs | 4296 | CAGCUGAGGAGAAGCUCAG | 4565 |
| 1735579 | sasa | | usg | | GAAC | |
| AD- | csasagc(Cda)UfuCfCfAfccacaagu | 4028 | VPusGfsacuUfgUfGfguggAfaGfgcuug | 4297 | UCCAAGCCUUCCACCACAA | 4566 |
| 1735580 | scsa | | sgsa | | GUCA | |
| AD- | ususcag(Uda)UfaCfCfAfaaguggcc | 4029 | VPusUfsggcCfaCfUfuuggUfaAfcugaas | 4298 | AUUUCAGUUACCAAAGUGG | 4567 |
| 1735581 | sasa | | asu | | CCAG | |
| AD- | csasccu(Gda)CfuUfCfCfucacccgg | 4030 | VPusUfsccgGfgUfGfaggaAfgCfaggugs | 4299 | CUCACCUGCUUCCUCACCC | 4568 |
| 1735582 | sasa | | asg | | GGAC | |
| AD- | ususuua(Uda)CfaCfCfCfacauagug | 4031 | VPusCfscacUfaUfGfugggUfgAfuaaaas | 4300 | UCUUUUAUCACCCACAUAG | 4569 |
| 1735583 | sgsa | | gsa | | UGGG | |
| AD- | asgsgag(Ada)CfcGfUfCfguugccuu | 4032 | VPusCfsaagGfcAfAfcgacGfgUfcuccus | 4301 | UCAGGAGACCGUCGUUGCC | 4570 |
| 1735584 | sgsa | | gsa | | UUGU | |
| AD- | asusggc(Cda)CfaGfCfAfaaaguucg | 4033 | VPusUfscgaAfcUfUfuugcUfgGfgccaus | 4302 | AAAUGGCCCAGCAAAAGUU | 4571 |
| 1735585 | sasa | | usu | | CGAG | |
| AD- | asgsacg(Cda)CfaAfAfGfccaugcgg | 4034 | VPusAfsccgCfaUfGfgcuuUfgGfcgucus | 4303 | CGAGACGCCAAAGCCAUGC | 4572 |
| 1735586 | susa | | csg | | GGUC | |
| AD- | csasgcu(Ada)AfuGfCfAfccaccuca | 4035 | VPusGfsugaGfgUfGfgugcAfuUfagcug | 4304 | GUCAGCUAAUGCACCACCU | 4573 |
| 1735587 | scsa | | sasc | | CACU | |
| AD- | gsgsaaa(Ada)GfcAfGfAfcggcgaau | 4036 | VPusUfsauuCfgCfCfgucuGfcUfuuuccs | 4305 | AAGGAAAAGCAGACGGCGA | 4574 |
| 1735588 | sasa | | usu | | AUAU | |
| AD- | gscsuuu(Gda)CfuGfGfGfuagugag | 4037 | VPusAfsgcuCfaCfUfacccAfgCfaaagcs | 4306 | CUGCUUUGCUGGGUAGUGA | 4575 |
| 1735589 | csusa | | asg | | GCUC | |

TABLE 14
Unmodified Sense and Antisense Strand Sequences of PDE3B
dsRNA Agents Comprising a GalNAc Derivative Targeting Ligand

| | | SEQ | | | SEQ | |
|---|---|---|---|---|---|---|
| Duplex | Sense Sequence | ID | Range in | Antisense Sequence | ID | Range in |
| Name | 5′ to 3′ | NO: | NM_000922.4 | 5′ to 3′ | NO: | NM_000922.4 |
| AD-1735591 | UUCCUUCUUCAUCUUGAUCA | 3231 | 2880-2900 | UUGAUCAAGAUGAAGAAGGAAG | 3500 | 2878-2900 |
| | A | | | U | | |
| AD-1735592 | CACUCUAAAACUGAUGUUCA | 3232 | 4621-4641 | UUGAACAUCAGUUUUAGAGUGA | 3501 | 4619-4641 |
| | A | | | A | | |
| AD-1735593 | UCUUCUGUAUCACUGACUCA | 3233 | 1752-1772 | UUGAGUCAGUGAUACAGAAGAU | 3502 | 1750-1772 |
| | A | | | G | | |
| AD-1735594 | CAGAUCUUCUGACUGAUCCA | 3234 | 1363-1383 | UUGGAUCAGUCAGAAGAUCUGA | 3503 | 1361-1383 |
| | A | | | C | | |
| AD-1735595 | UGACACAUUUUUCUCCAUAA | 3235 | 5958-5978 | UUUAUGGAGAAAAAUGUGUCAG | 3504 | 5956-5978 |
| | A | | | U | | |
| AD-1735596 | GGAAACUCAUUUUUACAUAA | 3236 | 5617-5637 | UUUAUGUAAAAAUGAGUUUCCA | 3505 | 5615-5637 |
| | A | | | G | | |
| AD-1735597 | AUCAGCAACUUAGAAAUUCU | 3237 | 1966-1986 | UAGAAUUUCUAAGUUGCUGAUA | 3506 | 1964-1986 |
| | A | | | A | | |
| AD-1735598 | CUUAUAUUUCUCUAGAGUAC | 3238 | 5351-5371 | UGUACUCUAGAGAAAUAUAAGG | 3507 | 5349-5371 |
| | A | | | A | | |
| AD-1735599 | AACUCCAAGAAUCUUUUAUC | 3239 | 3229-3249 | UGAUAAAAGAUUCUUGGAGUUU | 3508 | 3227-3249 |
| | A | | | U | | |
| AD-1735600 | CUUCAAACAUUCCUGCAUUA | 3240 | 2680-2700 | UUAAUGCAGGAAUGUUUGAAGA | 3509 | 2678-2700 |
| | A | | | C | | |
| AD-1735601 | UCGUUCUUCUCCUCAACUAG | 3241 | 3206-3226 | UCUAGUUGAGGAGAAGAACGAU | 3510 | 3204-3226 |
| | A | | | C | | |
| AD-1735602 | AAAGAUUAAUCCUCUCACAC | 3242 | 1460-1480 | UGUGUGAGAGGAUUAAUCUUUG | 3511 | 1458-1480 |
| | A | | | G | | |
| AD-1735603 | ACUAACCUCAUCAAAGAUAC | 3243 | 4501-4521 | UGUAUCUUUGAUGAGGUUAGUU | 3512 | 4499-4521 |
| | A | | | U | | |
| AD-1735604 | CACCACUUAUUACUAAUAAA | 3244 | 5283-5303 | UUUUAUUAGUAAUAAGUGGUGG | 3513 | 5281-5303 |
| | A | | | G | | |
| AD-1735605 | UGGUACUAGAAAUAUUCUUU | 3245 | 5915-5935 | UAAAGAAUAUUUCUAGUACCAG | 3514 | 5913-5935 |
| | A | | | C | | |
| AD-1735606 | GCUGUCAUUUGUUCACUCUA | 3246 | 4608-4628 | UUAGAGUGAACAAAUGACAGCU | 3515 | 4606-4628 |
| | A | | | A | | |
| AD-1735607 | ACUCAACAAUUUAUGAACUA | 3247 | 2421-2441 | UUAGUUCAUAAAUUGUUGAGUG | 3516 | 2419-2441 |
| | A | | | G | | |
| AD-1735608 | AGUAUGACUCAUUAAUAGAA | 3248 | 2269-2289 | UUUCUAUUAAUGAGUCAUACUC | 3517 | 2267-2289 |
| | A | | | U | | |
| AD-1735609 | CUGCUGAUUUUCUUAAUAAG | 3249 | 1891-1911 | UCUUAUUAAGAAAAUCAGCAGU | 3518 | 1889-1911 |
| | A | | | A | | |
| AD-1735610 | UAUCUUUAGAUCCACAUCUU | 3250 | 4587-4607 | UAAGAUGUGGAUCUAAAGAUAA | 3519 | 4585-4607 |
| | A | | | C | | |
| AD-1735611 | CGAGACAUUCCUUAUCACAA | 3251 | 2466-2486 | UUUGUGAUAAGGAAUGUCUCGA | 3520 | 2464-2486 |
| | A | | | U | | |
| AD-1735612 | UACUGAAUCAGAUUAAUUUC | 3252 | 5850-5870 | UGAAAUUAAUCUGAUUCAGUAA | 3521 | 5848-5870 |
| | A | | | C | | |
| AD-1735613 | CUUACUUAAAUCCUUCACUG | 3253 | 3855-3875 | UCAGUGAAGGAUUUAAGUAAGG | 3522 | 3853-3875 |
| | A | | | G | | |
| AD-1735614 | UCGAAAGAAUCAUUCAAACU | 3254 | 2100-2120 | UAGUUUGAAUGAUUCUUUCGAG | 3523 | 2098-2120 |
| | A | | | A | | |
| AD-1735615 | AAAUGACCUAUCACUACUUA | 3255 | 4682-4702 | UUAAGUAGUGAUAGGUCAUUUC | 3524 | 4680-4702 |
| | A | | | U | | |
| AD-1735616 | CAAGUCAUUUCCUCUCUACG | 3256 | 1395-1415 | UCGUAGAGAGGAAAUGACUUGU | 3525 | 1393-1415 |
| | A | | | G | | |
| AD-1735617 | AUGCAGUUUCUUACUUAUCU | 3257 | 5079-5099 | UAGAUAAGUAAGAAACUGCAUG | 3526 | 5077-5099 |
| | A | | | C | | |
| AD-1735618 | UCAAUGCAAUACACUGUUCA | 3258 | 4124-4144 | UUGAACAGUGUAUUGCAUUGAG | 3527 | 4122-4144 |
| | A | | | C | | |
| AD-1735619 | UCUAUGUACCUACUGACACA | 3259 | 5945-5965 | UUGUGUCAGUAGGUACAUAGAU | 3528 | 5943-5965 |
| | A | | | A | | |
| AD-1735620 | UGAAUUCCAGUCUUAUCUUA | 3260 | 4312-4332 | UUAAGAUAAGACUGGAAUUCAA | 3529 | 4310-4332 |
| | A | | | A | | |
| AD-1735621 | UUGCUGUAAUACCAAAACUA | 3261 | 4485-4505 | UUAGUUUUGGUAUUACAGCAAA | 3530 | 4483-4505 |
| | A | | | U | | |
| AD-1735622 | GGAUCACUUCUUUCAAAUCA | 3262 | 1061-1081 | UUGAUUUGAAAGAAGUGAUCCA | 3531 | 1059-1081 |
| | A | | | A | | |
| AD-1735623 | GAACUAGAAAACUAUUCUUA | 3263 | 3795-3815 | UUAAGAAUAGUUUUCUAGUUCC | 3532 | 3793-3815 |
| | A | | | U | | |
| AD-1735624 | ACAUUUCCAUACUGUCUGUU | 3264 | 5484-5504 | UAACAGACAGUAUGGAAAUGUG | 3533 | 5482-5504 |
| | A | | | A | | |
| AD-1735625 | UGAUCCUUCACAGUGUCAAU | 3265 | 5158-5178 | UAUUGACACUGUGAAGGAUCAA | 3534 | 5156-5178 |
| | A | | | A | | |
| AD-1735626 | GAUUUCUGAGAACAAGUAAA | 3266 | 4729-4749 | UUUUACUUGUUCUCAGAAAUCA | 3535 | 4727-4749 |
| | A | | | G | | |
| AD-1735627 | CCUACUUGUGAAAUACAUUU | 3267 | 4906-4926 | UAAAUGUAUUUCACAAGUAGGG | 3536 | 4904-4926 |
| | A | | | U | | |
| AD-1735628 | CAACUGGAAUUUUCCAAUUU | 3268 | 2297-2317 | UAAAUUGGAAAAUUCCAGUUGC | 3537 | 2295-2317 |
| | A | | | U | | |
| AD-1735629 | UCUAAUCCUGAUGAGAGUUA | 3269 | 2649-2669 | UUAACUCUCAUCAGGAUUAGAG | 3538 | 2647-2669 |
| | A | | | C | | |
| AD-1735630 | AGCCUCAUUAUCAAAAUUCU | 3270 | 1288-1308 | UAGAAUUUUGAUAAUGAGGCUU | 3539 | 1286-1308 |
| | A | | | A | | |
| AD-1735631 | AAUUUCUGAUGCUUUUUACU | 3271 | 4220-4240 | UAGUAAAAAGCAUCAGAAAUUG | 3540 | 4218-4240 |
| | A | | | A | | |
| AD-1735632 | UACCAUUAGAUGAAAUCUUA | 3272 | 5788-5808 | UUAAGAUUUCAUCUAAUGGUAC | 3541 | 5786-5808 |
| | A | | | A | | |
| AD-1735633 | CUGUGAAUUCUUCCAACCAU | 3273 | 1816-1836 | UAUGGUUGGAAGAAUUCACAGG | 3542 | 1814-1836 |
| | A | | | A | | |
| AD-1735634 | CUAAUACUCCAGAUUUUUAU | 3274 | 1948-1968 | UAUAAAAAUCUGGAGUAUUAGG | 3543 | 1946-1968 |
| | A | | | U | | |
| AD-1735635 | GGACACAUACAUUGAAUAAA | 3275 | 4550-4570 | UUUUAUUCAAUGUAUGUGUCCU | 3544 | 4548-4570 |
| | A | | | U | | |
| AD-1735636 | UUUGUCAUAAUGCUGCUUUG | 3276 | 3887-3907 | UCAAAGCAGCAUUAUGACAAAG | 3545 | 3885-3907 |
| | A | | | U | | |
| AD-1735637 | UUCAUCUUUCUGUUAAUUUC | 3277 | 4637-4657 | UGAAAUUAACAGAAAGAUGAAC | 3546 | 4635-4657 |
| | A | | | A | | |
| AD-1735638 | CAGUGAAACCAUUAAUUUUC | 3278 | 5028-5048 | UGAAAAUUAAUGGUUUCACUGU | 3547 | 5026-5048 |
| | A | | | G | | |
| AD-1735639 | UAACUGCAAGACUGAUUUCU | 3279 | 4716-4736 | UAGAAAUCAGUCUUGCAGUUAG | 3548 | 4714-4736 |
| | A | | | G | | |
| AD-1735640 | AGAAUUCCUCCUUACCUCAA | 3280 | 3547-3567 | UUUGAGGUAAGGAGGAAUUCUC | 3549 | 3545-3567 |
| | A | | | C | | |
| AD-1735641 | UAUUACAGAUCUUACUUUGU | 3281 | 5830-5850 | UACAAAGUAAGAUCUGUAAUAU | 3550 | 5828-5850 |
| | A | | | G | | |
| AD-1735642 | UUAUCUGAAAGAUAUCAAUU | 3282 | 5111-5131 | UAAUUGAUAUCUUUCAGAUAAG | 3551 | 5109-5131 |
| | A | | | C | | |
| AD-1735643 | AGAUCUGUUCUGGAAAAUCA | 3283 | 2811-2831 | UUGAUUUUCCAGAACAGAUCUG | 3552 | 2809-2831 |
| | A | | | U | | |
| AD-1735644 | CCCAGAAUACAACUUCCUUC | 3284 | 2867-2887 | UGAAGGAAGUUGUAUUCUGGGC | 3553 | 2865-2887 |
| | A | | | G | | |
| AD-1735645 | GUUGAUCUUUCAGUGCUAAA | 3285 | 1323-1343 | UUUUAGCACUGAAAGAUCAACU | 3554 | 1321-1343 |
| | A | | | C | | |
| AD-1735646 | CUAAGCUUUAUUUAUUAGAC | 3286 | 5191-5211 | UGUCUAAUAAAUAAAGCUUAGU | 3555 | 5189-5211 |
| | A | | | G | | |
| AD-1735647 | AGCUUGGAAUCUAUAUCUUU | 3287 | 2843-2863 | UAAAGAUAUAGAUUCCAAGCUG | 3556 | 2841-2863 |
| | A | | | A | | |
| AD-1735648 | UUAUUAUUUCUGAAGCCUAA | 3288 | 4699-4719 | UUUAGGCUUCAGAAAUAAUAAG | 3557 | 4697-4719 |
| | A | | | U | | |
| AD-1735649 | CCUUUGUUGUAUUUAACAAA | 3289 | 4187-4207 | UUUUGUUAAAUACAACAAAGGU | 3558 | 4185-4207 |
| | A | | | C | | |
| AD-1735650 | GCUCUCUAACUAAUCGAUCA | 3290 | 1852-1872 | UUGAUCGAUUAGUUAGAGAGCC | 3559 | 1850-1872 |
| | A | | | A | | |
| AD-1735651 | AAAGACUACAUGACAGAAAU | 3291 | 4666-4686 | UAUUUCUGUCAUGUAGUCUUUA | 3560 | 4664-4686 |
| | A | | | G | | |
| AD-1735652 | CAGGAUUCGUAUUUUUAAAG | 3292 | 4418-4438 | UCUUUAAAAAUACGAAUCCUGA | 3561 | 4416-4438 |
| | A | | | G | | |
| AD-1735653 | CCUUGCUAAGUAAUUGACAU | 3293 | 5659-5679 | UAUGUCAAUUACUUAGCAAGGG | 3562 | 5657-5679 |
| | A | | | U | | |
| AD-1735654 | CCUAUGCACUUUCACAGGAA | 3294 | 3778-3798 | UUUCCUGUGAAAGUGCAUAGGA | 3563 | 3776-3798 |
| | A | | | G | | |
| AD-1735655 | AUGCUGAAAUAUGUUUCAAC | 3295 | 2019-2039 | UGUUGAAACAUAUUUCAGCAUU | 3564 | 2017-2039 |
| | A | | | U | | |
| AD-1735656 | CCUUUUAAUUCAAAUCUACU | 3296 | 1710-1730 | UAGUAGAUUUGAAUUAAAAGGC | 3565 | 1708-1730 |
| | A | | | C | | |
| AD-1735657 | ACUGGACUUAUUGGAUUUAA | 3297 | 5577-5597 | UUUAAAUCCAAUAAGUCCAGUA | 3566 | 5575-5597 |
| | A | | | U | | |
| AD-1735658 | CAUCUGAAUCAGAUGGUACA | 3298 | 2038-2058 | UUGUACCAUCUGAUUCAGAUGU | 3567 | 2036-2058 |
| | A | | | U | | |
| AD-1735659 | AAUUCUGAUAGCAAUCUGUG | 3299 | 1980-2000 | UCACAGAUUGCUAUCAGAAUUU | 3568 | 1978-2000 |
| | A | | | C | | |
| AD-1735660 | UCAAGUCAAGGAUGCUAUCU | 3300 | 1683-1703 | UAGAUAGCAUCCUUGACUUGAA | 3569 | 1681-1703 |
| | A | | | A | | |
| AD-1735661 | UCACUGAAAACCACAAGAUA | 3301 | 3466-3486 | UUAUCUUGUGGUUUUCAGUGAG | 3570 | 3464-3486 |
| | A | | | G | | |
| AD-1735662 | ACCUGUUGAACAGUCUUCAA | 3302 | 1616-1636 | UUUGAAGACUGUUCAACAGGUA | 3571 | 1614-1636 |
| | A | | | G | | |
| AD-1735663 | UCAAGUGACAUAUUUCAGUU | 3303 | 3957-3977 | UAACUGAAAUAUGUCACUUGAG | 3572 | 3955-3977 |
| | A | | | U | | |
| AD-1735664 | UCAGGAACUUCAGGAUUGCU | 3304 | 1596-1616 | UAGCAAUCCUGAAGUUCCUGAG | 3573 | 1594-1616 |
| | A | | | C | | |
| AD-1735665 | ACGGAGUAUUAGUAGCUUAA | 3305 | 1412-1432 | UUUAAGCUACUAAUACUCCGUA | 3574 | 1410-1432 |
| | A | | | G | | |
| AD-1735666 | AUUGUCAAUGAAUUUUAUGA | 3306 | 3135-3155 | UUCAUAAAAUUCAUUGACAAUG | 3575 | 3133-3155 |
| | A | | | C | | |
| AD-1735667 | GAACAGCAAACAAAUAUUGA | 3307 | 2214-2234 | UUCAAUAUUUGUUUGCUGUUCA | 3576 | 2212-2234 |
| | A | | | C | | |
| AD-1735668 | UGAACUAUUUUCGUGCAUUA | 3308 | 2434-2454 | UUAAUGCACGAAAAUAGUUCAU | 3577 | 2432-2454 |
| | A | | | A | | |
| AD-1735669 | ACUGGAAUACUUAUUUUUCA | 3309 | 4751-4771 | UUGAAAAAUAAGUAUUCCAGUU | 3578 | 4749-4771 |
| | A | | | C | | |
| AD-1735670 | UUAUCUUGCAGAGAUCUCUG | 3310 | 1918-1938 | UCAGAGAUCUCUGCAAGAUAAC | 3579 | 1916-1938 |
| | A | | | G | | |
| AD-1735671 | GAAGUGUUAGAAUUUUUGAU | 3311 | 5142-5162 | UAUCAAAAAUUCUAACACUUCC | 3580 | 5140-5162 |
| | A | | | A | | |
| AD-1735672 | UCAAUUUAAGAUCUCUGGAA | 3312 | 5125-5145 | UUUCCAGAGAUCUUAAAUUGAU | 3581 | 5123-5145 |
| | A | | | A | | |
| AD-1735673 | UGGACCAUAUUUACAAUGUU | 3313 | 4856-4876 | UAACAUUGUAAAUAUGGUCCAU | 3582 | 4854-4876 |
| | A | | | U | | |
| AD-1735674 | UAGUCAUUGAAGCAAUCCUU | 3314 | 2926-2946 | UAAGGAUUGCUUCAAUGACUAA | 3583 | 2924-2946 |
| | A | | | A | | |
| AD-1735675 | AGCUGUUUAGGUUUAACAAU | 3315 | 4353-4373 | UAUUGUUAAACCUAAACAGCUU | 3584 | 4351-4373 |
| | A | | | U | | |
| AD-1735676 | CAAGGCAAAUGAUGUAAAUA | 3316 | 2993-3013 | UUAUUUACAUCAUUUGCCUUGG | 3585 | 2991-3013 |
| | A | | | C | | |
| AD-1735677 | AUCCAAUUACUACUGGAAAC | 3317 | 5603-5623 | UGUUUCCAGUAGUAAUUGGAUU | 3586 | 5601-5623 |
| | A | | | U | | |
| AD-1735678 | ACUUACAAUAUAUAUAUCCU | 3318 | 5328-5348 | UAGGAUAUAUAUAUUGUAAGUG | 3587 | 5326-5348 |
| | A | | | C | | |
| AD-1735679 | AUGCAGUUUGGUAUCUGACA | 3319 | 2512-2532 | UUGUCAGAUACCAAACUGCAUG | 3588 | 2510-2532 |
| | A | | | U | | |
| AD-1735680 | CCUUAUUUCAAGACACUGGU | 3320 | 2377-2397 | UACCAGUGUCUUGAAAUAAGGU | 3589 | 2375-2397 |
| | A | | | A | | |
| AD-1735681 | GAAGGGAUUUAUUCUUUAGU | 3321 | 4373-4393 | UACUAAAGAAUAAAUCCCUUCA | 3590 | 4371-4393 |
| | A | | | U | | |
| AD-1735682 | AUCCUUGCUACGGAUCUUAA | 3322 | 2940-2960 | UUUAAGAUCCGUAGCAAGGAUU | 3591 | 2938-2960 |
| | A | | | G | | |
| AD-1735683 | ACUGACUAUCCCGAAGCAAA | 3323 | 1727-1747 | UUUUGCUUCGGGAUAGUCAGUA | 3592 | 1725-1747 |
| | A | | | G | | |
| AD-1735684 | UGUAUUUCUGCUAUUAUUUC | 3324 | 5390-5410 | UGAAAUAAUAGCAGAAAUACAC | 3593 | 5388-5410 |
| | A | | | U | | |
| AD-1735685 | UGUAACAAUAACUAGCCUAA | 3325 | 5680-5700 | UUUAGGCUAGUUAUUGUUACAU | 3594 | 5678-5700 |
| | A | | | A | | |
| AD-1735686 | GUUGUUUUUACUCUAGCUCA | 3326 | 4400-4420 | UUGAGCUAGAGUAAAAACAACA | 3595 | 4398-4420 |
| | A | | | A | | |
| AD-1735687 | CAGGCAGUUUUAUACAAUGA | 3327 | 2790-2810 | UUCAUUGUAUAAAACUGCCUGA | 3596 | 2788-2810 |
| | A | | | G | | |
| AD-1735688 | AGGAUUCUCAGUCAGGUUAU | 3328 | 2352-2372 | UAUAACCUGACUGAGAAUCCUU | 3597 | 2350-2372 |
| | A | | | C | | |
| AD-1735689 | AUUUUCCAUCAUGUUUAAGU | 3329 | 5371-5391 | UACUUAAACAUGAUGGAAAAUG | 3598 | 5369-5391 |
| | A | | | U | | |
| AD-1735690 | UGCCACUUUUGUUACCAUUG | 3330 | 5238-5258 | UCAAUGGUAACAAAAGUGGCAG | 3599 | 5236-5258 |
| | A | | | C | | |
| AD-1735691 | ACUUGCUAGUGUGUGGAUAU | 3331 | 4882-4902 | UAUAUCCACACACUAGCAAGUU | 3600 | 4880-4902 |
| | A | | | U | | |
| AD-1735692 | AAUCUUACUUGAGAAAUUGC | 3332 | 5801-5821 | UGCAAUUUCUCAAGUAAGAUUU | 3601 | 5799-5821 |
| | A | | | C | | |
| AD-1735693 | AGUUCGAGACUUGCAUUUGA | 3333 | 3101-3121 | UUCAAAUGCAAGUCUCGAACUU | 3602 | 3099-3121 |
| | A | | | U | | |
| AD-1735694 | CCAUAGAAUUUCCUGAUACU | 3334 | 1873-1893 | UAGUAUCAGGAAAUUCUAUGGG | 3603 | 1871-1893 |
| | A | | | U | | |
| AD-1735695 | AGGUAAUUCCUUUAGAAUAU | 3335 | 5050-5070 | UAUAUUCUAAAGGAAUUACCUU | 3604 | 5048-5070 |
| | A | | | G | | |
| AD-1735696 | CUUAUGGAAACUCAACAAGA | 3336 | 2118-2138 | UUCUUGUUGAGUUUCCAUAAGU | 3605 | 2116-2138 |
| | A | | | U | | |
| AD-1735697 | AAGCAGCAUUUUAAAUUACG | 3337 | 5554-5574 | UCGUAAUUUAAAAUGCUGCUUU | 3606 | 5552-5574 |
| | A | | | U | | |
| AD-1735698 | UGACUCUCAACUGACCAUUC | 3338 | 3699-3719 | UGAAUGGUCAGUUGAGAGUCAG | 3607 | 3697-3719 |
| | A | | | C | | |
| AD-1735699 | AGGUUUAUCCAUGAAGGACU | 3339 | 4161-4181 | UAGUCCUUCAUGGAUAAACCUA | 3608 | 4159-4181 |
| | A | | | G | | |
| AD-1735700 | ACCAAGAAUUUGGCAUUUCA | 3340 | 1666-1686 | UUGAAAUGCCAAAUUCUUGGUG | 3609 | 1664-1686 |
| | A | | | A | | |
| AD-1735701 | UAUCUAGAAUAUUUGGCUUA | 3341 | 5094-5114 | UUAAGCCAAAUAUUCUAGAUAA | 3610 | 5092-5114 |
| | A | | | G | | |
| AD-1735702 | CUCCUGCAGAAUACAUACAA | 3342 | 5412-5432 | UUUGUAUGUAUUCUGCAGGAGA | 3611 | 5410-5432 |
| | A | | | G | | |
| AD-1735703 | UCACACCAUUUCCUGGAUUU | 3343 | 1474-1494 | UAAAUCCAGGAAAUGGUGUGAG | 3612 | 1472-1494 |
| | A | | | A | | |
| AD-1735704 | AUGUGGAAUUCAAGCGCUUU | 3344 | 2899-2919 | UAAAGCGCUUGAAUUCCACAUG | 3613 | 2897-2919 |
| | A | | | A | | |
| AD-1735705 | AUUGUGUAUUAUCUACUAUG | 3345 | 4240-4260 | UCAUAGUAGAUAAUACACAAUA | 3614 | 4238-4260 |
| | A | | | G | | |
| AD-1735706 | AAUGGAGUAAUGAAAAUGAU | 3346 | 3025-3045 | UAUCAUUUUCAUUACUCCAUUC | 3615 | 3023-3045 |
| | A | | | U | | |
| AD-1735707 | ACUGGUUUAUUGGAAAUAUU | 3347 | 2391-2411 | UAAUAUUUCCAAUAAACCAGUG | 3616 | 2389-2411 |
| | A | | | U | | |
| AD-1735708 | CAAGUGUAUGUGUAUAAAGU | 3348 | 5429-5449 | UACUUUAUACACAUACACUUGU | 3617 | 5427-5449 |
| | A | | | A | | |
| AD-1735709 | UACAAGCAUGCAUAUUGAGA | 3349 | 5457-5477 | UUCUCAAUAUGCAUGCUUGUAC | 3618 | 5455-5477 |
| | A | | | A | | |
| AD-1735710 | UGUGUCUUUUAUGUCUUUGA | 3350 | 4036-4056 | UUCAAAGACAUAAAAGACACAC | 3619 | 4034-4056 |
| | A | | | U | | |
| AD-1735711 | AUUUUCUCGCAGAAUUCAAU | 3351 | 2971-2991 | UAUUGAAUUCUGCGAGAAAAUC | 3620 | 2969-2991 |
| | A | | | A | | |
| AD-1735712 | UAGCGACAGUUUGAGUAAAA | 3352 | 3609-3629 | UUUUUACUCAAACUGUCGCUAU | 3621 | 3607-3629 |
| | A | | | U | | |
| AD-1735713 | CUGGUGUAUGAAUACUUUGU | 3353 | 3872-3892 | UACAAAGUAUUCAUACACCAGU | 3622 | 3870-3892 |
| | A | | | G | | |
| AD-1735714 | GUGAUAAGUGGCUAACAGAA | 3354 | 2182-2202 | UUUCUGUUAGCCACUUAUCACC | 3623 | 2180-2202 |
| | A | | | U | | |
| AD-1735715 | GUAGGCUAAUAUUUUCUAUU | 3355 | 4962-4982 | UAAUAGAAAAUAUUAGCCUACC | 3624 | 4960-4982 |
| | A | | | A | | |
| AD-1735716 | CCUCUUCAUCCUCGACUGUC | 3356 | 1089-1109 | UGACAGUCGAGGAUGAAGAGGC | 3625 | 1087-1109 |
| | A | | | G | | |
| AD-1735717 | AAUUGCCAUAAGCCAUAUUA | 3357 | 5815-5835 | UUAAUAUGGCUUAUGGCAAUUU | 3626 | 5813-5835 |
| | A | | | C | | |
| AD-1735718 | GCGAAUAUUUUGUCAGCUAA | 3358 | 3437-3457 | UUUAGCUGACAAAAUAUUCGCC | 3627 | 3435-3457 |
| | A | | | G | | |
| AD-1735719 | AUCCAGUGUUGCCUUUCUGA | 3359 | 4093-4113 | UUCAGAAAGGCAACACUGGAUU | 3628 | 4091-4113 |
| | A | | | C | | |
| AD-1735720 | AAAGUCUAUGCCUGUCUAAA | 3360 | 4068-4088 | UUUUAGACAGGCAUAGACUUUU | 3629 | 4066-4088 |
| | A | | | C | | |
| AD-1735721 | GGACAUCAGAAGUUUGAAUU | 3361 | 4298-4318 | UAAUUCAAACUUCUGAUGUCCA | 3630 | 4296-4318 |
| | A | | | U | | |
| AD-1735722 | GGCGAAUUGCUUAUAUUUCU | 3362 | 2617-2637 | UAGAAAUAUAAGCAAUUCGCCC | 3631 | 2615-2637 |
| | A | | | A | | |
| AD-1735723 | CACACUAUGUGUAAACCAGU | 3363 | 5261-5281 | UACUGGUUUACACAUAGUGUGU | 3632 | 5259-5281 |
| | A | | | G | | |
| AD-1735724 | CAGGUGAAGAAGAAAACAUU | 3364 | 2077-2097 | UAAUGUUUUCUUCUUCACCUGA | 3633 | 2075-2097 |
| | A | | | U | | |
| AD-1735725 | GUGAGCUCUUAUUUUUCACU | 3365 | 3914-3934 | UAGUGAAAAAUAAGAGCUCACU | 3634 | 3912-3934 |
| | A | | | A | | |
| AD-1735726 | AAAGCUGAUGGGAAUAAACU | 3366 | 3519-3539 | UAGUUUAUUCCCAUCAGCUUUA | 3635 | 3517-3539 |
| | A | | | C | | |
| AD-1735727 | GUGUCGUUAGGAGAAACUGC | 3367 | 1164-1184 | UGCAGUUUCUCCUAACGACACG | 3636 | 1162-1184 |
| | A | | | C | | |
| AD-1735728 | GGGACUUAAAACAAUGGUAU | 3368 | 1267-1287 | UAUACCAUUGUUUUAAGUCCCA | 3637 | 1265-1287 |
| | A | | | A | | |
| AD-1735729 | CUGAUGGUAGAAUUAACCAU | 3369 | 2596-2616 | UAUGGUUAAUUCUACCAUCAGA | 3638 | 2594-2616 |
| | A | | | A | | |
| AD-1735730 | ACUAUGUGUGUUUUAUUUCU | 3370 | 4254-4274 | UAGAAAUAAAACACACAUAGUA | 3639 | 4252-4274 |
| | A | | | G | | |
| AD-1735731 | CUGAUAAUUUAUAUUUGCAC | 3371 | 5310-5330 | UGUGCAAAUAUAAAUUAUCAGU | 3640 | 5308-5330 |
| | A | | | C | | |
| AD-1735732 | GUCCUUAAAUUAUUUAACCC | 3372 | 5641-5661 | UGGGUUAAAUAAUUUAAGGACU | 3641 | 5639-5661 |
| | A | | | A | | |
| AD-1735733 | CGCAAUAUGGUGUCAGAUCU | 3373 | 1350-1370 | UAGAUCUGACACCAUAUUGCGA | 3642 | 1348-1370 |
| | A | | | G | | |
| AD-1735734 | UUCGAAGAGCUGCUCUAAUC | 3374 | 2636-2656 | UGAUUAGAGCAGCUCUUCGAAG | 3643 | 2634-2656 |
| | A | | | A | | |
| AD-1735735 | UUUCUGCUGAGAGUAUUCAG | 3375 | 4269-4289 | UCUGAAUACUCUCAGCAGAAAU | 3644 | 4267-4289 |
| | A | | | A | | |
| AD-1735736 | UUGAACAGGAAGUAUCACUG | 3376 | 2230-2250 | UCAGUGAUACUUCCUGUUCAAU | 3645 | 2228-2250 |
| | A | | | A | | |
| AD-1735737 | UGCCUUGUAUUUCCAGAGAA | 3377 | 1228-1248 | UUUCUCUGGAAAUACAAGGCAA | 3646 | 1226-1248 |
| | A | | | C | | |
| AD-1735738 | GUUACUAUGGCAGUUGCAAA | 3378 | 1189-1209 | UUUUGCAACUGCCAUAGUAACU | 3647 | 1187-1209 |
| | A | | | G | | |
| AD-1735739 | AUGGCUGAAUUUUAAAGCUG | 3379 | 4338-4358 | UCAGCUUUAAAAUUCAGCCAUG | 3648 | 4336-4358 |
| | A | | | G | | |
| AD-1735740 | GUCCAUUCAUGGAUCGUUCU | 3380 | 3193-3213 | UAGAACGAUCCAUGAAUGGACU | 3649 | 3191-3213 |
| | A | | | G | | |
| AD-1735741 | UGUGUAACUCCUAUGAUGCU | 3381 | 3268-3288 | UAGCAUCAUAGGAGUUACACAG | 3650 | 3266-3288 |
| | A | | | G | | |
| AD-1735742 | UGGCAGUUUCCCACUCCUAU | 3382 | 3763-3783 | UAUAGGAGUGGGAAACUGCCAG | 3651 | 3761-3783 |
| | A | | | C | | |
| AD-1735743 | CCUCAAGCAGAUGAGAUUCA | 3383 | 3561-3581 | UUGAAUCUCAUCUGCUUGAGGU | 3652 | 3559-3581 |
| | A | | | A | | |
| AD-1735744 | AUGUUGUUUUCUCAAAAGCA | 3384 | 5539-5559 | UUGCUUUUGAGAAAACAACAUA | 3653 | 5537-5559 |
| | A | | | A | | |
| AD-1735745 | GAGGGAUUUCUGCUCAAUGC | 3385 | 4111-4131 | UGCAUUGAGCAGAAAUCCCUCA | 3654 | 4109-4131 |
| | A | | | G | | |
| AD-1735746 | GCCUUCUUCUUCCUCACCUG | 3386 | 654-674 | UCAGGUGAGGAAGAAGAAGGCA | 3655 | 652-674 |
| | A | | | C | | |
| AD-1735747 | UUGAGAUUGAAUCACAUUUC | 3387 | 5471-5491 | UGAAAUGUGAUUCAAUCUCAAU | 3656 | 5469-5491 |
| | A | | | A | | |
| AD-1735748 | CUGUUCAGUGCUAUUCUCCC | 3388 | 4137-4157 | UGGGAGAAUAGCACUGAACAGU | 3657 | 4135-4157 |
| | A | | | G | | |
| AD-1735749 | CCUGGCUUACAGCAGAUCCA | 3389 | 2544-2564 | UUGGAUCUGCUGUAAGCCAGGA | 3658 | 2542-2564 |
| | A | | | A | | |
| AD-1735750 | GACAGCAGAAAAUUAUUUCA | 3390 | 2157-2177 | UUGAAAUAAUUUUCUGCUGUCU | 3659 | 2155-2177 |
| | A | | | U | | |
| AD-1735751 | UUGGGUUUCUUUAGUUUAUG | 3391 | 5522-5542 | UCAUAAACUAAAGAAACCCAAU | 3660 | 5520-5542 |
| | A | | | A | | |
| AD-1735752 | CACCAUGUAGGUCUCAGAAG | 3392 | 1770-1790 | UCUUCUGAGACCUACAUGGUGA | 3661 | 1768-1790 |
| | A | | | G | | |
| AD-1735753 | GUUGUGGAACAGGAAAUGAA | 3393 | 2569-2589 | UUUCAUUUCCUGUUCCACAACC | 3662 | 2567-2589 |
| | A | | | A | | |
| AD-1735754 | GGAGAACAUAUCAUAUUUUG | 3394 | 4988-5008 | UCAAAAUAUGAUAUGUUCUCCA | 3663 | 4986-5008 |
| | A | | | A | | |
| AD-1735755 | CAGCCAAAAUGAUGGCAAAA | 3395 | 4940-4960 | UUUUUGCCAUCAUUUUGGCUGC | 3664 | 4938-4960 |
| | A | | | U | | |
| AD-1735756 | CCAAUUUUUGAACUUGUAGA | 3396 | 2310-2330 | UUCUACAAGUUCAAAAAUUGGA | 3665 | 2308-2330 |
| | A | | | A | | |
| AD-1735757 | AUAGGAAUAGUUUGCCAACU | 3397 | 1558-1578 | UAGUUGGCAAACUAUUCCUAUU | 3666 | 1556-1578 |
| | A | | | U | | |
| AD-1735758 | UUUGAAUGUUUUGGAGAAAA | 3398 | 4051-4071 | UUUUUCUCCAAAACAUUCAAAG | 3667 | 4049-4071 |
| | A | | | A | | |
| AD-1735759 | GUCAAUAUUUAAUGAAUCAC | 3399 | 5172-5192 | UGUGAUUCAUUAAAUAUUGACA | 3668 | 5170-5192 |
| | A | | | C | | |
| AD-1735760 | UGAGAAUAUAUUAAAUGCAC | 3400 | 5764-5784 | UGUGCAUUUAAUAUAUUCUCAC | 3669 | 5762-5784 |
| | A | | | A | | |
| AD-1735761 | UAACAAGGGACUAAAUAGGA | 3401 | 1544-1564 | UUCCUAUUUAGUCCCUUGUUAA | 3670 | 1542-1564 |
| | A | | | G | | |
| AD-1735762 | GGCUUCUUCUUCCACCUCUG | 3402 | 408-428 | UCAGAGGUGGAAGAAGAAGCCG | 3671 | 406-428 |
| | A | | | C | | |
| AD-1735763 | UUGGAACAUGUGGUUAUCUU | 3403 | 4573-4593 | UAAGAUAACCACAUGUUCCAAU | 3672 | 4571-4593 |
| | A | | | U | | |
| AD-1735764 | CAGAGAACAGAUGAUUCUUU | 3404 | 1241-1261 | UAAAGAAUCAUCUGUUCUCUGG | 3673 | 1239-1261 |
| | A | | | A | | |
| AD-1735765 | CUGUUAUUUUAUUGGGUUUU | 3405 | 5499-5519 | UAAAACCCAAUAAAAUAACAGA | 3674 | 5497-5519 |
| | A | | | C | | |
| AD-1735766 | AUGAAGAAGCAAAUCUUGGU | 3406 | 3163-3183 | UACCAAGAUUUGCUUCUUCAUC | 3675 | 3161-3183 |
| | A | | | U | | |
| AD-1735767 | UUUGGAAUCAUGCAAUUUUG | 3407 | 5004-5024 | UCAAAAUUGCAUGAUUCCAAAA | 3676 | 5002-5024 |
| | A | | | U | | |
| AD-1735768 | CAAUGUUUUGUAAACUUGCU | 3408 | 4869-4889 | UAGCAAGUUUACAAAACAUUGU | 3677 | 4867-4889 |
| | A | | | A | | |
| AD-1735769 | GGAUCGUAAUAAUGGCAAAA | 3409 | 1640-1660 | UUUUUGCCAUUAUUACGAUCCC | 3678 | 1638-1660 |
| | A | | | A | | |
| AD-1735770 | GUGCUUUCUCAGGUUCCUGU | 3410 | 1435-1455 | UACAGGAACCUGAGAAAGCACC | 3679 | 1433-1455 |
| | A | | | C | | |
| AD-1735771 | AUGAUACUGAAAGUGGUGAU | 3411 | 3331-3351 | UAUCACCACUUUCAGUAUCAUU | 3680 | 3329-3351 |
| | A | | | A | | |
| AD-1735772 | UCACUGGACCUGAUUUUAGU | 3412 | 2244-2264 | UACUAAAAUCAGGUCCAGUGAU | 3681 | 2242-2264 |
| | A | | | A | | |
| AD-1735773 | GAACUUUUUGCUUUUAUGAA | 3413 | 3991-4011 | UUUCAUAAAAGCAAAAAGUUCC | 3682 | 3989-4011 |
| | A | | | U | | |
| AD-1735774 | GAACACAGCACAGAUUUGUU | 3414 | 4451-4471 | UAACAAAUCUGUGCUGUGUUCA | 3683 | 4449-4471 |
| | A | | | U | | |
| AD-1735775 | AUAUGGAAGGAAAUCGUAGA | 3415 | 3483-3503 | UUCUACGAUUUCCUUCCAUAUC | 3684 | 3481-3503 |
| | A | | | U | | |
| AD-1735776 | GCUAUCUAAAUGGGCCUUUU | 3416 | 1696-1716 | UAAAAGGCCCAUUUAGAUAGCA | 3685 | 1694-1716 |
| | A | | | U | | |
| AD-1735777 | CAAAACCACCAAGAAGGAAA | 3417 | 3409-3429 | UUUUCCUUCUUGGUGGUUUUGG | 3686 | 3407-3429 |
| | A | | | A | | |
| AD-1735778 | CCACAGAUGUGCUACAUGCA | 3418 | 2497-2517 | UUGCAUGUAGCACAUCUGUGGC | 3687 | 2495-2517 |
| | A | | | A | | |
| AD-1735779 | AAAGUCAUACAUGUACAAGC | 3419 | 5444-5464 | UGCUUGUACAUGUAUGACUUUA | 3688 | 5442-5464 |
| | A | | | U | | |
| AD-1735780 | UAGAAGCAGAAGAGGAUAAU | 3420 | 3313-3333 | UAUUAUCCUCUUCUGCUUCUAA | 3689 | 3311-3333 |
| | A | | | C | | |
| AD-1735781 | CGUGUGUUCGCACAGCUUGA | 3421 | 611-631 | UUCAAGCUGUGCGAACACACGC | 3690 | 609-631 |
| | A | | | U | | |
| AD-1735782 | GCUGGUGUUUUGUCCAGUCU | 3422 | 1791-1811 | UAGACUGGACAAAACACCAGCU | 3691 | 1789-1811 |
| | A | | | C | | |
| AD-1735783 | AUGGAAAACAAUCUAAAUCC | 3423 | 3390-3410 | UGGAUUUAGAUUGUUUUCCAUU | 3692 | 3388-3410 |
| | A | | | U | | |
| AD-1735784 | CAUUAGAAAAUGGCUAUCGA | 3424 | 2449-2469 | UUCGAUAGCCAUUUUCUAAUGC | 3693 | 2447-2469 |
| | A | | | A | | |
| AD-1735785 | AUGGACAGAAGGCAUUGUCA | 3425 | 3122-3142 | UUGACAAUGCCUUCUGUCCAUU | 3694 | 3120-3142 |
| | A | | | U | | |
| AD-1735786 | CAGAUUGCUGCAGUGGAAAA | 3426 | 2056-2076 | UUUUUCCACUGCAGCAAUCUGU | 3695 | 2054-2076 |
| | A | | | A | | |
| AD-1735787 | AGGUGGAAAUGGAGUUGAUC | 3427 | 1310-1330 | UGAUCAACUCCAUUUCCACCUC | 3696 | 1308-1330 |
| | A | | | C | | |
| AD-1735788 | CUGGGCAAUGCACCUAAUAC | 3428 | 1935-1955 | UGUAUUAGGUGCAUUGCCCAGA | 3697 | 1933-1955 |
| | A | | | G | | |
| AD-1735789 | AUUUCCCUCUGCCUAAAGAC | 3429 | 4652-4672 | UGUCUUUAGGCAGAGGGAAAUU | 3698 | 4650-4672 |
| | A | | | A | | |
| AD-1735790 | CGCUUCUGCAACGUGGAGCU | 3430 | 429-449 | UAGCUCCACGUUGCAGAAGCGG | 3699 | 427-449 |
| | A | | | C | | |
| AD-1735791 | AGAUUCAUAUUGUAUUUCCC | 3431 | 4014-4034 | UGGGAAAUACAAUAUGAAUCUA | 3700 | 4012-4034 |
| | A | | | U | | |
| AD-1735792 | AGGACAAAUGCAUUUCUAGU | 3432 | 2754-2774 | UACUAGAAAUGCAUUUGUCCUC | 3701 | 2752-2774 |
| | A | | | C | | |
| AD-1735793 | UUAGACGUGUUGAGUGAGUG | 3433 | 5205-5225 | UCACUCACUCAACACGUCUAAU | 3702 | 5203-5225 |
| | A | | | A | | |
| AD-1735794 | CUGUGGACAUCAAAUGCUGA | 3434 | 2006-2026 | UUCAGCAUUUGAUGUCCACAGC | 3703 | 2004-2026 |
| | A | | | U | | |
| AD-1735795 | AGGCCUUAAUACUGUGAGAG | 3435 | 3729-3749 | UCUCUCACAGUAUUAAGGCCUG | 3704 | 3727-3749 |
| | A | | | U | | |
| AD-1735796 | AGAAAUCAUUGCCUAGUGUU | 3436 | 3672-3692 | UAACACUAGGCAAUGAUUUCUG | 3705 | 3670-3692 |
| | A | | | C | | |
| AD-1735797 | UGAGUGCUGAGUUCCUUGCU | 3437 | 5219-5239 | UAGCAAGGAACUCAGCACUCAC | 3706 | 5217-5239 |
| | A | | | U | | |
| AD-1735798 | GCCAUGCAUGAUUAUGAUCA | 3438 | 2727-2747 | UUGAUCAUAAUCAUGCAUGGCA | 3707 | 2725-2747 |
| | A | | | G | | |
| AD-1735799 | UGCUGCUGGUUUGCUACCAG | 3439 | 3284-3304 | UCUGGUAGCAAACCAGCAGCAU | 3708 | 3282-3304 |
| | A | | | C | | |
| AD-1735800 | CAGAUGAAGAGGAAUAGCGA | 3440 | 3595-3615 | UUCGCUAUUCCUCUUCAUCUGC | 3709 | 3593-3615 |
| | A | | | C | | |
| AD-1735801 | AUCCAGGUGCAUCAAUUUCU | 3441 | 4207-4227 | UAGAAAUUGAUGCACCUGGAUU | 3710 | 4205-4227 |
| | A | | | U | | |
| AD-1735802 | AAUAAGCCAAGCGUUAUCUU | 3442 | 1905-1925 | UAAGAUAACGCUUGGCUUAUUA | 3711 | 1903-1925 |
| | A | | | A | | |
| AD-1735803 | GAGAGGAUCCUUGCUCUGCU | 3443 | 3744-3764 | UAGCAGAGCAAGGAUCCUCUCA | 3712 | 3742-3764 |
| | A | | | C | | |
| AD-1735804 | AUGAUGAAGACGGUGAAGAA | 3444 | 3349-3369 | UUUCUUCACCGUCUUCAUCAUC | 3713 | 3347-3369 |
| | A | | | A | | |
| AD-1735805 | UCGUAAGUGUAAGAAAGAAU | 3445 | 5743-5763 | UAUUCUUUCUUACACUUACGAA | 3714 | 5741-5763 |
| | A | | | U | | |
| AD-1735806 | AUCUGUGUAACAGCUGUGGA | 3446 | 1993-2013 | UUCCACAGCUGUUACACAGAUU | 3715 | 1991-2013 |
| | A | | | G | | |
| AD-1735807 | AUUUAAAAUUCCCACUCAAC | 3447 | 2408-2428 | UGUUGAGUGGGAAUUUUAAAUA | 3716 | 2406-2428 |
| | A | | | U | | |
| AD-1735808 | GACCAGUGUCUACUGGCUCU | 3448 | 1837-1857 | UAGAGCCAGUAGACACUGGUCC | 3717 | 1835-1857 |
| | A | | | A | | |
| AD-1735809 | CGCUUUCGUUUUUUAGUCAU | 3449 | 2913-2933 | UAUGACUAAAAAACGAAAGCGC | 3718 | 2911-2933 |
| | A | | | U | | |
| AD-1735810 | UCCGUGUUGACCCAUGUUGC | 3450 | 3829-3849 | UGCAACAUGGGUCAACACGGAU | 3719 | 3827-3849 |
| | A | | | G | | |
| AD-1735811 | AUACAGAAGAUGAAGAAAUG | 3451 | 3373-3393 | UCAUUUCUUCAUCUUCUGUAUC | 3720 | 3371-3393 |
| | A | | | U | | |
| AD-1735812 | UCUCCCGAGCUGAAACUUAA | 3452 | 5719-5739 | UUUAAGUUUCAGCUCGGGAGAG | 3721 | 5717-5739 |
| | A | | | A | | |
| AD-1735813 | UGCAUCAAACUGGCAGAUAU | 3453 | 3066-3086 | UAUAUCUGCCAGUUUGAUGCAC | 3722 | 3064-3086 |
| | A | | | A | | |
| AD-1735814 | UUGCAAAAUAUUCAGGAGAC | 3454 | 1202-1222 | UGUCUCCUGAAUAUUUUGCAAC | 3723 | 1200-1222 |
| | A | | | U | | |
| AD-1735815 | ACAAUCGUAUACAUGCCACA | 3455 | 2482-2502 | UUGUGGCAUGUAUACGAUUGUG | 3724 | 2480-2502 |
| | A | | | A | | |
| AD-1735816 | AAUAGAAAAGAUGAGCAACU | 3456 | 2282-2302 | UAGUUGCUCAUCUUUUCUAUUA | 3725 | 2280-2302 |
| | A | | | A | | |
| AD-1735817 | UAUCUUAUGUUCCAUGGCUG | 3457 | 4325-4345 | UCAGCCAUGGAACAUAAGAUAA | 3726 | 4323-4345 |
| | A | | | G | | |
| AD-1735818 | CUACGUGAAGAGCUGCGUGA | 3458 | 362-382 | UUCACGCAGCUCUUCACGUAGC | 3727 | 360-382 |
| | A | | | C | | |
| AD-1735819 | GAAUUGAUGGCUCUAUACGU | 3459 | 2700-2720 | UACGUAUAGAGCCAUCAAUUCU | 3728 | 2698-2720 |
| | A | | | A | | |
| AD-1735820 | UUCAGGUAAUUGAAGAGGCA | 3460 | 3577-3597 | UUGCCUCUUCAAUUACCUGAAU | 3729 | 3575-3597 |
| | A | | | C | | |
| AD-1735821 | AAGGACUGAGUGACCUUUGU | 3461 | 4174-4194 | UACAAAGGUCACUCAGUCCUUC | 3730 | 4172-4194 |
| | A | | | A | | |
| AD-1735822 | CGAGAGUCUGAGGAACGGCU | 3462 | 344-364 | UAGCCGUUCCUCAGACUCUCGG | 3731 | 342-364 |
| | A | | | G | | |
| AD-1735823 | AUUCUUUGGGAUUGGGACUU | 3463 | 1254-1274 | UAAGUCCCAAUCCCAAAGAAUC | 3732 | 1252-1274 |
| | A | | | A | | |
| AD-1735824 | UACCAGGUCAGUGGUUAGAA | 3464 | 3298-3318 | UUUCUAACCACUGACCUGGUAG | 3733 | 3296-3318 |
| | A | | | C | | |
| AD-1735825 | AUUCAGGUUUGCCAUGGACA | 3465 | 4283-4303 | UUGUCCAUGGCAAACCUGAAUA | 3734 | 4281-4303 |
| | A | | | C | | |
| AD-1735826 | GCAGCUAAACUGGUCCUGGA | 3466 | 34-54 | UUCCAGGACCAGUUUAGCUGCC | 3735 | 32-54 |
| | A | | | G | | |
| AD-1735827 | AGUAAUGGCAUAGAAUGGAG | 3467 | 3012-3032 | UCUCCAUUCUAUGCCAUUACUA | 3736 | 3010-3032 |
| | A | | | U | | |
| AD-1735828 | AAUUGCAAGAAAAUGGACCA | 3468 | 4843-4863 | UUGGUCCAUUUUCUUGCAAUUA | 3737 | 4841-4863 |
| | A | | | U | | |
| AD-1735829 | CGGCACUGCGUUCUGGUGCU | 3469 | 921-941 | UAGCACCAGAACGCAGUGCCGG | 3738 | 919-941 |
| | A | | | A | | |
| AD-1735830 | AGUCAUAUUGAAGAAGCCCA | 3470 | 3633-3653 | UUGGGCUUCUUCAAUAUGACUU | 3739 | 3631-3653 |
| | A | | | U | | |
| AD-1735831 | UCAUCAUGCUGCGUCAGCUU | 3471 | 2828-2848 | UAAGCUGACGCAGCAUGAUGAU | 3740 | 2826-2848 |
| | A | | | U | | |
| AD-1735832 | AAAUGAUCGCCUCUUGGUAU | 3472 | 3038-3058 | UAUACCAAGAGGCGAUCAUUUU | 3741 | 3036-3058 |
| | A | | | C | | |
| AD-1735833 | AUUUGAAGAUAUAAAGAGCA | 3473 | 4922-4942 | UUGCUCUUUAUAUCUUCAAAUG | 3742 | 4920-4942 |
| | A | | | U | | |
| AD-1735834 | GGUCUCCUUCACCAGCCUCG | 3474 | 965-985 | UCGAGGCUGGUGAAGGAGACCC | 3743 | 963-985 |
| | A | | | A | | |
| AD-1735835 | GAAACAGAGAAGAAAGACAG | 3475 | 2142-2162 | UCUGUCUUUCUUCUCUGUUUCC | 3744 | 2140-2162 |
| | A | | | U | | |
| AD-1735836 | UUCUAGUGGCUACAAAUGCC | 3476 | 2767-2787 | UGGCAUUUGUAGCCACUAGAAA | 3745 | 2765-2787 |
| | A | | | U | | |
| AD-1735837 | GGAGAGAAAUCAGGAAGGAU | 3477 | 2337-2357 | UAUCCUUCCUGAUUUCUCUCCC | 3746 | 2335-2357 |
| | A | | | A | | |
| AD-1735838 | AUAUAGUGAGCCCUAAAGGA | 3478 | 4533-4553 | UUCCUUUAGGGCUCACUAUAUU | 3747 | 4531-4553 |
| | A | | | U | | |
| AD-1735839 | GCUGCCUUUGUCCUCGCCCU | 3479 | 528-548 | UAGGGCGAGGACAAAGGCAGCC | 3748 | 526-548 |
| | A | | | A | | |
| AD-1735840 | GGCAAAAGACCUCACCAAGA | 3480 | 1653-1673 | UUCUUGGUGAGGUCUUUUGCCA | 3749 | 1651-1673 |
| | A | | | U | | |
| AD-1735841 | UUCAGCAUCGCCUGUGCCUU | 3481 | 639-659 | UAAGGCACAGGCGAUGCUGAAG | 3750 | 637-659 |
| | A | | | A | | |
| AD-1735842 | GCUAAAUGAGGCUCGCAAUA | 3482 | 1337-1357 | UUAUUGCGAGCCUCAUUUAGCA | 3751 | 1335-1357 |
| | A | | | C | | |
| AD-1735843 | CAGCUUCGUCUGGUGGGUCU | 3483 | 950-970 | UAGACCCACCAGACGAAGCUGG | 3752 | 948-970 |
| | A | | | C | | |
| AD-1735844 | AUAUGGUAUUGGCAUGCAGU | 3484 | 5066-5086 | UACUGCAUGCCAAUACCAUAUU | 3753 | 5064-5086 |
| | A | | | C | | |
| AD-1735845 | AAACUGCAGGUGGAGAAUUC | 3485 | 3534-3554 | UGAAUUCUCCACCUGCAGUUUA | 3754 | 3532-3554 |
| | A | | | U | | |
| AD-1735846 | UAUGGCUGCCUGUCUUCAAA | 3486 | 2667-2687 | UUUUGAAGACAGGCAGCCAUAA | 3755 | 2665-2687 |
| | A | | | C | | |
| AD-1735847 | CUGUUCUGAAAUAGAGGACC | 3487 | 1499-1519 | UGGUCCUCUAUUUCAGAACAGG | 3756 | 1497-1519 |
| | A | | | G | | |
| AD-1735848 | UCUAUUUUUAAAGCCGCUGG | 3488 | 5898-5918 | UCCAGCGGCUUUAAAAAUAGAA | 3757 | 5896-5918 |
| | A | | | A | | |
| AD-1735849 | GCUGAGGAGAAGCUCAGGAA | 3489 | 1583-1603 | UUUCCUGAGCUUCUCCUCAGCU | 3758 | 1581-1603 |
| | A | | | G | | |
| AD-1735850 | CAAGCCUUCCACCACAAGUC | 3490 | 1381-1401 | UGACUUGUGGUGGAAGGCUUGG | 3759 | 1379-1401 |
| | A | | | A | | |
| AD-1735851 | UUCAGUUACCAAAGUGGCCA | 3491 | 3970-3990 | UUGGCCACUUUGGUAACUGAAA | 3760 | 3968-3990 |
| | A | | | U | | |
| AD-1735852 | CACCUGCUUCCUCACCCGGA | 3492 | 668-688 | UUCCGGGUGAGGAAGCAGGUGA | 3761 | 666-688 |
| | A | | | G | | |
| AD-1735853 | UUUUAUCACCCACAUAGUGG | 3493 | 3242-3262 | UCCACUAUGUGGGUGAUAAAAG | 3762 | 3240-3262 |
| | A | | | A | | |
| AD-1735854 | AGGAGACCGUCGUUGCCUUG | 3494 | 1215-1235 | UCAAGGCAACGACGGUCUCCUG | 3763 | 1213-1235 |
| | A | | | A | | |
| AD-1735855 | AUGGCCCAGCAAAAGUUCGA | 3495 | 3088-3108 | UUCGAACUUUUGCUGGGCCAUU | 3764 | 3086-3108 |
| | A | | | U | | |
| AD-1735856 | AGACGCCAAAGCCAUGCGGU | 3496 | 290-310 | UACCGCAUGGCUUUGGCGUCUC | 3765 | 288-310 |
| | A | | | G | | |
| AD-1735857 | CAGCUAAUGCACCACCUCAC | 3497 | 3450-3470 | UGUGAGGUGGUGCAUUAGCUGA | 3766 | 3448-3470 |
| | A | | | C | | |
| AD-1735858 | GGAAAAGCAGACGGCGAAUA | 3498 | 3424-3444 | UUAUUCGCCGUCUGCUUUUCCU | 3767 | 3422-3444 |
| | A | | | U | | |
| AD-1735859 | GCUUUGCUGGGUAGUGAGCU | 3499 | 3901-3921 | UAGCUCACUACCCAGCAAAGCA | 3768 | 3899-3921 |
| | A | | | G | | |
| AD-1735860 | AAAUGAAACAGAUUCUGAUG | 4576 | 2582-2602 | UCAUCAGAAUCUGUUUCAUUUC | 4577 | 2580-2602 |
| | A | | | C | | |

TABLE 15
Modified Sense and Antisense Strand Sequences of PDE3B dsRNA Agents
Comprising a GalNAc Derivative Targeting Ligand

| | | SEQ | | SEQ | | SEQ |
|---|---|---|---|---|---|---|
| Duplex | Sense Sequence | ID | Antisense Sequence | ID | mRNA Target | ID |
| Name | 5′ to 3′ | NO: | 5′ to 3′ | NO: | Sequence 5′ to 3′ | NO: |
| AD- | ususccuuCfuUfCfAfucuugau | 4578 | VPusUfsgauCfaAfGfaugaAfgAfagga | 4038 | ACUUCCUUCUUCAUCUUGA | 4307 |
| 1735591 | csasa | | asgsu | | UCAU | |
| AD- | csascucuAfaAfAfCfugauguu | 4579 | VPusUfsgaaCfaUfCfaguuUfuAfgagu | 4039 | UUCACUCUAAAACUGAUGU | 4308 |
| 1735592 | csasa | | gsasa | | UCAU | |
| AD- | uscsuucuGfuAfUfCfacugacu | 4580 | VPusUfsgagUfcAfGfugauAfcAfgaag | 4040 | CAUCUUCUGUAUCACUGAC | 4309 |
| 1735593 | csasa | | asusg | | UCAC | |
| AD- | csasgaucUfuCfUfGfacugauc | 4581 | VPusUfsggaUfcAfGfucagAfaGfaucu | 4041 | GUCAGAUCUUCUGACUGAU | 4310 |
| 1735594 | csasa | | gsasc | | CCAA | |
| AD- | usgsacacAfuUfUfUfucuccau | 4582 | VPusUfsuauGfgAfGfaaaaAfuGfuguc | 4042 | ACUGACACAUUUUUCUCCA | 4311 |
| 1735595 | asasa | | asgsu | | UAAA | |
| AD- | gsgsaaacUfcAfUfUfuuuacau | 4583 | VPusUfsuauGfuAfAfaaauGfaGfuuuc | 4043 | CUGGAAACUCAUUUUUACA | 4312 |
| 1735596 | asasa | | csasg | | UAAU | |
| AD- | asuscagcAfaCfUfUfagaaauu | 4584 | VPusAfsgaaUfuUfCfuaagUfuGfcuga | 4044 | UUAUCAGCAACUUAGAAAU | 4313 |
| 1735597 | csusa | | usasa | | UCUG | |
| AD- | csusuauaUfuUfCfUfcuagagu | 4585 | VPusGfsuacUfcUfAfgagaAfaUfauaa | 4045 | UCCUUAUAUUUCUCUAGAG | 4314 |
| 1735598 | ascsa | | gsgsa | | UACA | |
| AD- | asascuccAfaGfAfAfucuuuua | 4586 | VPusGfsauaAfaAfGfauucUfuGfgagu | 4046 | AAAACUCCAAGAAUCUUUU | 4315 |
| 1735599 | uscsa | | ususu | | AUCA | |
| AD- | csusucaaAfcAfUfUfccugcau | 4587 | VPusUfsaauGfcAfGfgaauGfuUfugaa | 4047 | GUCUUCAAACAUUCCUGCA | 4316 |
| 1735600 | usasa | | gsasc | | UUAG | |
| AD- | uscsguucUfuCfUfCfcucaacu | 4588 | VPusCfsuagUfuGfAfggagAfaGfaacg | 4048 | GAUCGUUCUUCUCCUCAAC | 4317 |
| 1735601 | asgsa | | asusc | | UAGC | |
| AD- | asasagauUfaAfUfCfcucucac | 4589 | VPusGfsuguGfaGfAfggauUfaAfucuu | 4049 | CCAAAGAUUAAUCCUCUCA | 4318 |
| 1735602 | ascsa | | usgsg | | CACC | |
| AD- | ascsuaacCfuCfAfUfcaaagau | 4590 | VPusGfsuauCfuUfUfgaugAfgGfuuag | 4050 | AAACUAACCUCAUCAAAGA | 4319 |
| 1735603 | ascsa | | ususu | | UACA | |
| AD- | csasccacUfuAfUfUfacuaaua | 4591 | VPusUfsuuaUfuAfGfuaauAfaGfuggu | 4051 | CCCACCACUUAUUACUAAU | 4320 |
| 1735604 | asasa | | gsgsg | | AAAA | |
| AD- | usgsguacUfaGfAfAfauauucu | 4592 | VPusAfsaagAfaUfAfuuucUfaGfuacc | 4052 | GCUGGUACUAGAAAUAUUC | 4321 |
| 1735605 | ususa | | asgsc | | UUUU | |
| AD- | gscsugucAfuUfUfGfuucacuc | 4593 | VPusUfsagaGfuGfAfacaaAfuGfacag | 4053 | UAGCUGUCAUUUGUUCACU | 4322 |
| 1735606 | usasa | | csusa | | CUAA | |
| AD- | ascsucaaCfaAfUfUfuaugaac | 4594 | VPusUfsaguUfcAfUfaaauUfgUfugag | 4054 | CCACUCAACAAUUUAUGAA | 4323 |
| 1735607 | usasa | | usgsg | | CUAU | |
| AD- | asgsuaugAfcUfCfAfuuaauag | 4595 | VPusUfsucuAfuUfAfaugaGfuCfauac | 4055 | AGAGUAUGACUCAUUAAUA | 4324 |
| 1735608 | asasa | | uscsu | | GAAA | |
| AD- | csusgcugAfuUfUfUfcuuaaua | 4596 | VPusCfsuuaUfuAfAfgaaaAfuCfagca | 4056 | UACUGCUGAUUUUCUUAAU | 4325 |
| 1735609 | asgsa | | gsusa | | AAGC | |
| AD- | usasucuuUfaGfAfUfccacauc | 4597 | VPusAfsagaUfgUfGfgaucUfaAfagau | 4057 | GUUAUCUUUAGAUCCACAU | 4326 |
| 1735610 | ususa | | asasc | | CUUA | |
| AD- | csgsagacAfuUfCfCfuuaucac | 4598 | VPusUfsuguGfaUfAfaggaAfuGfucuc | 4058 | AUCGAGACAUUCCUUAUCA | 4327 |
| 1735611 | asasa | | gsasu | | CAAU | |
| AD- | usascugaAfuCfAfGfauuaauu | 4599 | VPusGfsaaaUfuAfAfucugAfuUfcagu | 4059 | GUUACUGAAUCAGAUUAAU | 4328 |
| 1735612 | uscsa | | asasc | | UUCU | |
| AD- | csusuacuUfaAfAfUfccuucac | 4600 | VPusCfsaguGfaAfGfgauuUfaAfguaa | 4060 | CCCUUACUUAAAUCCUUCA | 4329 |
| 1735613 | usgsa | | gsgsg | | CUGG | |
| AD- | uscsgaaaGfaAfUfCfauucaaa | 4601 | VPusAfsguuUfgAfAfugauUfcUfuucg | 4061 | UCUCGAAAGAAUCAUUCAA | 4330 |
| 1735614 | csusa | | asgsa | | ACUU | |
| AD- | asasaugaCfcUfAfUfcacuacu | 4602 | VPusUfsaagUfaGfUfgauaGfgUfcauu | 4062 | AGAAAUGACCUAUCACUAC | 4331 |
| 1735615 | usasa | | uscsu | | UUAU | |
| AD- | csasagucAfuUfUfCfcucucua | 4603 | VPusCfsguaGfaGfAfggaaAfuGfacuu | 4063 | CACAAGUCAUUUCCUCUCU | 4332 |
| 1735616 | csgsa | | gsusg | | ACGG | |
| AD- | asusgcagUfuUfCfUfuacuuau | 4604 | VPusAfsgauAfaGfUfaagaAfaCfugca | 4064 | GCAUGCAGUUUCUUACUUA | 4333 |
| 1735617 | csusa | | usgsc | | UCUA | |
| AD- | uscsaaugCfaAfUfAfcacuguu | 4605 | VPusUfsgaaCfaGfUfguauUfgCfauug | 4065 | GCUCAAUGCAAUACACUGU | 4334 |
| 1735618 | csasa | | asgsc | | UCAG | |
| AD- | uscsuaugUfaCfCfUfacugaca | 4606 | VPusUfsgugUfcAfGfuaggUfaCfauag | 4066 | UAUCUAUGUACCUACUGAC | 4335 |
| 1735619 | csasa | | asusa | | ACAU | |
| AD- | usgsaauuCfcAfGfUfcuuaucu | 4607 | VPusUfsaagAfuAfAfgacuGfgAfauuc | 4067 | UUUGAAUUCCAGUCUUAUC | 4336 |
| 1735620 | usasa | | asasa | | UUAU | |
| AD- | ususgcugUfaAfUfAfccaaaac | 4608 | VPusUfsaguUfuUfGfguauUfaCfagca | 4068 | AUUUGCUGUAAUACCAAAA | 4337 |
| 1735621 | usasa | | asasu | | CUAA | |
| AD- | gsgsaucaCfuUfCfUfuucaaau | 4609 | VPusUfsgauUfuGfAfaagaAfgUfgauc | 4069 | UUGGAUCACUUCUUUCAAA | 4338 |
| 1735622 | csasa | | csasa | | UCAG | |
| AD- | gsasacuaGfaAfAfAfcuauucu | 4610 | VPusUfsaagAfaUfAfguuuUfcUfaguu | 4070 | AGGAACUAGAAAACUAUUC | 4339 |
| 1735623 | usasa | | cscsu | | UUAA | |
| AD- | ascsauuuCfcAfUfAfcugucug | 4611 | VPusAfsacaGfaCfAfguauGfgAfaaug | 4071 | UCACAUUUCCAUACUGUCU | 4340 |
| 1735624 | ususa | | usgsa | | GUUA | |
| AD- | usgsauccUfuCfAfCfaguguca | 4612 | VPusAfsuugAfcAfCfugugAfaGfgauc | 4072 | UUUGAUCCUUCACAGUGUC | 4341 |
| 1735625 | asusa | | asasa | | AAUA | |
| AD- | gsasuuucUfgAfGfAfacaagua | 4613 | VPusUfsuuaCfuUfGfuucuCfaGfaaau | 4073 | CUGAUUUCUGAGAACAAGU | 4342 |
| 1735626 | asasa | | csasg | | AAAG | |
| AD- | cscsuacuUfgUfGfAfaauacau | 4614 | VPusAfsaauGfuAfUfuucaCfaAfguag | 4074 | ACCCUACUUGUGAAAUACA | 4343 |
| 1735627 | ususa | | gsgsu | | UUUG | |
| AD- | csasacugGfaAfUfUfuuccaau | 4615 | VPusAfsaauUfgGfAfaaauUfcCfaguu | 4075 | AGCAACUGGAAUUUUCCAA | 4344 |
| 1735628 | ususa | | gscsu | | UUUU | |
| AD- | uscsuaauCfcUfGfAfugagagu | 4616 | VPusUfsaacUfcUfCfaucaGfgAfuuag | 4076 | GCUCUAAUCCUGAUGAGAG | 4345 |
| 1735629 | usasa | | asgsc | | UUAU | |
| AD- | asgsccucAfuUfAfUfcaaaauu | 4617 | VPusAfsgaaUfuUfUfgauaAfuGfaggc | 4077 | UAAGCCUCAUUAUCAAAAU | 4346 |
| 1735630 | csusa | | ususa | | UCUG | |
| AD- | asasuuucUfgAfUfGfcuuuuua | 4618 | VPusAfsguaAfaAfAfgcauCfaGfaaau | 4078 | UCAAUUUCUGAUGCUUUUU | 4347 |
| 1735631 | csusa | | usgsa | | ACUA | |
| AD- | usasccauUfaGfAfUfgaaaucu | 4619 | VPusUfsaagAfuUfUfcaucUfaAfuggu | 4079 | UGUACCAUUAGAUGAAAUC | 4348 |
| 1735632 | usasa | | ascsa | | UUAC | |
| AD- | csusgugaAfuUfCfUfuccaacc | 4620 | VPusAfsuggUfuGfGfaagaAfuUfcaca | 4080 | UCCUGUGAAUUCUUCCAAC | 4349 |
| 1735633 | asusa | | gsgsa | | CAUG | |
| AD- | csusaauaCfuCfCfAfgauuuuu | 4621 | VPusAfsuaaAfaAfUfcuggAfgUfauua | 4081 | ACCUAAUACUCCAGAUUUU | 4350 |
| 1735634 | asusa | | gsgsu | | UAUC | |
| AD- | gsgsacacAfuAfCfAfuugaaua | 4622 | VPusUfsuuaUfuCfAfauguAfuGfuguc | 4082 | AAGGACACAUACAUUGAAU | 4351 |
| 1735635 | asasa | | csusu | | AAAU | |
| AD- | ususugucAfuAfAfUfgcugcuu | 4623 | VPusCfsaaaGfcAfGfcauuAfuGfacaa | 4083 | ACUUUGUCAUAAUGCUGCU | 4352 |
| 1735636 | usgsa | | asgsu | | UUGC | |
| AD- | ususcaucUfuUfCfUfguuaauu | 4624 | VPusGfsaaaUfuAfAfcagaAfaGfauga | 4084 | UGUUCAUCUUUCUGUUAAU | 4353 |
| 1735637 | uscsa | | ascsa | | UUCC | |
| AD- | csasgugaAfaCfCfAfuuaauuu | 4625 | VPusGfsaaaAfuUfAfauggUfuUfcacu | 4085 | CACAGUGAAACCAUUAAUU | 4354 |
| 1735638 | uscsa | | gsusg | | UUCC | |
| AD- | usasacugCfaAfGfAfcugauuu | 4626 | VPusAfsgaaAfuCfAfgucuUfgCfaguu | 4086 | CCUAACUGCAAGACUGAUU | 4355 |
| 1735639 | csusa | | asgsg | | UCUG | |
| AD- | asgsaauuCfcUfCfCfuuaccuc | 4627 | VPusUfsugaGfgUfAfaggaGfgAfauuc | 4087 | GGAGAAUUCCUCCUUACCU | 4356 |
| 1735640 | asasa | | uscsc | | CAAG | |
| AD- | usasuuacAfgAfUfCfuuacuuu | 4628 | VPusAfscaaAfgUfAfagauCfuGfuaau | 4088 | CAUAUUACAGAUCUUACUU | 4357 |
| 1735641 | gsusa | | asusg | | UGUU | |
| AD- | ususaucuGfaAfAfGfauaucaa | 4629 | VPusAfsauuGfaUfAfucuuUfcAfgaua | 4089 | GCUUAUCUGAAAGAUAUCA | 4358 |
| 1735642 | ususa | | asgsc | | AUUU | |
| AD- | asgsaucuGfuUfCfUfggaaaau | 4630 | VPusUfsgauUfuUfCfcagaAfcAfgauc | 4090 | ACAGAUCUGUUCUGGAAAA | 4359 |
| 1735643 | csasa | | usgsu | | UCAU | |
| AD- | cscscagaAfuAfCfAfacuuccu | 4631 | VPusGfsaagGfaAfGfuuguAfuUfcugg | 4091 | CGCCCAGAAUACAACUUCC | 4360 |
| 1735644 | uscsa | | gscsg | | UUCU | |
| AD- | gsusugauCfuUfUfCfagugcua | 4632 | VPusUfsuuaGfcAfCfugaaAfgAfucaa | 4092 | GAGUUGAUCUUUCAGUGCU | 4361 |
| 1735645 | asasa | | csusc | | AAAU | |
| AD- | csusaagcUfuUfAfUfuuauuag | 4633 | VPusGfsucuAfaUfAfaauaAfaGfcuua | 4093 | CACUAAGCUUUAUUUAUUA | 4362 |
| 1735646 | ascsa | | gsusg | | GACG | |
| AD- | asgscuugGfaAfUfCfuauaucu | 4634 | VPusAfsaagAfuAfUfagauUfcCfaagc | 4094 | UCAGCUUGGAAUCUAUAUC | 4363 |
| 1735647 | ususa | | usgsa | | UUUC | |
| AD- | ususauuaUfuUfCfUfgaagccu | 4635 | VPusUfsuagGfcUfUfcagaAfaUfaaua | 4095 | ACUUAUUAUUUCUGAAGCC | 4364 |
| 1735648 | asasa | | asgsu | | UAAC | |
| AD- | cscsuuugUfuGfUfAfuuuaaca | 4636 | VPusUfsuugUfuAfAfauacAfaCfaaag | 4096 | GACCUUUGUUGUAUUUAAC | 4365 |
| 1735649 | asasa | | gsusc | | AAAA | |
| AD- | gscsucucUfaAfCfUfaaucgau | 4637 | VPusUfsgauCfgAfUfuaguUfaGfagag | 4097 | UGGCUCUCUAACUAAUCGA | 4366 |
| 1735650 | csasa | | cscsa | | UCAC | |
| AD- | asasagacUfaCfAfUfgacagaa | 4638 | VPusAfsuuuCfuGfUfcaugUfaGfucuu | 4098 | CUAAAGACUACAUGACAGA | 4367 |
| 1735651 | asusa | | usasg | | AAUG | |
| AD- | csasggauUfcGfUfAfuuuuuaa | 4639 | VPusCfsuuuAfaAfAfauacGfaAfuccu | 4099 | CUCAGGAUUCGUAUUUUUA | 4368 |
| 1735652 | asgsa | | gsasg | | AAGA | |
| AD- | cscsuugcUfaAfGfUfaauugac | 4640 | VPusAfsuguCfaAfUfuacuUfaGfcaag | 4100 | ACCCUUGCUAAGUAAUUGA | 4369 |
| 1735653 | asusa | | gsgsu | | CAUA | |
| AD- | cscsuaugCfaCfUfUfucacagg | 4641 | VPusUfsuccUfgUfGfaaagUfgCfauag | 4101 | CUCCUAUGCACUUUCACAG | 4370 |
| 1735654 | asasa | | gsasg | | GAAC | |
| AD- | asusgcugAfaAfUfAfuguuuca | 4642 | VPusGfsuugAfaAfCfauauUfuCfagca | 4102 | AAAUGCUGAAAUAUGUUUC | 4371 |
| 1735655 | ascsa | | ususu | | AACA | |
| AD- | cscsuuuuAfaUfUfCfaaaucua | 4643 | VPusAfsguaGfaUfUfugaaUfuAfaaag | 4103 | GGCCUUUUAAUUCAAAUCU | 4372 |
| 1735656 | csusa | | gscsc | | ACUG | |
| AD- | ascsuggaCfuUfAfUfuggauuu | 4644 | VPusUfsuaaAfuCfCfaauaAfgUfccag | 4104 | AUACUGGACUUAUUGGAUU | 4373 |
| 1735657 | asasa | | usasu | | UAAU | |
| AD- | csasucugAfaUfCfAfgauggua | 4645 | VPusUfsguaCfcAfUfcugaUfuCfagau | 4105 | AACAUCUGAAUCAGAUGGU | 4374 |
| 1735658 | csasa | | gsusu | | ACAG | |
| AD- | asasuucuGfaUfAfGfcaaucug | 4646 | VPusCfsacaGfaUfUfgcuaUfcAfgaau | 4106 | GAAAUUCUGAUAGCAAUCU | 4375 |
| 1735659 | usgsa | | ususc | | GUGU | |
| AD- | uscsaaguCfaAfGfGfaugcuau | 4647 | VPusAfsgauAfgCfAfuccuUfgAfcuug | 4107 | UUUCAAGUCAAGGAUGCUA | 4376 |
| 1735660 | csusa | | asasa | | UCUA | |
| AD- | uscsacugAfaAfAfCfcacaaga | 4648 | VPusUfsaucUfuGfUfgguuUfuCfagug | 4108 | CCUCACUGAAAACCACAAG | 4377 |
| 1735661 | usasa | | asgsg | | AUAU | |
| AD- | ascscuguUfgAfAfCfagucuuc | 4649 | VPusUfsugaAfgAfCfuguuCfaAfcagg | 4109 | CUACCUGUUGAACAGUCUU | 4378 |
| 1735662 | asasa | | usasg | | CAAG | |
| AD- | uscsaaguGfaCfAfUfauuucag | 4650 | VPusAfsacuGfaAfAfuaugUfcAfcuug | 4110 | ACUCAAGUGACAUAUUUCA | 4379 |
| 1735663 | ususa | | asgsu | | GUUA | |
| AD- | uscsaggaAfcUfUfCfaggauug | 4651 | VPusAfsgcaAfuCfCfugaaGfuUfccug | 4111 | GCUCAGGAACUUCAGGAUU | 4380 |
| 1735664 | csusa | | asgsc | | GCUA | |
| AD- | ascsggagUfaUfUfAfguagcuu | 4652 | VPusUfsuaaGfcUfAfcuaaUfaCfuccg | 4112 | CUACGGAGUAUUAGUAGCU | 4381 |
| 1735665 | asasa | | usasg | | UAAU | |
| AD- | asusugucAfaUfGfAfauuuuau | 4653 | VPusUfscauAfaAfAfuucaUfuGfacaa | 4113 | GCAUUGUCAAUGAAUUUUA | 4382 |
| 1735666 | gsasa | | usgsc | | UGAG | |
| AD- | gsasacagCfaAfAfCfaaauauu | 4654 | VPusUfscaaUfaUfUfuguuUfgCfuguu | 4114 | GUGAACAGCAAACAAAUAU | 4383 |
| 1735667 | gsasa | | csasc | | UGAA | |
| AD- | usgsaacuAfuUfUfUfcgugcau | 4655 | VPusUfsaauGfcAfCfgaaaAfuAfguuc | 4115 | UAUGAACUAUUUUCGUGCA | 4384 |
| 1735668 | usasa | | asusa | | UUAG | |
| AD- | ascsuggaAfuAfCfUfUauuuuu | 4656 | VPusUfsgaaAfaAfUfaaguAfuUfccag | 4116 | GAACUGGAAUACUUAUUUU | 4385 |
| 1735669 | csasa | | ususc | | UCAU | |
| AD- | ususaucuUfgCfAfGfagaucuc | 4657 | VPusCfsagaGfaUfCfucugCfaAfgaua | 4117 | CGUUAUCUUGCAGAGAUCU | 4386 |
| 1735670 | usgsa | | ascsg | | CUGG | |
| AD- | gsasagugUfuAfGfAfauuuuu | 4658 | VPusAfsucaAfaAfAfuucuAfaCfacuu | 4118 | UGGAAGUGUUAGAAUUUUU | 4387 |
| 1735671 | gasusa | | cscsa | | GAUC | |
| AD- | uscsaauuUfaAfGfAfucucugg | 4659 | VPusUfsuccAfgAfGfaucuUfaAfauug | 4119 | UAUCAAUUUAAGAUCUCUG | 4388 |
| 1735672 | asasa | | asusa | | GAAG | |
| AD- | usgsgaccAfuAfUfUfuacaaug | 4660 | VPusAfsacaUfuGfUfaaauAfuGfgucc | 4120 | AAUGGACCAUAUUUACAAU | 4389 |
| 1735673 | ususa | | asusu | | GUUU | |
| AD- | usasgucaUfuGfAfAfgcaaucc | 4661 | VPusAfsaggAfuUfGfcuucAfaUfgacu | 4121 | UUUAGUCAUUGAAGCAAUC | 4390 |
| 1735674 | ususa | | asasa | | CUUG | |
| AD- | asgscuguUfuAfGfGfuuuaaca | 4662 | VPusAfsuugUfuAfAfaccuAfaAfcagc | 4122 | AAAGCUGUUUAGGUUUAAC | 4391 |
| 1735675 | asusa | | ususu | | AAUG | |
| AD- | csasaggcAfaAfUfGfauguaaa | 4663 | VPusUfsauuUfaCfAfucauUfuGfccuu | 4123 | GCCAAGGCAAAUGAUGUAA | 4392 |
| 1735676 | usasa | | gsgsc | | AUAG | |
| AD- | asusccaaUfuAfCfUfacuggaa | 4664 | VPusGfsuuuCfcAfGfuaguAfaUfugga | 4124 | AAAUCCAAUUACUACUGGA | 4393 |
| 1735677 | ascsa | | ususu | | AACU | |
| AD- | ascsuuacAfaUfAfUfauauauc | 4665 | VPusAfsggaUfaUfAfuauaUfuGfuaag | 4125 | GCACUUACAAUAUAUAUAU | 4394 |
| 1735678 | csusa | | usgsc | | CCUG | |
| AD- | asusgcagUfuUfGfGfuaucuga | 4666 | VPusUfsgucAfgAfUfaccaAfaCfugca | 4126 | ACAUGCAGUUUGGUAUCUG | 4395 |
| 1735679 | csasa | | usgsu | | ACAA | |
| AD- | cscsuuauUfuCfAfAfgacacug | 4667 | VPusAfsccaGfuGfUfcuugAfaAfuaag | 4127 | UACCUUAUUUCAAGACACU | 4396 |
| 1735680 | gsusa | | gsusa | | GGUU | |
| AD- | gsasagggAfuUfUfAfuucuuua | 4668 | VPusAfscuaAfaGfAfauaaAfuCfccuu | 4128 | AUGAAGGGAUUUAUUCUUU | 4397 |
| 1735681 | gsusa | | csasu | | AGUC | |
| AD- | asusccuuGfcUfAfCfggaucuu | 4669 | VPusUfsuaaGfaUfCfcguaGfcAfagga | 4129 | CAAUCCUUGCUACGGAUCU | 4398 |
| 1735682 | asasa | | ususg | | UAAA | |
| AD- | ascsugacUfaUfCfCfcgaagca | 4670 | VPusUfsuugCfuUfCfgggaUfaGfucag | 4130 | CUACUGACUAUCCCGAAGC | 4399 |
| 1735683 | asasa | | usasg | | AAAG | |
| AD- | usgsuauuUfcUfGfCfuauuauu | 4671 | VPusGfsaaaUfaAfUfagcaGfaAfauac | 4131 | AGUGUAUUUCUGCUAUUAU | 4400 |
| 1735684 | uscsa | | ascsu | | UUCC | |
| AD- | usgsuaacAfaUfAfAfcuagccu | 4672 | VPusUfsuagGfcUfAfguuaUfuGfuuac | 4132 | UAUGUAACAAUAACUAGCC | 4401 |
| 1735685 | asasa | | asusa | | UAAA | |
| AD- | gsusuguuUfuUfAfCfucuagcu | 4673 | VPusUfsgagCfuAfGfaguaAfaAfacaa | 4133 | UUGUUGUUUUUACUCUAGC | 4402 |
| 1735686 | csasa | | csasa | | UCAG | |
| AD- | csasggcaGfuUfUfUfauacaau | 4674 | VPusUfscauUfgUfAfuaaaAfcUfgccu | 4134 | CUCAGGCAGUUUUAUACAA | 4403 |
| 1735687 | gsasa | | gsasg | | UGAC | |
| AD- | asgsgauuCfuCfAfGfucagguu | 4675 | VPusAfsuaaCfcUfGfacugAfgAfaucc | 4135 | GAAGGAUUCUCAGUCAGGU | 4404 |
| 1735688 | asusa | | ususc | | UAUG | |
| AD- | asusuuucCfaUfCfAfuguuuaa | 4676 | VPusAfscuuAfaAfCfaugaUfgGfaaaa | 4136 | ACAUUUUCCAUCAUGUUUA | 4405 |
| 1735689 | gsusa | | usgsu | | AGUG | |
| AD- | usgsccacUfuUfUfGfuuaccau | 4677 | VPusCfsaauGfgUfAfacaaAfaGfuggc | 4137 | GCUGCCACUUUUGUUACCA | 4406 |
| 1735690 | usgsa | | asgsc | | UUGU | |
| AD- | ascsuugcUfaGfUfGfuguggau | 4678 | VPusAfsuauCfcAfCfacacUfaGfcaag | 4138 | AAACUUGCUAGUGUGUGGA | 4407 |
| 1735691 | asusa | | ususu | | UAUG | |
| AD- | asasucuuAfcUfUfGfagaaauu | 4679 | VPusGfscaaUfuUfCfucaaGfuAfagau | 4139 | GAAAUCUUACUUGAGAAAU | 4408 |
| 1735692 | gscsa | | ususc | | UGCC | |
| AD- | asgsuucgAfgAfCfUfugcauuu | 4680 | VPusUfscaaAfuGfCfaaguCfuCfgaac | 4140 | AAAGUUCGAGACUUGCAUU | 4409 |
| 1735693 | gsasa | | ususu | | UGAA | |
| AD- | cscsauagAfaUfUfUfccugaua | 4681 | VPusAfsguaUfcAfGfgaaaUfuCfuaug | 4141 | ACCCAUAGAAUUUCCUGAU | 4410 |
| 1735694 | csusa | | gsgsu | | ACUG | |
| AD- | asgsguaaUfuCfCfUfuuagaau | 4682 | VPusAfsuauUfcUfAfaaggAfaUfuacc | 4142 | CAAGGUAAUUCCUUUAGAA | 4411 |
| 1735695 | asusa | | ususg | | UAUG | |
| AD- | csusuaugGfaAfAfCfucaacaa | 4683 | VPusUfscuuGfuUfGfaguuUfcCfauaa | 4143 | AACUUAUGGAAACUCAACA | 4412 |
| 1735696 | gsasa | | gsusu | | AGAA | |
| AD- | asasgcagCfaUfUfUfuaaauua | 4684 | VPusCfsguaAfuUfUfaaaaUfgCfugcu | 4144 | AAAAGCAGCAUUUUAAAUU | 4413 |
| 1735697 | csgsa | | ususu | | ACGA | |
| AD- | usgsacucUfcAfAfCfugaccau | 4685 | VPusGfsaauGfgUfCfaguuGfaGfaguc | 4145 | GCUGACUCUCAACUGACCA | 4414 |
| 1735698 | uscsa | | asgsc | | UUCC | |
| AD- | asgsguuuAfuCfCfAfugaagga | 4686 | VPusAfsgucCfuUfCfauggAfuAfaacc | 4146 | CUAGGUUUAUCCAUGAAGG | 4415 |
| 1735699 | csusa | | usasg | | ACUG | |
| AD- | ascscaagAfaUfUfUfggcauuu | 4687 | VPusUfsgaaAfuGfCfcaaaUfuCfuugg | 4147 | UCACCAAGAAUUUGGCAUU | 4416 |
| 1735700 | csasa | | usgsa | | UCAA | |
| AD- | usasucuaGfaAfUfAfuuuggcu | 4688 | VPusUfsaagCfcAfAfauauUfcUfagau | 4148 | CUUAUCUAGAAUAUUUGGC | 4417 |
| 1735701 | usasa | | asasg | | UUAU | |
| AD- | csusccugCfaGfAfAfuacauac | 4689 | VPusUfsuguAfuGfUfauucUfgCfagga | 4149 | CUCUCCUGCAGAAUACAUA | 4418 |
| 1735702 | asasa | | gsasg | | CAAG | |
| AD- | uscsacacCfaUfUfUfccuggau | 4690 | VPusAfsaauCfcAfGfgaaaUfgGfugug | 4150 | UCUCACACCAUUUCCUGGA | 4419 |
| 1735703 | ususa | | asgsa | | UUUU | |
| AD- | asusguggAfaUfUfCfaagcgcu | 4691 | VPusAfsaagCfgCfUfugaaUfuCfcaca | 4151 | UCAUGUGGAAUUCAAGCGC | 4420 |
| 1735704 | ususa | | usgsa | | UUUC | |
| AD- | asusugugUfaUfUfAfucuacua | 4692 | VPusCfsauaGfuAfGfauaaUfaCfacaa | 4152 | CUAUUGUGUAUUAUCUACU | 4421 |
| 1735705 | usgsa | | usasg | | AUGU | |
| AD- | asasuggaGfuAfAfUfgaaaaug | 4693 | VPusAfsucaUfuUfUfcauuAfcUfccau | 4153 | AGAAUGGAGUAAUGAAAAU | 4422 |
| 1735706 | asusa | | uscsu | | GAUC | |
| AD- | ascsugguUfuAfUfUfggaaaua | 4694 | VPusAfsauaUfuUfCfcaauAfaAfccag | 4154 | ACACUGGUUUAUUGGAAAU | 4423 |
| 1735707 | ususa | | usgsu | | AUUU | |
| AD- | csasagugUfaUfGfUfguauaaa | 4695 | VPusAfscuuUfaUfAfcacaUfaCfacuu | 4155 | UACAAGUGUAUGUGUAUAA | 4424 |
| 1735708 | gsusa | | gsusa | | AGUC | |
| AD- | usascaagCfaUfGfCfauauuga | 4696 | VPusUfscucAfaUfAfugcaUfgCfuugu | 4156 | UGUACAAGCAUGCAUAUUG | 4425 |
| 1735709 | gsasa | | ascsa | | AGAU | |
| AD- | usgsugucUfuUfUfAfugucuuu | 4697 | VPusUfscaaAfgAfCfauaaAfaGfacac | 4157 | AGUGUGUCUUUUAUGUCUU | 4426 |
| 1735710 | gsasa | | ascsu | | UGAA | |
| AD- | asusuuucUfcGfCfAfgaauuca | 4698 | VPusAfsuugAfaUfUfcugcGfaGfaaaa | 4158 | UGAUUUUCUCGCAGAAUUC | 4427 |
| 1735711 | asusa | | uscsa | | AAUG | |
| AD- | usasgcgaCfaGfUfUfugaguaa | 4699 | VPusUfsuuuAfcUfCfaaacUfgUfcgcu | 4159 | AAUAGCGACAGUUUGAGUA | 4428 |
| 1735712 | asasa | | asusu | | AAAG | |
| AD- | csusggugUfaUfGfAfauacuuu | 4700 | VPusAfscaaAfgUfAfuucaUfaCfacca | 4160 | CACUGGUGUAUGAAUACUU | 4429 |
| 1735713 | gsusa | | gsusg | | UGUC | |
| AD- | gsusgauaAfgUfGfGfcuaacag | 4701 | VPusUfsucuGfuUfAfgccaCfuUfauca | 4161 | AGGUGAUAAGUGGCUAACA | 4430 |
| 1735714 | asasa | | cscsu | | GAAG | |
| AD- | gsusaggcUfaAfUfAfuuuucua | 4702 | VPusAfsauaGfaAfAfauauUfaGfccua | 4162 | UGGUAGGCUAAUAUUUUCU | 4431 |
| 1735715 | ususa | | cscsa | | AUUA | |
| AD- | cscsucuuCfaUfCfCfucgacug | 4703 | VPusGfsacaGfuCfGfaggaUfgAfagag | 4163 | CGCCUCUUCAUCCUCGACU | 4432 |
| 1735716 | uscsa | | gscsg | | GUCC | |
| AD- | asasuugcCfaUfAfAfgccauau | 4704 | VPusUfsaauAfuGfGfcuuaUfgGfcaau | 4164 | GAAAUUGCCAUAAGCCAUA | 4433 |
| 1735717 | usasa | | ususc | | UUAC | |
| AD- | gscsgaauAfuUfUfUfgucagcu | 4705 | VPusUfsuagCfuGfAfcaaaAfuAfuucg | 4165 | CGGCGAAUAUUUUGUCAGC | 4434 |
| 1735718 | asasa | | cscsg | | UAAU | |
| AD- | asusccagUfgUfUfGfccuuucu | 4706 | VPusUfscagAfaAfGfgcaaCfaCfugga | 4166 | GAAUCCAGUGUUGCCUUUC | 4435 |
| 1735719 | gsasa | | ususc | | UGAG | |
| AD- | asasagucUfaUfGfCfcugucua | 4707 | VPusUfsuuaGfaCfAfggcaUfaGfacuu | 4167 | GAAAAGUCUAUGCCUGUCU | 4436 |
| 1735720 | asasa | | ususc | | AAAA | |
| AD- | gsgsacauCfaGfAfAfguuugaa | 4708 | VPusAfsauuCfaAfAfcuucUfgAfuguc | 4168 | AUGGACAUCAGAAGUUUGA | 4437 |
| 1735721 | ususa | | csasu | | AUUC | |
| AD- | gsgscgaaUfuGfCfUfuauauuu | 4709 | VPusAfsgaaAfuAfUfaagcAfaUfucgc | 4169 | UGGGCGAAUUGCUUAUAUU | 4438 |
| 1735722 | csusa | | cscsa | | UCUU | |
| AD- | csascacuAfuGfUfGfuaaacca | 4710 | VPusAfscugGfuUfUfacacAfuAfgugu | 4170 | CACACACUAUGUGUAAACC | 4439 |
| 1735723 | gsusa | | gsusg | | AGUC | |
| AD- | csasggugAfaGfAfAfgaaaaca | 4711 | VPusAfsaugUfuUfUfcuucUfuCfaccu | 4171 | AUCAGGUGAAGAAGAAAAC | 4440 |
| 1735724 | ususa | | gsasu | | AUUU | |
| AD- | gsusgagcUfcUfUfAfuuuuuca | 4712 | VPusAfsgugAfaAfAfauaaGfaGfcuca | 4172 | UAGUGAGCUCUUAUUUUUC | 4441 |
| 1735725 | csusa | | csusa | | ACUG | |
| AD- | asasagcuGfaUfGfGfgaauaaa | 4713 | VPusAfsguuUfaUfUfcccaUfcAfgcuu | 4173 | GUAAAGCUGAUGGGAAUAA | 4442 |
| 1735726 | csusa | | usasc | | ACUG | |
| AD- | gsusgucgUfuAfGfGfagaaacu | 4714 | VPusGfscagUfuUfCfuccuAfaCfgaca | 4174 | GCGUGUCGUUAGGAGAAAC | 4443 |
| 1735727 | gscsa | | csgsc | | UGCA | |
| AD- | gsgsgacuUfaAfAfAfcaauggu | 4715 | VPusAfsuacCfaUfUfguuuUfaAfgucc | 4175 | UUGGGACUUAAAACAAUGG | 4444 |
| 1735728 | asusa | | csasa | | UAUA | |
| AD- | csusgaugGfuAfGfAfauuaacc | 4716 | VPusAfsuggUfuAfAfuucuAfcCfauca | 4176 | UUCUGAUGGUAGAAUUAAC | 4445 |
| 1735729 | asusa | | gsasa | | CAUG | |
| AD- | ascsuaugUfgUfGfUfuuuauuu | 4717 | VPusAfsgaaAfuAfAfaacaCfaCfauag | 4177 | CUACUAUGUGUGUUUUAUU | 4446 |
| 1735730 | csusa | | usasg | | UCUG | |
| AD- | csusgauaAfuUfUfAfuauuugc | 4718 | VPusGfsugcAfaAfUfauaaAfuUfauca | 4178 | GACUGAUAAUUUAUAUUUG | 4447 |
| 1735731 | ascsa | | gsusc | | CACU | |
| AD- | gsusccuuAfaAfUfUfauuuaac | 4719 | VPusGfsgguUfaAfAfuaauUfuAfagga | 4179 | UAGUCCUUAAAUUAUUUAA | 4448 |
| 1735732 | cscsa | | csusa | | CCCU | |
| AD- | csgscaauAfuGfGfUfgucagau | 4720 | VPusAfsgauCfuGfAfcaccAfuAfuugc | 4180 | CUCGCAAUAUGGUGUCAGA | 4449 |
| 1735733 | csusa | | gsasg | | UCUU | |
| AD- | ususcgaaGfaGfCfUfgcucuaa | 4721 | VPusGfsauuAfgAfGfcagcUfcUfucga | 4181 | UCUUCGAAGAGCUGCUCUA | 4450 |
| 1735734 | uscsa | | asgsa | | AUCC | |
| AD- | ususucugCfuGfAfGfaguauuc | 4722 | VPusCfsugaAfuAfCfucucAfgCfagaa | 4182 | UAUUUCUGCUGAGAGUAUU | 4451 |
| 1735735 | asgsa | | asusa | | CAGG | |
| AD- | ususgaacAfgGfAfAfguaucac | 4723 | VPusCfsaguGfaUfAfcuucCfuGfuuca | 4183 | UAUUGAACAGGAAGUAUCA | 4452 |
| 1735736 | usgsa | | asusa | | CUGG | |
| AD- | usgsccuuGfuAfUfUfuccagag | 4724 | VPusUfsucuCfuGfGfaaauAfcAfaggc | 4184 | GUUGCCUUGUAUUUCCAGA | 4453 |
| 1735737 | asasa | | asasc | | GAAC | |
| AD- | gsusuacuAfuGfGfCfaguugca | 4725 | VPusUfsuugCfaAfCfugccAfuAfguaa | 4185 | CAGUUACUAUGGCAGUUGC | 4454 |
| 1735738 | asasa | | csusg | | AAAA | |
| AD- | asusggcuGfaAfUfUfuuaaagc | 4726 | VPusCfsagcUfuUfAfaaauUfcAfgcca | 4186 | CCAUGGCUGAAUUUUAAAG | 4455 |
| 1735739 | usgsa | | usgsg | | CUGU | |
| AD- | gsusccauUfcAfUfGfgaucguu | 4727 | VPusAfsgaaCfgAfUfccauGfaAfugga | 4187 | CAGUCCAUUCAUGGAUCGU | 4456 |
| 1735740 | csusa | | csusg | | UCUU | |
| AD- | usgsuguaAfcUfCfCfuaugaug | 4728 | VPusAfsgcaUfcAfUfaggaGfuUfacac | 4188 | CCUGUGUAACUCCUAUGAU | 4457 |
| 1735741 | csusa | | asgsg | | GCUG | |
| AD- | usgsgcagUfuUfCfCfcacuccu | 4729 | VPusAfsuagGfaGfUfgggaAfaCfugcc | 4189 | GCUGGCAGUUUCCCACUCC | 4458 |
| 1735742 | asusa | | asgsc | | UAUG | |
| AD- | cscsucaaGfcAfGfAfugagauu | 4730 | VPusUfsgaaUfcUfCfaucuGfcUfugag | 4190 | UACCUCAAGCAGAUGAGAU | 4459 |
| 1735743 | csasa | | gsusa | | UCAG | |
| AD- | asusguugUfuUfUfCfucaaaag | 4731 | VPusUfsgcuUfuUfGfagaaAfaCfaaca | 4191 | UUAUGUUGUUUUCUCAAAA | 4460 |
| 1735744 | csasa | | usasa | | GCAG | |
| AD- | gsasgggaUfuUfCfUfgcucaau | 4732 | VPusGfscauUfgAfGfcagaAfaUfcccu | 4192 | CUGAGGGAUUUCUGCUCAA | 4461 |
| 1735745 | gscsa | | csasg | | UGCA | |
| AD- | gscscuucUfuCfUfUfccucacc | 4733 | VPusCfsaggUfgAfGfgaagAfaGfaagg | 4193 | GUGCCUUCUUCUUCCUCAC | 4462 |
| 1735746 | usgsa | | csasc | | CUGC | |
| AD- | ususgagaUfuGfAfAfucacauu | 4734 | VPusGfsaaaUfgUfGfauucAfaUfcuca | 4194 | UAUUGAGAUUGAAUCACAU | 4463 |
| 1735747 | uscsa | | asusa | | UUCC | |
| AD- | csusguucAfgUfGfCfuauucuc | 4735 | VPusGfsggaGfaAfUfagcaCfuGfaaca | 4195 | CACUGUUCAGUGCUAUUCU | 4464 |
| 1735748 | cscsa | | gsusg | | CCCA | |
| AD- | cscsuggcUfuAfCfAfgcagauc | 4736 | VPusUfsggaUfcUfGfcuguAfaGfccag | 4196 | UUCCUGGCUUACAGCAGAU | 4465 |
| 1735749 | csasa | | gsasa | | CCAC | |
| AD- | gsascagcAfgAfAfAfauuauuu | 4737 | VPusUfsgaaAfuAfAfuuuuCfuGfcugu | 4197 | AAGACAGCAGAAAAUUAUU | 4466 |
| 1735750 | csasa | | csusu | | UCAG | |
| AD- | ususggguUfuCfUfUfuaguuua | 4738 | VPusCfsauaAfaCfUfaaagAfaAfccca | 4198 | UAUUGGGUUUCUUUAGUUU | 4467 |
| 1735751 | usgsa | | asusa | | AUGU | |
| AD- | csasccauGfuAfGfGfucucaga | 4739 | VPusCfsuucUfgAfGfaccuAfcAfuggu | 4199 | CUCACCAUGUAGGUCUCAG | 4468 |
| 1735752 | asgsa | | gsasg | | AAGA | |
| AD- | gsusugugGfaAfCfAfggaaaug | 4740 | VPusUfsucaUfuUfCfcuguUfcCfacaa | 4200 | UGGUUGUGGAACAGGAAAU | 4469 |
| 1735753 | asasa | | cscsa | | GAAA | |
| AD- | gsgsagaaCfaUfAfUfcauauuu | 4741 | VPusCfsaaaAfuAfUfgauaUfgUfucuc | 4201 | UUGGAGAACAUAUCAUAUU | 4470 |
| 1735754 | usgsa | | csasa | | UUGG | |
| AD- | csasgccaAfaAfUfGfauggcaa | 4742 | VPusUfsuuuGfcCfAfucauUfuUfggcu | 4202 | AGCAGCCAAAAUGAUGGCA | 4471 |
| 1735755 | asasa | | gscsu | | AAAU | |
| AD- | cscsaauuUfuUfGfAfacuugua | 4743 | VPusUfscuaCfaAfGfuucaAfaAfauug | 4203 | UUCCAAUUUUUGAACUUGU | 4472 |
| 1735756 | gsasa | | gsasa | | AGAA | |
| AD- | asusaggaAfuAfGfUfuugccaa | 4744 | VPusAfsguuGfgCfAfaacuAfuUfccua | 4204 | AAAUAGGAAUAGUUUGCCA | 4473 |
| 1735757 | csusa | | ususu | | ACUC | |
| AD- | ususugaaUfgUfUfUfuggagaa | 4745 | VPusUfsuuuCfuCfCfaaaaCfaUfucaa | 4205 | UCUUUGAAUGUUUUGGAGA | 4474 |
| 1735758 | asasa | | asgsa | | AAAG | |
| AD- | gsuscaauAfuUfUfAfaugaauc | 4746 | VPusGfsugaUfuCfAfuuaaAfuAfuuga | 4206 | GUGUCAAUAUUUAAUGAAU | 4475 |
| 1735759 | ascsa | | csasc | | CACU | |
| AD- | usgsagaaUfaUfAfUfuaaaugc | 4747 | VPusGfsugcAfuUfUfaauaUfaUfucuc | 4207 | UGUGAGAAUAUAUUAAAUG | 4476 |
| 1735760 | ascsa | | ascsa | | CACA | |
| AD- | usasacaaGfgGfAfCfuaaauag | 4748 | VPusUfsccuAfuUfUfagucCfcUfuguu | 4208 | CUUAACAAGGGACUAAAUA | 4477 |
| 1735761 | gsasa | | asasg | | GGAA | |
| AD- | gsgscuucUfuCfUfUfccaccuc | 4749 | VPusCfsagaGfgUfGfgaagAfaGfaagc | 4209 | GCGGCUUCUUCUUCCACCU | 4478 |
| 1735762 | usgsa | | csgsc | | CUGC | |
| AD- | ususggaaCfaUfGfUfgguuauc | 4750 | VPusAfsagaUfaAfCfcacaUfgUfucca | 4210 | AAUUGGAACAUGUGGUUAU | 4479 |
| 1735763 | ususa | | asusu | | CUUU | |
| AD- | csasgagaAfcAfGfAfugauucu | 4751 | VPusAfsaagAfaUfCfaucuGfuUfcucu | 4211 | UCCAGAGAACAGAUGAUUC | 4480 |
| 1735764 | ususa | | gsgsa | | UUUG | |
| AD- | csusguuaUfuUfUfAfuuggguu | 4752 | VPusAfsaaaCfcCfAfauaaAfaUfaaca | 4212 | GUCUGUUAUUUUAUUGGGU | 4481 |
| 1735765 | ususa | | gsasc | | UUUA | |
| AD- | asusgaagAfaGfCfAfaaucuug | 4753 | VPusAfsccaAfgAfUfuugcUfuCfuuca | 4213 | AGAUGAAGAAGCAAAUCUU | 4482 |
| 1735766 | gsusa | | uscsu | | GGUC | |
| AD- | ususuggaAfuCfAfUfgcaauuu | 4754 | VPusCfsaaaAfuUfGfcaugAfuUfccaa | 4214 | AUUUUGGAAUCAUGCAAUU | 4483 |
| 1735767 | usgsa | | asasu | | UUGC | |
| AD- | csasauguUfuUfGfUfaaacuug | 4755 | VPusAfsgcaAfgUfUfuacaAfaAfcauu | 4215 | UACAAUGUUUUGUAAACUU | 4484 |
| 1735768 | csusa | | gsusa | | GCUA | |
| AD- | gsgsaucgUfaAfUfAfauggcaa | 4756 | VPusUfsuuuGfcCfAfuuauUfaCfgauc | 4216 | UGGGAUCGUAAUAAUGGCA | 4485 |
| 1735769 | asasa | | cscsa | | AAAG | |
| AD- | gsusgcuuUfcUfCfAfgguuccu | 4757 | VPusAfscagGfaAfCfcugaGfaAfagca | 4217 | GGGUGCUUUCUCAGGUUCC | 4486 |
| 1735770 | gsusa | | cscsc | | UGUA | |
| AD- | asusgauaCfuGfAfAfaguggug | 4758 | VPusAfsucaCfcAfCfuuucAfgUfauca | 4218 | UAAUGAUACUGAAAGUGGU | 4487 |
| 1735771 | asusa | | ususa | | GAUG | |
| AD- | uscsacugGfaCfCfUfgauuuua | 4759 | VPusAfscuaAfaAfUfcaggUfcCfagug | 4219 | UAUCACUGGACCUGAUUUU | 4488 |
| 1735772 | gsusa | | asusa | | AGUA | |
| AD- | gsasacuuUfuUfGfCfuuuuaug | 4760 | VPusUfsucaUfaAfAfagcaAfaAfaguu | 4220 | AGGAACUUUUUGCUUUUAU | 4489 |
| 1735773 | asasa | | cscsu | | GAAA | |
| AD- | gsasacacAfgCfAfCfagauuug | 4761 | VPusAfsacaAfaUfCfugugCfuGfuguu | 4221 | AUGAACACAGCACAGAUUU | 4490 |
| 1735774 | ususa | | csasu | | GUUA | |
| AD- | asusauggAfaGfGfAfaaucgua | 4762 | VPusUfscuaCfgAfUfuuccUfuCfcaua | 4222 | AGAUAUGGAAGGAAAUCGU | 4491 |
| 1735775 | gsasa | | uscsu | | AGAG | |
| AD- | gscsuaucUfaAfAfUfgggccuu | 4763 | VPusAfsaaaGfgCfCfcauuUfaGfauag | 4223 | AUGCUAUCUAAAUGGGCCU | 4492 |
| 1735776 | ususa | | csasu | | UUUA | |
| AD- | csasaaacCfaCfCfAfagaagga | 4764 | VPusUfsuucCfuUfCfuuggUfgGfuuuu | 4224 | UCCAAAACCACCAAGAAGG | 4493 |
| 1735777 | asasa | | gsgsa | | AAAA | |
| AD- | cscsacagAfuGfUfGfcuacaug | 4765 | VPusUfsgcaUfgUfAfgcacAfuCfugug | 4225 | UGCCACAGAUGUGCUACAU | 4494 |
| 1735778 | csasa | | gscsa | | GCAG | |
| AD- | asasagucAfuAfCfAfuguacaa | 4766 | VPusGfscuuGfuAfCfauguAfuGfacuu | 4226 | AUAAAGUCAUACAUGUACA | 4495 |
| 1735779 | gscsa | | usasu | | AGCA | |
| AD- | usasgaagCfaGfAfAfgaggaua | 4767 | VPusAfsuuaUfcCfUfcuucUfgCfuucu | 4227 | GUUAGAAGCAGAAGAGGAU | 4496 |
| 1735780 | asusa | | asasc | | AAUG | |
| AD- | csgsugugUfuCfGfCfacagcuu | 4768 | VPusUfscaaGfcUfGfugcgAfaCfacac | 4228 | AGCGUGUGUUCGCACAGCU | 4497 |
| 1735781 | gsasa | | gscsu | | UGAG | |
| AD- | gscsugguGfuUfUfUfguccag | 4769 | VPusAfsgacUfgGfAfcaaaAfcAfccag | 4229 | GAGCUGGUGUUUUGUCCAG | 4498 |
| 1735782 | ucsusa | | csusc | | UCUG | |
| AD- | asusggaaAfaCfAfAfucuaaau | 4770 | VPusGfsgauUfuAfGfauugUfuUfucca | 4230 | AAAUGGAAAACAAUCUAAA | 4499 |
| 1735783 | cscsa | | ususu | | UCCA | |
| AD- | csasuuagAfaAfAfUfggcuauc | 4771 | VPusUfscgaUfaGfCfcauuUfuCfuaau | 4231 | UGCAUUAGAAAAUGGCUAU | 4500 |
| 1735784 | gsasa | | gscsa | | CGAG | |
| AD- | asusggacAfgAfAfGfgcauugu | 4772 | VPusUfsgacAfaUfGfccuuCfuGfucca | 4232 | AAAUGGACAGAAGGCAUUG | 4501 |
| 1735785 | csasa | | ususu | | UCAA | |
| AD- | csasgauuGfcUfGfCfaguggaa | 4773 | VPusUfsuuuCfcAfCfugcaGfcAfaucu | 4233 | UACAGAUUGCUGCAGUGGA | 4502 |
| 1735786 | asasa | | gsusa | | AAAU | |
| AD- | asgsguggAfaAfUfGfgaguuga | 4774 | VPusGfsaucAfaCfUfccauUfuCfcacc | 4234 | GGAGGUGGAAAUGGAGUUG | 4503 |
| 1735787 | uscsa | | uscsc | | AUCU | |
| AD- | csusgggcAfaUfGfCfaccuaau | 4775 | VPusGfsuauUfaGfGfugcaUfuGfccca | 4235 | CUCUGGGCAAUGCACCUAA | 4504 |
| 1735788 | ascsa | | gsasg | | UACU | |
| AD- | asusuuccCfuCfUfGfccuaaag | 4776 | VPusGfsucuUfuAfGfgcagAfgGfgaaa | 4236 | UAAUUUCCCUCUGCCUAAA | 4505 |
| 1735789 | ascsa | | ususa | | GACU | |
| AD- | csgscuucUfgCfAfAfcguggag | 4777 | VPusAfsgcuCfcAfCfguugCfaGfaagc | 4237 | GCCGCUUCUGCAACGUGGA | 4506 |
| 1735790 | csusa | | gsgsc | | GCUG | |
| AD- | asgsauucAfuAfUfUfguauuuc | 4778 | VPusGfsggaAfaUfAfcaauAfuGfaauc | 4238 | AUAGAUUCAUAUUGUAUUU | 4507 |
| 1735791 | cscsa | | usasu | | CCCA | |
| AD- | asgsgacaAfaUfGfCfauuucua | 4779 | VPusAfscuaGfaAfAfugcaUfuUfgucc | 4239 | GGAGGACAAAUGCAUUUCU | 4508 |
| 1735792 | gsusa | | uscsc | | AGUG | |
| AD- | ususagacGfuGfUfUfgagugag | 4780 | VPusCfsacuCfaCfUfcaacAfcGfucua | 4240 | UAUUAGACGUGUUGAGUGA | 4509 |
| 1735793 | usgsa | | asusa | | GUGC | |
| AD- | csusguggAfcAfUfCfaaaugcu | 4781 | VPusUfscagCfaUfUfugauGfuCfcaca | 4241 | AGCUGUGGACAUCAAAUGC | 4510 |
| 1735794 | gsasa | | gscsu | | UGAA | |
| AD- | asgsgccuUfaAfUfAfcugugag | 4782 | VPusCfsucuCfaCfAfguauUfaAfggcc | 4242 | ACAGGCCUUAAUACUGUGA | 4511 |
| 1735795 | asgsa | | usgsu | | GAGG | |
| AD- | asgsaaauCfaUfUfGfccuagug | 4783 | VPusAfsacaCfuAfGfgcaaUfgAfuuuc | 4243 | GCAGAAAUCAUUGCCUAGU | 4512 |
| 1735796 | ususa | | usgsc | | GUUC | |
| AD- | usgsagugCfuGfAfGfuuccuug | 4784 | VPusAfsgcaAfgGfAfacucAfgCfacuc | 4244 | AGUGAGUGCUGAGUUCCUU | 4513 |
| 1735797 | csusa | | ascsu | | GCUG | |
| AD- | gscscaugCfaUfGfAfuuaugau | 4785 | VPusUfsgauCfaUfAfaucaUfgCfaugg | 4245 | CUGCCAUGCAUGAUUAUGA | 4514 |
| 1735798 | csasa | | csasg | | UCAC | |
| AD- | usgscugcUfgGfUfUfugcuacc | 4786 | VPusCfsuggUfaGfCfaaacCfaGfcagc | 4246 | GAUGCUGCUGGUUUGCUAC | 4515 |
| 1735799 | asgsa | | asusc | | CAGG | |
| AD- | csasgaugAfaGfAfGfgaauagc | 4787 | VPusUfscgcUfaUfUfccucUfuCfaucu | 4247 | GGCAGAUGAAGAGGAAUAG | 4516 |
| 1735800 | gsasa | | gscsc | | CGAC | |
| AD- | asusccagGfuGfCfAfucaauuu | 4788 | VPusAfsgaaAfuUfGfaugcAfcCfugga | 4248 | AAAUCCAGGUGCAUCAAUU | 4517 |
| 1735801 | csusa | | ususu | | UCUG | |
| AD- | asasuaagCfcAfAfGfcguuauc | 4789 | VPusAfsagaUfaAfCfgcuuGfgCfuuau | 4249 | UUAAUAAGCCAAGCGUUAU | 4518 |
| 1735802 | ususa | | usasa | | CUUG | |
| AD- | gsasgaggAfuCfCfUfugcucug | 4790 | VPusAfsgcaGfaGfCfaaggAfuCfcucu | 4250 | GUGAGAGGAUCCUUGCUCU | 4519 |
| 1735803 | csusa | | csasc | | GCUG | |
| AD- | asusgaugAfaGfAfCfggugaag | 4791 | VPusUfsucuUfcAfCfcgucUfuCfauca | 4251 | UGAUGAUGAAGACGGUGAA | 4520 |
| 1735804 | asasa | | uscsa | | GAAU | |
| AD- | uscsguaaGfuGfUfAfagaaaga | 4792 | VPusAfsuucUfuUfCfuuacAfcUfuacg | 4252 | AUUCGUAAGUGUAAGAAAG | 4521 |
| 1735805 | asusa | | asasu | | AAUG | |
| AD- | asuscuguGfuAfAfCfagcugug | 4793 | VPusUfsccaCfaGfCfuguuAfcAfcaga | 4253 | CAAUCUGUGUAACAGCUGU | 4522 |
| 1735806 | gsasa | | ususg | | GGAC | |
| AD- | asusuuaaAfaUfUfCfccacuca | 4794 | VPusGfsuugAfgUfGfggaaUfuUfuaaa | 4254 | AUAUUUAAAAUUCCCACUC | 4523 |
| 1735807 | ascsa | | usasu | | AACA | |
| AD- | gsasccagUfgUfCfUfacuggcu | 4795 | VPusAfsgagCfcAfGfuagaCfaCfuggu | 4255 | UGGACCAGUGUCUACUGGC | 4524 |
| 1735808 | csusa | | cscsa | | UCUC | |
| AD- | csgscuuuCfgUfUfUfuuuaguc | 4796 | VPusAfsugaCfuAfAfaaaaCfgAfaagc | 4256 | AGCGCUUUCGUUUUUUAGU | 4525 |
| 1735809 | asusa | | gscsu | | CAUU | |
| AD- | uscscgugUfuGfAfCfccauguu | 4797 | VPusGfscaaCfaUfGfggucAfaCfacgg | 4257 | CAUCCGUGUUGACCCAUGU | 4526 |
| 1735810 | gscsa | | asusg | | UGCA | |
| AD- | asusacagAfaGfAfUfgaagaaa | 4798 | VPusCfsauuUfcUfUfcaucUfuCfugua | 4258 | AGAUACAGAAGAUGAAGAA | 4527 |
| 1735811 | usgsa | | uscsu | | AUGG | |
| AD- | uscsucccGfaGfCfUfgaaacuu | 4799 | VPusUfsuaaGfuUfUfcagcUfcGfggag | 4259 | UCUCUCCCGAGCUGAAACU | 4528 |
| 1735812 | asasa | | asgsa | | UAAA | |
| AD- | usgscaucAfaAfCfUfggcagau | 4800 | VPusAfsuauCfuGfCfcaguUfuGfaugc | 4260 | UGUGCAUCAAACUGGCAGA | 4529 |
| 1735813 | asusa | | ascsa | | UAUA | |
| AD- | ususgcaaAfaUfAfUfucaggag | 4801 | VPusGfsucuCfcUfGfaauaUfuUfugca | 4261 | AGUUGCAAAAUAUUCAGGA | 4530 |
| 1735814 | ascsa | | ascsu | | GACC | |
| AD- | ascsaaucGfuAfUfAfcaugcca | 4802 | VPusUfsgugGfcAfUfguauAfcGfauug | 4262 | UCACAAUCGUAUACAUGCC | 4531 |
| 1735815 | csasa | | usgsa | | ACAG | |
| AD- | asasuagaAfaAfGfAfugagcaa | 4803 | VPusAfsguuGfcUfCfaucuUfuUfcuau | 4263 | UUAAUAGAAAAGAUGAGCA | 4532 |
| 1735816 | csusa | | usasa | | ACUG | |
| AD- | usasucuuAfuGfUfUfccauggc | 4804 | VPusCfsagcCfaUfGfgaacAfuAfagau | 4264 | CUUAUCUUAUGUUCCAUGG | 4533 |
| 1735817 | usgsa | | asasg | | CUGA | |
| AD- | csusacguGfaAfGfAfgcugogu | 4805 | VPusUfscacGfcAfGfcucuUfcAfcgua | 4265 | GGCUACGUGAAGAGCUGCG | 4534 |
| 1735818 | gsasa | | gscsc | | UGAG | |
| AD- | gsasauugAfuGfGfCfucuauac | 4806 | VPusAfscguAfuAfGfagccAfuCfaauu | 4266 | UAGAAUUGAUGGCUCUAUA | 4535 |
| 1735819 | gsusa | | csusa | | CGUG | |
| AD- | ususcaggUfaAfUfUfgaagagg | 4807 | VPusUfsgccUfcUfUfcaauUfaCfcuga | 4267 | GAUUCAGGUAAUUGAAGAG | 4536 |
| 1735820 | csasa | | asusc | | GCAG | |
| AD- | asasggacUfgAfGfUfgaccuuu | 4808 | VPusAfscaaAfgGfUfcacuCfaGfuccu | 4268 | UGAAGGACUGAGUGACCUU | 4537 |
| 1735821 | gsusa | | uscsa | | UGUU | |
| AD- | csgsagagUfcUfGfAfggaacgg | 4809 | VPusAfsgccGfuUfCfcucaGfaCfucuc | 4269 | CCCGAGAGUCUGAGGAACG | 4538 |
| 1735822 | csusa | | gsgsg | | GCUA | |
| AD- | asusucuuUfgGfGfAfuugggac | 4810 | VPusAfsaguCfcCfAfauccCfaAfagaa | 4270 | UGAUUCUUUGGGAUUGGGA | 4539 |
| 1735823 | ususa | | uscsa | | CUUA | |
| AD- | usasccagGfuCfAfGfugguuag | 4811 | VPusUfsucuAfaCfCfacugAfcCfuggu | 4271 | GCUACCAGGUCAGUGGUUA | 4540 |
| 1735824 | asasa | | asgsc | | GAAG | |
| AD- | asusucagGfuUfUfGfccaugga | 4812 | VPusUfsgucCfaUfGfgcaaAfcCfugaa | 4272 | GUAUUCAGGUUUGCCAUGG | 4541 |
| 1735825 | csasa | | usasc | | ACAU | |
| AD- | gscsagcuAfaAfCfUfgguccug | 4813 | VPusUfsccaGfgAfCfcaguUfuAfgcug | 4273 | CGGCAGCUAAACUGGUCCU | 4542 |
| 1735826 | gsasa | | cscsg | | GGAG | |
| AD- | asgsuaauGfgCfAfUfagaaugg | 4814 | VPusCfsuccAfuUfCfuaugCfcAfuuac | 4274 | AUAGUAAUGGCAUAGAAUG | 4543 |
| 1735827 | asgsa | | usasu | | GAGU | |
| AD- | asasuugcAfaGfAfAfaauggac | 4815 | VPusUfsgguCfcAfUfuuucUfuGfcaau | 4275 | AUAAUUGCAAGAAAAUGGA | 4544 |
| 1735828 | csasa | | usasu | | CCAU | |
| AD- | csgsgcacUfgCfGfUfucuggug | 4816 | VPusAfsgcaCfcAfGfaacgCfaGfugcc | 4276 | UCCGGCACUGCGUUCUGGU | 4545 |
| 1735829 | csusa | | gsgsa | | GCUG | |
| AD- | asgsucauAfuUfGfAfagaagcc | 4817 | VPusUfsgggCfuUfCfuucaAfuAfugac | 4277 | AAAGUCAUAUUGAAGAAGC | 4546 |
| 1735830 | csasa | | ususu | | CCAG | |
| AD- | uscsaucaUfgCfUfGfcgucagc | 4818 | VPusAfsagcUfgAfCfgcagCfaUfgaug | 4278 | AAUCAUCAUGCUGCGUCAG | 4547 |
| 1735831 | ususa | | asusu | | CUUG | |
| AD- | asasaugaUfcGfCfCfucuuggu | 4819 | VPusAfsuacCfaAfGfaggcGfaUfcauu | 4279 | GAAAAUGAUCGCCUCUUGG | 4548 |
| 1735832 | asusa | | ususc | | UAUG | |
| AD- | asusuugaAfgAfUfAfuaaagag | 4820 | VPusUfsgcuCfuUfUfauauCfuUfcaaa | 4280 | ACAUUUGAAGAUAUAAAGA | 4549 |
| 1735833 | csasa | | usgsu | | GCAG | |
| AD- | gsgsucucCfuUfCfAfccagccu | 4821 | VPusCfsgagGfcUfGfgugaAfgGfagac | 4281 | UGGGUCUCCUUCACCAGCC | 4550 |
| 1735834 | csgsa | | cscsa | | UCGG | |
| AD- | gsasaacaGfaGfAfAfgaaagac | 4822 | VPusCfsuguCfuUfUfcuucUfcUfguuu | 4282 | AGGAAACAGAGAAGAAAGA | 4551 |
| 1735835 | asgsa | | cscsu | | CAGC | |
| AD- | ususcuagUfgGfCfUfacaaaug | 4823 | VPusGfsgcaUfuUfGfuagcCfaCfuaga | 4283 | AUUUCUAGUGGCUACAAAU | 4552 |
| 1735836 | cscsa | | asasu | | GCCC | |
| AD- | gsgsagagAfaAfUfCfaggaagg | 4824 | VPusAfsuccUfuCfCfugauUfuCfucuc | 4284 | UGGGAGAGAAAUCAGGAAG | 4553 |
| 1735837 | asusa | | cscsa | | GAUU | |
| AD- | asusauagUfgAfGfCfccuaaag | 4825 | VPusUfsccuUfuAfGfggcuCfaCfuaua | 4285 | AAAUAUAGUGAGCCCUAAA | 4554 |
| 1735838 | gsasa | | ususu | | GGAC | |
| AD- | gscsugccUfuUfGfUfccucgcc | 4826 | VPusAfsgggCfgAfGfgacaAfaGfgcag | 4286 | UGGCUGCCUUUGUCCUCGC | 4555 |
| 1735839 | csusa | | cscsa | | CCUG | |
| AD- | gsgscaaaAfgAfCfCfucaccaa | 4827 | VPusUfscuuGfgUfGfagguCfuUfuugc | 4287 | AUGGCAAAAGACCUCACCA | 4556 |
| 1735840 | gsasa | | csasu | | AGAA | |
| AD- | ususcagcAfuCfGfCfcugugcc | 4828 | VPusAfsaggCfaCfAfggcgAfuGfcuga | 4288 | UCUUCAGCAUCGCCUGUGC | 4557 |
| 1735841 | ususa | | asgsa | | CUUC | |
| AD- | gscsuaaaUfgAfGfGfcucgcaa | 4829 | VPusUfsauuGfcGfAfgccuCfaUfuuag | 4289 | GUGCUAAAUGAGGCUCGCA | 4558 |
| 1735842 | usasa | | csasc | | AUAU | |
| AD- | csasgcuuCfgUfCfUfggugggu | 4830 | VPusAfsgacCfcAfCfcagaCfgAfagcu | 4290 | GCCAGCUUCGUCUGGUGGG | 4559 |
| 1735843 | csusa | | gsgsc | | UCUC | |
| AD- | asusauggUfaUfUfGfgcaugca | 4831 | VPusAfscugCfaUfGfccaaUfaCfcaua | 4291 | GAAUAUGGUAUUGGCAUGC | 4560 |
| 1735844 | gsusa | | ususc | | AGUU | |
| AD- | asasacugCfaGfGfUfggagaau | 4832 | VPusGfsaauUfcUfCfcaccUfgCfaguu | 4292 | AUAAACUGCAGGUGGAGAA | 4561 |
| 1735845 | uscsa | | usasu | | UUCC | |
| AD- | usasuggcUfgCfCfUfgucuuca | 4833 | VPusUfsuugAfaGfAfcaggCfaGfccau | 4293 | GUUAUGGCUGCCUGUCUUC | 4562 |
| 1735846 | asasa | | asasc | | AAAC | |
| AD- | csusguucUfgAfAfAfuagagga | 4834 | VPusGfsgucCfuCfUfauuuCfaGfaaca | 4294 | CCCUGUUCUGAAAUAGAGG | 4563 |
| 1735847 | cscsa | | gsgsg | | ACCC | |
| AD- | uscsuauuUfuUfAfAfagccgcu | 4835 | VPusCfscagCfgGfCfuuuaAfaAfauag | 4295 | UUUCUAUUUUUAAAGCCGC | 4564 |
| 1735848 | gsgsa | | asasa | | UGGU | |
| AD- | gscsugagGfaGfAfAfgcucagg | 4836 | VPusUfsuccUfgAfGfcuucUfcCfucag | 4296 | CAGCUGAGGAGAAGCUCAG | 4565 |
| 1735849 | asasa | | csusg | | GAAC | |
| AD- | csasagccUfuCfCfAfccacaag | 4837 | VPusGfsacuUfgUfGfguggAfaGfgcuu | 4297 | UCCAAGCCUUCCACCACAA | 4566 |
| 1735850 | uscsa | | gsgsa | | GUCA | |
| AD- | ususcaguUfaCfCfAfaaguggc | 4838 | VPusUfsggcCfaCfUfuuggUfaAfcuga | 4298 | AUUUCAGUUACCAAAGUGG | 4567 |
| 1735851 | csasa | | asasu | | CCAG | |
| AD- | csasccugCfuUfCfCfucacccg | 4839 | VPusUfsccgGfgUfGfaggaAfgCfaggu | 4299 | CUCACCUGCUUCCUCACCC | 4568 |
| 1735852 | gsasa | | gsasg | | GGAC | |
| AD- | ususuuauCfaCfCfCfacauagu | 4840 | VPusCfscacUfaUfGfugggUfgAfuaaa | 4300 | UCUUUUAUCACCCACAUAG | 4569 |
| 1735853 | gsgsa | | asgsa | | UGGG | |
| AD- | asgsgagaCfcGfUfCfguugccu | 4841 | VPusCfsaagGfcAfAfcgacGfgUfcucc | 4301 | UCAGGAGACCGUCGUUGCC | 4570 |
| 1735854 | usgsa | | usgsa | | UUGU | |
| AD- | asusggccCfaGfCfAfaaaguuc | 4842 | VPusUfscgaAfcUfUfuugcUfgGfgcca | 4302 | AAAUGGCCCAGCAAAAGUU | 4571 |
| 1735855 | gsasa | | ususu | | CGAG | |
| AD- | asgsacgcCfaAfAfGfccaugcg | 4843 | VPusAfsccgCfaUfGfgcuuUfgGfcguc | 4303 | CGAGACGCCAAAGCCAUGC | 4572 |
| 1735856 | gsusa | | uscsg | | GGUC | |
| AD- | csasgcuaAfuGfCfAfccaccuc | 4844 | VPusGfsugaGfgUfGfgugcAfuUfagcu | 4304 | GUCAGCUAAUGCACCACCU | 4573 |
| 1735857 | ascsa | | gsasc | | CACU | |
| AD- | gsgsaaaaGfcAfGfAfcggcgaa | 4845 | VPusUfsauuCfgCfCfgucuGfcUfuuuc | 4305 | AAGGAAAAGCAGACGGCGA | 4574 |
| 1735858 | usasa | | csusu | | AUAU | |
| AD- | gscsuuugCfuGfGfGfuagugag | 4846 | VPusAfsgcuCfaCfUfacccAfgCfaaag | 4306 | CUGCUUUGCUGGGUAGUGA | 4575 |
| 1735859 | csusa | | csasg | | GCUC | |
| AD- | asasaugaAfaCfAfGfauucuga | 4847 | VPusCfsaucAfgAfAfucugUfuUfcauu | 4848 | GGAAAUGAAACAGAUUCUG | 4849 |
| 1735860 | usgsa | | uscsc | | AUGG | |

TABLE 16
Unmodified Sense and Antisense Strand Sequences of INHBC dsRNA Agents Comprising a GalNAc
Derivative Targeting Ligand

| | | SEQ | Range in | | SEQ | Range in |
|---|---|---|---|---|---|---|
| Duplex | Sense Sequence | ID | NM_ | Antisense Sequence | ID | NM_ |
| Name | 5′ to 3′ | NO: | 005538.4 | 5′ to 3 | NO: | 005538.4 |
| AD-1730493 | UCUUCCAGGGCCUCUGGCA | 4850 | 6-26 | ACUGCCAGAGGCCCUGGAAG | 4985 | 4-26 |
| | GU | | | AAG | | |
| AD-1730512 | CAGGACAGAGUUGAGACCA | 4851 | 27-47 | AGUGGUCUCAACUCUGUCCU | 4986 | 25-47 |
| | CU | | | GGC | | |
| AD-1730529 | CACAGCUGUUGAGACCCUG | 4852 | 44-64 | AUCAGGGUCUCAACAGCUGU | 4987 | 42-64 |
| | AU | | | GGU | | |
| AD-1730554 | GAGUCUGUAUUGCUCAAGA | 4853 | 69-89 | AUUCUUGAGCAAUACAGACU | 4988 | 67-89 |
| | AU | | | CAG | | |
| AD-1730570 | UGACCUCCUCAUUGCUUCU | 4854 | 105-125 | ACAGAAGCAAUGAGGAGGUC | 4989 | 103-125 |
| | GU | | | AUU | | |
| AD-1730588 | UGGCCUUUCUCCUCCUGGC | 4855 | 123-143 | AAGCCAGGAGGAGAAAGGCC | 4990 | 121-143 |
| | UU | | | AGA | | |
| AD-1730606 | CUCCAACCACAGUGGCCAC | 4856 | 141-161 | AAGUGGCCACUGUGGUUGGA | 4991 | 139-161 |
| | UU | | | GCC | | |
| AD-1730636 | GCGGUCAGUGUCCAGCAUG | 4857 | 171-191 | AACAUGCUGGACACUGACCG | 4992 | 169-191 |
| | UU | | | CCA | | |
| AD-1730643 | ACCUUGGAACUGGAGAGCC | 4858 | 200-220 | AUGGCUCUCCAGUUCCAAGG | 4993 | 198-220 |
| | AU | | | UGG | | |
| AD-1730667 | GAGCUGCUUCUUGAUCUGG | 4859 | 224-244 | AGCCAGAUCAAGAAGCAGCU | 4994 | 222-244 |
| | CU | | | CCC | | |
| AD-1730691 | AGAAGCAUCUUGGACAAGC | 4860 | 248-268 | AAGCUUGUCCAAGAUGCUUC | 4995 | 246-268 |
| | UU | | | UCU | | |
| AD-1730726 | CCAACACUGAACCGCCCUG | 4861 | 284-304 | AACAGGGCGGUUCAGUGUUG | 4996 | 282-304 |
| | UU | | | GGC | | |
| AD-1730749 | CAGAGCUGCUUUGAGGACU | 4862 | 307-327 | ACAGUCCUCAAAGCAGCUCU | 4997 | 305-327 |
| | GU | | | GGA | | |
| AD-1730765 | ACUGCACUGCAGCACCUCC | 4863 | 323-343 | AUGGAGGUGCUGCAGUGCAG | 4998 | 321-343 |
| | AU | | | UCC | | |
| AD-1730769 | GCACUUCUAGAGGACAACA | 4864 | 359-379 | ACUGUUGUCCUCUAGAAGUG | 4999 | 357-379 |
| | GU | | | CCC | | |
| AD-1730790 | GAACAGGAAUGUGAAAUCA | 4865 | 380-400 | AAUGAUUUCACAUUCCUGUU | 5000 | 378-400 |
| | UU | | | CCC | | |
| AD-1730807 | CAUCAGCUUUGCUGAGACA | 4866 | 397-417 | ACUGUCUCAGCAAAGCUGAU | 5001 | 395-417 |
| | GU | | | GAU | | |
| AD-1730825 | AGGCCUCUCCACCAUCAACC | 4867 | 415-435 | AGGUUGAUGGUGGAGAGGCC | 5002 | 413-435 |
| | U | | | UGU | | |
| AD-1730841 | AACCAGACUCGUCUUGAUU | 4868 | 431-451 | AAAAUCAAGACGAGUCUGGU | 5003 | 429-451 |
| | UU | | | UGA | | |
| AD-1730857 | AUUUUCACUUCUCCUCUGA | 4869 | 447-467 | AAUCAGAGGAGAAGUGAAA | 5004 | 445-467 |
| | UU | | | AUCA | | |
| AD-1730873 | UGAUAGAACUGCUGGUGAC | 4870 | 463-483 | AUGUCACCAGCAGUUCUAUC | 5005 | 461-483 |
| | AU | | | AGA | | |
| AD-1730910 | AGUCUCAUGUUCUUUGUGC | 4871 | 500-520 | AUGCACAAAGAACAUGAGAC | 5006 | 498-520 |
| | AU | | | UGG | | |
| AD-1730926 | UGCAGCUCCCUUCCAAUAC | 4872 | 516-536 | AGGUAUUGGAAGGGAGCUGC | 5007 | 514-536 |
| | CU | | | ACA | | |
| AD-1730942 | UACCACUUGGACCUUGAAA | 4873 | 532-552 | ACUUUCAAGGUCCAAGUGGU | 5008 | 530-552 |
| | GU | | | AUU | | |
| AD-1730958 | AAAGUGAGAGUCCUUGUGC | 4874 | 548-568 | AAGCACAAGGACUCUCACUU | 5009 | 546-568 |
| | UU | | | UCA | | |
| AD-1730982 | CCACAUAAUACCAACCUCA | 4875 | 572-592 | AGUGAGGUUGGUAUUAUGU | 5010 | 570-592 |
| | CU | | | GGAC | | |
| AD-1731003 | UUGGCUACUCAGUACCUGC | 4876 | 593-613 | AAGCAGGUACUGAGUAGCCA | 5011 | 591-613 |
| | UU | | | AGG | | |
| AD-1731019 | UGCUGGAGGUGGAUGCCAG | 4877 | 609-629 | AACUGGCAUCCACCUCCAGC | 5012 | 607-629 |
| | UU | | | AGG | | |
| AD-1731035 | CAGUGGCUGGCAUCAACUC | 4878 | 625-645 | AGGAGUUGAUGCCAGCCACU | 5013 | 623-645 |
| | CU | | | GGC | | |
| AD-1731042 | CCUGAAGCUCAAGCUGCCU | 4879 | 653-673 | ACAGGCAGCUUGAGCUUCAG | 5014 | 651-673 |
| | GU | | | GCC | | |
| AD-1731064 | GAGCUGGUACUUGAAGGCC | 4880 | 695-715 | AUGGCCUUCAAGUACCAGCU | 5015 | 693-715 |
| | AU | | | CCA | | |
| AD-1731088 | GCCCAGAGCUCAGUCAUCC | 4881 | 719-739 | AAGGAUGACUGAGCUCUGGG | 5016 | 717-739 |
| | UU | | | CUA | | |
| AD-1731117 | UGCCCAUAGGCCUUUUGUG | 4882 | 748-768 | ACCACAAAAGGCCUAUGGGC | 5017 | 746-768 |
| | GU | | | AGC | | |
| AD-1731134 | UGGCAGCCCGGGUGAGAGU | 4883 | 765-785 | AAACUCUCACCCGGGCUGCC | 5018 | 763-785 |
| | UU | | | ACA | | |
| AD-1731137 | GCAAACACCAGAUUCACCG | 4884 | 789-809 | AUCGGUGAAUCUGGUGUUUG | 5019 | 787-809 |
| | AU | | | CCC | | |
| AD-1731156 | ACGAGGCAUCGACUGCCAA | 4885 | 808-828 | ACUUGGCAGUCGAUGCCUCG | 5020 | 806-828 |
| | GU | | | UCG | | |
| AD-1731173 | AAGGAGGGUCCAGGAUGUG | 4886 | 825-845 | AGCACAUCCUGGACCCUCCU | 5021 | 823-845 |
| | CU | | | UGG | | |
| AD-1731189 | GUGCUGUCGACAAGAGUUU | 4887 | 841-861 | AAAAACUCUUGUCGACAGCA | 5022 | 839-861 |
| | UU | | | CAU | | |
| AD-1731205 | UUUUUUGUGGACUUCCGUG | 4888 | 857-877 | AUCACGGAAGUCCACAAAAA | 5023 | 855-877 |
| | AU | | | ACU | | |
| AD-1731234 | GCACGACUGGAUCAUCCAG | 4889 | 886-906 | AGCUGGAUGAUCCAGUCGUG | 5024 | 884-906 |
| | CU | | | CCA | | |
| AD-1731264 | CGCCAUGAACUUCUGCAUA | 4890 | 916-936 | ACUAUGCAGAAGUUCAUGGC | 5025 | 914-936 |
| | GU | | | GUA | | |
| AD-1731289 | UGCCCACUACACAUAGCAG | 4891 | 941-961 | ACCUGCUAUGUGUAGUGGGC | 5026 | 939-961 |
| | GU | | | ACU | | |
| AD-1731307 | GGCAUGCCUGGUAUUGCUG | 4892 | 959-979 | AGCAGCAAUACCAGGCAUGC | 5027 | 957-979 |
| | CU | | | CUG | | |
| AD-1731323 | CUGCCUCCUUUCACACUGC | 4893 | 975-995 | AUGCAGUGUGAAAGGAGGCA | 5028 | 973-995 |
| | AU | | | GCA | | |
| AD-1731340 | GCAGUGCUCAAUCUUCUCA | 4894 | 992-1012 | AUUGAGAAGAUUGAGCACUG | 5029 | 990-1012 |
| | AU | | | CAG | | |
| AD-1731358 | AAGGCCAACACAGCUGCAG | 4895 | 1010-1030 | ACCUGCAGCUGUGUUGGCCU | 5030 | 1008-1030 |
| | GU | | | UGA | | |
| AD-1731371 | GCUCAUGCUGUGUACCCAC | 4896 | 1044-1064 | ACGUGGGUACACAGCAUGAG | 5031 | 1042-1064 |
| | GU | | | CCC | | |
| AD-1731380 | GUCUCUGCUCUAUUAUGAC | 4897 | 1078-1098 | AUGUCAUAAUAGAGCAGAGA | 5032 | 1076-1098 |
| | AU | | | CAG | | |
| AD-1731398 | GACAGGGACAGCAACAUUG | 4898 | 1094-1114 | AACAAUGUUGCUGUCCCUGU | 5033 | 1092-1114 |
| | UU | | | CAU | | |
| AD-1731415 | UGUCAAGACUGACAUACCU | 4899 | 1111-1131 | ACAGGUAUGUCAGUCUUGAC | 5034 | 1109-1131 |
| | GU | | | AAU | | |
| AD-1731431 | CCUGACAUGGUAGUAGAGG | 4900 | 1127-1147 | AGCCUCUACUACCAUGUCAG | 5035 | 1125-1147 |
| | CU | | | GUA | | |
| AD-1731457 | AGUUAGUCUAUGUGUGGUA | 4901 | 1157-1177 | AAUACCACACAUAGACUAAC | 5036 | 1155-1177 |
| | UU | | | UGC | | |
| AD-1731484 | CCAAGGUUGCAUGGGAAAA | 4902 | 1184-1204 | AGUUUUCCCAUGCAACCUUG | 5037 | 1182-1204 |
| | CU | | | GGC | | |
| AD-1731492 | ACAGAAGUGCACUUCCUUG | 4903 | 1212-1232 | AUCAAGGAAGUGCACUUCUG | 5038 | 1210-1232 |
| | AU | | | UAG | | |
| AD-1731511 | AGAGGAGGGAAUGACCUCA | 4904 | 1231-1251 | AAUGAGGUCAUUCCCUCCUC | 5039 | 1229-1251 |
| | UU | | | UCA | | |
| AD-1731527 | UCAUUCUCUGUCCAGAAUG | 4905 | 1247-1267 | AACAUUCUGGACAGAGAAUG | 5040 | 1245-1267 |
| | UU | | | AGG | | |
| AD-1731545 | GUGGACUCCCUCUUCCUGA | 4906 | 1265-1285 | ACUCAGGAAGAGGGAGUCCA | 5041 | 1263-1285 |
| | GU | | | CAU | | |
| AD-1731562 | GAGCAUCUUAUGGAAAUUA | 4907 | 1282-1302 | AGUAAUUUCCAUAAGAUGCU | 5042 | 1280-1302 |
| | CU | | | CAG | | |
| AD-1731564 | CACCUUUGACUUGAAGAAA | 4908 | 1304-1324 | AGUUUCUUCAAGUCAAAGGU | 5043 | 1302-1324 |
| | CU | | | GGG | | |
| AD-1731584 | CUUCAUCUAAAGCAAGUCA | 4909 | 1324-1344 | AGUGACUUGCUUUAGAUGAA | 5044 | 1322-1344 |
| | CU | | | GGU | | |
| AD-1731600 | UCACUGUGCCAUCUUCCUG | 4910 | 1340-1360 | AUCAGGAAGAUGGCACAGUG | 5045 | 1338-1360 |
| | AU | | | ACU | | |
| AD-1731618 | GACCACUACCCUCUUUCCU | 4911 | 1358-1378 | AUAGGAAAGAGGGUAGUGG | 5046 | 1356-1378 |
| | AU | | | UCAG | | |
| AD-1731646 | UCCAUCCCGCUAGUCCAUCC | 4912 | 1386-1406 | AGGAUGGACUAGCGGGAUGG | 5047 | 1384-1406 |
| | U | | | ACU | | |
| AD-1731671 | ACCCAUCUCCAACCAUGAG | 4913 | 1431-1451 | AGCUCAUGGUUGGAGAUGGG | 5048 | 1429-1451 |
| | CU | | | UCU | | |
| AD-1731687 | GAGCAAUGCCAUCUGGUUC | 4914 | 1447-1467 | AGGAACCAGAUGGCAUUGCU | 5049 | 1445-1467 |
| | CU | | | CAU | | |
| AD-1731704 | UCCCAGGCAAAGACACCCU | 4915 | 1464-1484 | AAAGGGUGUCUUUGCCUGGG | 5050 | 1462-1484 |
| | UU | | | AAC | | |
| AD-1731720 | CCUUAGCUCACCUUUAAUA | 4916 | 1480-1500 | ACUAUUAAAGGUGAGCUAAG | 5051 | 1478-1500 |
| | GU | | | GGU | | |
| AD-1731728 | ACCCACUAUGCCUUCCUGU | 4917 | 1508-1528 | AGACAGGAAGGCAUAGUGGG | 5052 | 1506-1528 |
| | CU | | | UUA | | |
| AD-1731745 | GUCCUUUCUACUCAAUGGU | 4918 | 1525-1545 | AGACCAUUGAGUAGAAAGGA | 5053 | 1523-1545 |
| | CU | | | CAG | | |
| AD-1731750 | UCCAAGAUGAGUUGACACA | 4919 | 1550-1570 | AUUGUGUCAACUCAUCUUGG | 5054 | 1548-1570 |
| | AU | | | AGU | | |
| AD-1731753 | CAAUUUUUGUGGAUCUCCA | 4920 | 1580-1600 | ACUGGAGAUCCACAAAAAUU | 5055 | 1578-1600 |
| | GU | | | GGG | | |
| AD-1731782 | UCUUUGGAUUCACCAAAGU | 4921 | 1609-1629 | AAACUUUGGUGAAUCCAAAG | 5056 | 1607-1629 |
| | UU | | | AAG | | |
| AD-1731813 | UGCCCAAAAUAGAGGCUUA | 4922 | 1640-1660 | AGUAAGCCUCUAUUUUGGGC | 5057 | 1638-1660 |
| | CU | | | AGC | | |
| AD-1731819 | CUGUCCUUCUUAGUUGUCC | 4923 | 1685-1705 | AUGGACAACUAAGAAGGACA | 5058 | 1683-1705 |
| | AU | | | GGG | | |
| AD-1731842 | GAACUACUAAAGCUCUCUU | 4924 | 1708-1728 | AAAAGAGAGCUUUAGUAGU | 5059 | 1706-1728 |
| | UU | | | UCAC | | |
| AD-1731858 | CUUUGCAUACCUUCAUCCA | 4925 | 1724-1744 | AAUGGAUGAAGGUAUGCAA | 5060 | 1722-1744 |
| | UU | | | AGAG | | |
| AD-1731874 | CCAUUUUUUGUCCUUCUCU | 4926 | 1740-1760 | ACAGAGAAGGACAAAAAAUG | 5061 | 1738-1760 |
| | GU | | | GAU | | |
| AD-1731890 | GCCUUUCUCUAUGCCCUUA | 4927 | 1759-1779 | AUUAAGGGCAUAGAGAAAG | 5062 | 1757-1779 |
| | AU | | | GCAG | | |
| AD-1731906 | UUAAGGGCUGACUUGCCUG | 4928 | 1775-1795 | AUCAGGCAAGUCAGCCCUUA | 5063 | 1773-1795 |
| | AU | | | AGG | | |
| AD-1731923 | UGAGCUCUAUCACCUGAGC | 4929 | 1792-1812 | AAGCUCAGGUGAUAGAGCUC | 5064 | 1790-1812 |
| | UU | | | AGG | | |
| AD-1731932 | UCUGGCUUCCUGCUGAGGU | 4930 | 1821-1841 | AGACCUCAGCAGGAAGCCAG | 5065 | 1819-1841 |
| | CU | | | AGG | | |
| AD-1731958 | UUUCUUAUCCCUGUUCCCU | 4931 | 1847-1867 | AGAGGGAACAGGGAUAAGA | 5066 | 1845-1867 |
| | CU | | | AAUG | | |
| AD-1731978 | UCUGUCUAGGUGUCAUGGU | 4932 | 1867-1887 | AAACCAUGACACCUAGACAG | 5067 | 1865-1887 |
| | UU | | | AGA | | |
| AD-1731997 | UCUGUGUAACUGUGGCUAU | 4933 | 1886-1906 | AAAUAGCCACAGUUACACAG | 5068 | 1884-1906 |
| | UU | | | AAC | | |
| AD-1732013 | UAUUCUGUGUCCCUACACU | 4934 | 1902-1922 | AUAGUGUAGGGACACAGAAU | 5069 | 1900-1922 |
| | AU | | | AGC | | |
| AD-1732031 | GCCUACAUUCUGAUAUAAC | 4935 | 1953-1973 | AAGUUAUAUCAGAAUGUAG | 5070 | 1951-1973 |
| | UU | | | GCAG | | |
| AD-1732048 | CCUAAAGGCUUUCUAUCUU | 4936 | 1991-2011 | ACAAGAUAGAAAGCCUUUAG | 5071 | 1989-2011 |
| | GU | | | GAC | | |
| AD-1732062 | CUCAACAUCUCAUACUGGU | 4937 | 2025-2045 | AAACCAGUAUGAGAUGUUGA | 5072 | 2023-2045 |
| | UU | | | GGC | | |
| AD-1732078 | GGUUCCCUUAACUCUGCCU | 4938 | 2041-2061 | AUAGGCAGAGUUAAGGGAAC | 5073 | 2039-2061 |
| | AU | | | CAG | | |
| AD-1732094 | CCUAUACCUCUGUAAAUAA | 4939 | 2057-2077 | AAUUAUUUACAGAGGUAUA | 5074 | 2055-2077 |
| | UU | | | GGCA | | |
| AD-1732110 | UAAUUCCUUCACUAAGUUC | 4940 | 2073-2093 | AAGAACUUAGUGAAGGAAU | 5075 | 2071-2093 |
| | UU | | | UAUU | | |
| AD-1732157 | AAAGUCCUCUAUCUCCUAC | 4941 | 2120-2140 | AUGUAGGAGAUAGAGGACU | 5076 | 2118-2140 |
| | AU | | | UUUC | | |
| AD-1732173 | UACAAGGGCCCUAACUGGC | 4942 | 2136-2156 | AUGCCAGUUAGGGCCCUUGU | 5077 | 2134-2156 |
| | AU | | | AGG | | |
| AD-1732176 | CAGAUGACACAGAGCCUGC | 4943 | 2159-2179 | AGGCAGGCUCUGUGUCAUCU | 5078 | 2157-2179 |
| | CU | | | GGG | | |
| AD-1732195 | CUGCUUAUGCUGUAGUCUG | 4944 | 2178-2198 | AGCAGACUACAGCAUAAGCA | 5079 | 2176-2198 |
| | CU | | | GGC | | |
| AD-1732217 | ACUCUGCUGUCUCUUCACA | 4945 | 2200-2220 | AAUGUGAAGAGACAGCAGAG | 5080 | 2198-2220 |
| | UU | | | UAG | | |
| AD-1732235 | AUGGUCUCCUCAGAACUGA | 4946 | 2218-2238 | AUUCAGUUCUGAGGAGACCA | 5081 | 2216-2238 |
| | AU | | | UGU | | |
| AD-1732253 | AACUAUUGUAUCCAUCUCA | 4947 | 2236-2256 | AGUGAGAUGGAUACAAUAG | 5082 | 2234-2256 |
| | CU | | | UUCA | | |
| AD-1732269 | UCACACUUUAUGCCUCUUC | 4948 | 2252-2272 | AAGAAGAGGCAUAAAGUGU | 5083 | 2250-2272 |
| | UU | | | GAGA | | |
| AD-1732291 | AUCCUUCCAGAACCAUCUU | 4949 | 2294-2314 | AAAAGAUGGUUCUGGAAGG | 5084 | 2292-2314 |
| | UU | | | AUGG | | |
| AD-1732308 | UUUGAGGUCUCAUGGCUAA | 4950 | 2311-2331 | AAUUAGCCAUGAGACCUCAA | 5085 | 2309-2331 |
| | UU | | | AGA | | |
| AD-1732335 | UAGGCUUUACCUGUUCCCU | 4951 | 2338-2358 | AGAGGGAACAGGUAAAGCCU | 5086 | 2336-2358 |
| | CU | | | AGG | | |
| AD-1732353 | UCUGUAAUCCCUCCAAAAG | 4952 | 2356-2376 | AUCUUUUGGAGGGAUUACAG | 5087 | 2354-2376 |
| | AU | | | AGG | | |
| AD-1732372 | AUGAGACAGAUCUAUGCUU | 4953 | 2375-2395 | ACAAGCAUAGAUCUGUCUCA | 5088 | 2373-2395 |
| | GU | | | UCU | | |
| AD-1732389 | UUGGUCAUCCAGUAAACUG | 4954 | 2392-2412 | AUCAGUUUACUGGAUGACCA | 5089 | 2390-2412 |
| | AU | | | AGC | | |
| AD-1732415 | GUGGGCACGCAAGUGUGGG | 4955 | 2418-2438 | AUCCCACACUUGCGUGCCCA | 5090 | 2416-2438 |
| | AU | | | CAG | | |
| AD-1732440 | AGGCAUGCUCAGAGCUGGC | 4956 | 2443-2463 | AAGCCAGCUCUGAGCAUGCC | 5091 | 2441-2463 |
| | UU | | | UCU | | |
| AD-1732469 | UCUGACUUGCCUUCCUUUC | 4957 | 2472-2492 | AUGAAAGGAAGGCAAGUCAG | 5092 | 2470-2492 |
| | AU | | | AGG | | |
| AD-1732479 | UGCUCCACCCAGGAGUCCU | 4958 | 2503-2523 | ACAGGACUCCUGGGUGGAGC | 5093 | 2501-2523 |
| | GU | | | ACU | | |
| AD-1732500 | CUGGAAGCUGGAAUGGGCA | 4959 | 2524-2544 | AUUGCCCAUUCCAGCUUCCA | 5094 | 2522-2544 |
| | AU | | | GGC | | |
| AD-1732520 | GGGCUGCUGGAGUGGGACA | 4960 | 2544-2564 | ACUGUCCCACUCCAGCAGCC | 5095 | 2542-2564 |
| | GU | | | CUU | | |
| AD-1732533 | CAGGGAGAAGAGGAAGGCC | 4961 | 2561-2581 | AAGGCCUUCCUCUUCUCCCU | 5096 | 2559-2581 |
| | UU | | | GUC | | |
| AD-1732549 | GCCUGGAUGAGGAGAGGGU | 4962 | 2577-2597 | ACACCCUCUCCUCAUCCAGG | 5097 | 2575-2597 |
| | GU | | | CCU | | |
| AD-1732565 | GUGGCAUUUGCUCUGAGAC | 4963 | 2594-2614 | AAGUCUCAGAGCAAAUGCCA | 5098 | 2592-2614 |
| | UU | | | CCC | | |
| AD-1732584 | UGGGUCCUUUUUAGACCUU | 4964 | 2613-2633 | AAAAGGUCUAAAAAGGACCC | 5099 | 2611-2633 |
| | UU | | | AGU | | |
| AD-1732604 | CUCCCUUUGGCUGGACAGU | 4965 | 2654-2674 | AGACUGUCCAGCCAAAGGGA | 5100 | 2652-2674 |
| | CU | | | GGA | | |
| AD-1732625 | UGAACCAUGAGGUCGAUAA | 4966 | 2675-2695 | AAUUAUCGACCUCAUGGUUC | 5101 | 2673-2695 |
| | UU | | | AGG | | |
| AD-1732644 | UGUCUGCAGCCCAAGGCCG | 4967 | 2694-2714 | AUCGGCCUUGGGCUGCAGAC | 5102 | 2692-2714 |
| | AU | | | AUU | | |
| AD-1732661 | CGAGUUUGCGCAAAACCCA | 4968 | 2711-2731 | AAUGGGUUUUGCGCAAACUC | 5103 | 2709-2731 |
| | UU | | | GGC | | |
| AD-1732677 | CCAUGUGUUCUUUGGUAAA | 4969 | 2727-2747 | AGUUUACCAAAGAACACAUG | 5104 | 2725-2747 |
| | CU | | | GGU | | |
| AD-1732696 | CGUGAUGUCUGUGUUUGCU | 4970 | 2746-2766 | AGAGCAAACACAGACAUCAC | 5105 | 2744-2766 |
| | CU | | | GUU | | |
| AD-1732708 | CUCCUAUGAGGGUAAGAGG | 4971 | 2779-2799 | AACCUCUUACCCUCAUAGGA | 5106 | 2777-2799 |
| | UU | | | GGG | | |
| AD-1732728 | CCCUGAAAUAGGAACCCUA | 4972 | 2799-2819 | ACUAGGGUUCCUAUUUCAGG | 5107 | 2797-2819 |
| | GU | | | GAC | | |
| AD-1732744 | CUAGAGGAGAAAGUCUGAA | 4973 | 2815-2835 | AUUUCAGACUUUCUCCUCUA | 5108 | 2813-2835 |
| | AU | | | GGG | | |
| AD-1732757 | GACUGUAAAUCUGAGCUUG | 4974 | 2849-2869 | AUCAAGCUCAGAUUUACAGU | 5109 | 2847-2869 |
| | AU | | | CCC | | |
| AD-1732786 | GAGCAACCCAUGGAAGUUA | 4975 | 2878-2898 | AAUAACUUCCAUGGGUUGCU | 5110 | 2876-2898 |
| | UU | | | CAG | | |
| AD-1732807 | CCACCUUUGACUUGAGGAG | 4976 | 2899-2919 | AUCUCCUCAAGUCAAAGGUG | 5111 | 2897-2919 |
| | AU | | | GGA | | |
| AD-1732827 | CCUUCAUCUAAGGAGAAUC | 4977 | 2919-2939 | AAGAUUCUCCUUAGAUGAAG | 5112 | 2917-2939 |
| | UU | | | GUC | | |
| AD-1732849 | GGAGGCCUUCUGGUGUCUC | 4978 | 2941-2961 | AGGAGACACCAGAAGGCCUC | 5113 | 2939-2961 |
| | CU | | | CUU | | |
| AD-1732865 | UCCCAAUUACAGCUUAGUC | 4979 | 2995-3015 | AAGACUAAGCUGUAAUUGGG | 5114 | 2993-3015 |
| | UU | | | AAG | | |
| AD-1732881 | GUCUCCAGGGCUAGGACUG | 4980 | 3011-3031 | ACCAGUCCUAGCCCUGGAGA | 5115 | 3009-3031 |
| | GU | | | CUA | | |
| AD-1732885 | AAGCAAAGUGAGUCAUUCA | 4981 | 3035-3055 | AGUGAAUGACUCACUUUGCU | 5116 | 3033-3055 |
| | CU | | | UUA | | |
| AD-1732890 | GUGGUGAACAAUUUAUUAA | 4982 | 3079-3099 | AAUUAAUAAAUUGUUCACCA | 5117 | 3077-3099 |
| | UU | | | CCC | | |
| AD-1732908 | UAGGACUUUAAUGCAAUAU | 4983 | 3104-3124 | AAAUAUUGCAUUAAAGUCCU | 5118 | 3102-3124 |
| | UU | | | AUC | | |
| AD-1732940 | GAACAAAAUAGCCUACUUU | 4984 | 3160-3180 | AAAAAGUAGGCUAUUUUGU | 5119 | 3158-3180 |
| | UU | | | UCAU | | |

TABLE 17
Modified Sense and Antisense Strand Sequences of INHBC dsRNA Agents Comprising a GalNAc Derivative Targeting Ligand

| | | SEQ | | SEQ | | SEQ |
|---|---|---|---|---|---|---|
| Duplex | | ID | | ID | | ID |
| Name | Sense Sequence 5′ to 3′ | NO: | Sense Sequence 5′ to 3′ | NO: | mRNA Target Sequence 5′ to 3′ | NO: |
| AD- | uscsuuccAfgGfGfCfcucuggca | 5120 | asCfsugcCfaGfAfggccCfuGfgaaga | 5255 | CUUCUUCCAGGGCCUCUGG | 5390 |
| 1730493 | guL96 | | sasg | | CAGC | |
| AD- | csasggacAfgAfGfUfugagaccac | 5121 | asGfsuggUfcUfCfaacuCfuGfuccug | 5256 | GCCAGGACAGAGUUGAGAC | 5391 |
| 1730512 | uL96 | | sgsc | | CACA | |
| AD- | csascagcUfgUfUfGfagacccuga | 5122 | asUfscagGfgUfCfucaaCfaGfcugug | 5257 | ACCACAGCUGUUGAGACCC | 5392 |
| 1730529 | uL96 | | sgsu | | UGAG | |
| AD- | gsasgucuGfuAfUfUfgcucaaga | 5123 | asUfsucuUfgAfGfcaauAfcAfgacuc | 5258 | CUGAGUCUGUAUUGCUCAA | 5393 |
| 1730554 | auL96 | | sasg | | GAAG | |
| AD- | usgsaccuCfcUfCfAfuugcuucu | 5124 | asCfsagaAfgCfAfaugaGfgAfgguca | 5259 | AAUGACCUCCUCAUUGCUU | 5394 |
| 1730570 | guL96 | | susu | | CUGG | |
| AD- | usgsgccuUfuCfUfCfcuccuggc | 5125 | asAfsgccAfgGfAfggagAfaAfggcc | 5260 | UCUGGCCUUUCUCCUCCUG | 5395 |
| 1730588 | uuL96 | | asgsa | | GCUC | |
| AD- | csusccaaCfcAfCfAfguggccacu | 5126 | asAfsgugGfcCfAfcuguGfgUfugga | 5261 | GGCUCCAACCACAGUGGCC | 5396 |
| 1730606 | uL96 | | gscsc | | ACUC | |
| AD- | gscsggucAfgUfGfUfccagcaug | 5127 | asAfscauGfcUfGfgacaCfuGfaccgc | 5262 | UGGCGGUCAGUGUCCAGCA | 5397 |
| 1730636 | uuL96 | | scsa | | UGUG | |
| AD- | ascscuugGfaAfCfUfggagagcca | 5128 | asUfsggcUfcUfCfcaguUfcCfaaggu | 5263 | CCACCUUGGAACUGGAGAG | 5398 |
| 1730643 | uL96 | | sgsg | | CCAG | |
| AD- | gsasgcugCfuUfCfUfugaucugg | 5129 | asGfsccaGfaUfCfaagaAfgCfagcuc | 5264 | GGGAGCUGCUUCUUGAUCU | 5399 |
| 1730667 | cuL96 | | scsc | | GGCC | |
| AD- | asgsaagcAfuCfUfUfggacaagcu | 5130 | asAfsgcuUfgUfCfcaagAfuGfcuuc | 5265 | AGAGAAGCAUCUUGGACAA | 5400 |
| 1730691 | uL96 | | uscsu | | GCUG | |
| AD- | cscsaacaCfuGfAfAfccgcccugu | 5131 | asAfscagGfgCfGfguucAfgUfguug | 5266 | GCCCAACACUGAACCGCCCU | 5401 |
| 1730726 | uL96 | | gsgsc | | GUG | |
| AD- | csasgagcUfgCfUfUfugaggacu | 5132 | asCfsaguCfcUfCfaaagCfaGfcucug | 5267 | UCCAGAGCUGCUUUGAGGA | 5402 |
| 1730749 | gul96 | | sgsa | | CUGC | |
| AD- | ascsugcaCfuGfCfAfgcaccucca | 5133 | asUfsggaGfgUfGfcugcAfgUfgcag | 5268 | GGACUGCACUGCAGCACCU | 5403 |
| 1730765 | uL96 | | uscsc | | CCAC | |
| AD- | gscsacuuCfuAfGfAfggacaacag | 5134 | asCfsuguUfgUfCfcucuAfgAfagug | 5269 | GGGCACUUCUAGAGGACAA | 5404 |
| 1730769 | uL96 | | cscsc | | CAGG | |
| AD- | gsasacagGfaAfUfGfugaaaucau | 5135 | asAfsugaUfuUfCfacauUfcCfuguuc | 5270 | GGGAACAGGAAUGUGAAAU | 5405 |
| 1730790 | uL96 | | scsc | | CAUC | |
| AD- | csasucagCfuUfUfGfcugagacag | 5136 | asCfsuguCfuCfAfgcaaAfgCfugaug | 5271 | AUCAUCAGCUUUGCUGAGA | 5406 |
| 1730807 | uL96 | | sasu | | CAGG | |
| AD- | asgsgccuCfuCfCfAfccaucaacc | 5137 | asGfsguuGfaUfGfguggAfgAfggcc | 5272 | ACAGGCCUCUCCACCAUCAA | 5407 |
| 1730825 | uL96 | | usgsu | | CCA | |
| AD- | asasccagAfcUfCfGfucuugauuu | 5138 | asAfsaauCfaAfGfacgaGfuCfugguu | 5273 | UCAACCAGACUCGUCUUGA | 5408 |
| 1730841 | uL96 | | sgsa | | UUUU | |
| AD- | asusuuucAfcUfUfCfuccucuga | 5139 | asAfsucaGfaGfGfagaaGfuGfaaaau | 5274 | UGAUUUUCACUUCUCCUCU | 5409 |
| 1730857 | uuL96 | | scsa | | GAUA | |
| AD- | usgsauagAfaCfUfGfcuggugac | 5140 | asUfsgucAfcCfAfgcagUfuCfuauca | 5275 | UCUGAUAGAACUGCUGGUG | 5410 |
| 1730873 | auL96 | | sgsa | | ACAG | |
| AD- | asgsucucAfuGfUfUfcuuugugc | 5141 | asUfsgcaCfaAfAfgaacAfuGfagacu | 5276 | CCAGUCUCAUGUUCUUUGU | 5411 |
| 1730910 | auL96 | | sgsg | | GCAG | |
| AD- | usgscagcUfcCfCfUfuccaauacc | 5142 | asGfsguaUfuGfGfaaggGfaGfcugc | 5277 | UGUGCAGCUCCCUUCCAAU | 5412 |
| 1730926 | uL96 | | ascsa | | ACCA | |
| AD- | usasccacUfuGfGfAfccuugaaag | 5143 | asCfsuuuCfaAfGfguccAfaGfuggu | 5278 | AAUACCACUUGGACCUUGA | 5413 |
| 1730942 | uL96 | | asusu | | AAGU | |
| AD- | asasagugAfgAfGfUfccuugugc | 5144 | asAfsgcaCfaAfGfgacuCfuCfacuuu | 5279 | UGAAAGUGAGAGUCCUUGU | 5414 |
| 1730958 | uuL96 | | scsa | | GCUG | |
| AD- | cscsacauAfaUfAfCfcaaccucac | 5145 | asGfsugaGfgUfUfgguaUfuAfugug | 5280 | GUCCACAUAAUACCAACCU | 5415 |
| 1730982 | uL96 | | gsasc | | CACC | |
| AD- | ususggcuAfcUfCfAfguaccugc | 5146 | asAfsgcaGfgUfAfcugaGfuAfgccaa | 5281 | CCUUGGCUACUCAGUACCU | 5416 |
| 1731003 | uuL96 | | sgsg | | GCUG | |
| AD- | usgscuggAfgGfUfGfgaugccag | 5147 | asAfscugGfcAfUfccacCfuCfcagca | 5282 | CCUGCUGGAGGUGGAUGCC | 5417 |
| 1731019 | uuL96 | | sgsg | | AGUG | |
| AD- | csasguggCfuGfGfCfaucaacucc | 5148 | asGfsgagUfuGfAfugccAfgCfcacu | 5283 | GCCAGUGGCUGGCAUCAAC | 5418 |
| 1731035 | uL96 | | gsgsc | | UCCC | |
| AD- | cscsugaaGfcUfCfAfagcugccug | 5149 | asCfsaggCfaGfCfuugaGfcUfucagg | 5284 | GGCCUGAAGCUCAAGCUGC | 5419 |
| 1731042 | uL96 | | scsc | | CUGC | |
| AD- | gsasgcugGfuAfCfUfugaaggcc | 5150 | asUfsggcCfuUfCfaaguAfcCfagcuc | 5285 | UGGAGCUGGUACUUGAAGG | 5420 |
| 1731064 | auL96 | | scsa | | CCAG | |
| AD- | gscsccagAfgCfUfCfagucauccu | 5151 | asAfsggaUfgAfCfugagCfuCfuggg | 5286 | UAGCCCAGAGCUCAGUCAU | 5421 |
| 1731088 | uL96 | | csusa | | CCUG | |
| AD- | usgscccaUfaGfGfCfcuuuugug | 5152 | asCfscacAfaAfAfggccUfaUfgggca | 5287 | GCUGCCCAUAGGCCUUUUG | 5422 |
| 1731117 | gul96 | | sgsc | | UGGC | |
| AD- | usgsgcagCfcCfGfGfgugagagu | 5153 | asAfsacuCfuCfAfcccgGfgCfugcca | 5288 | UGUGGCAGCCCGGGUGAGA | 5423 |
| 1731134 | uuL96 | | scsa | | GUUG | |
| AD- | gscsaaacAfcCfAfGfauucaccga | 5154 | asUfscggUfgAfAfucugGfuGfuuug | 5289 | GGGCAAACACCAGAUUCAC | 5424 |
| 1731137 | uL96 | | cscsc | | CGAC | |
| AD- | ascsgaggCfaUfCfGfacugccaag | 5155 | asCfsuugGfcAfGfucgaUfgCfcucg | 5290 | CGACGAGGCAUCGACUGCC | 5425 |
| 1731156 | uL96 | | uscsg | | AAGG | |
| AD- | asasggagGfgUfCfCfaggaugug | 5156 | asGfscacAfuCfCfuggaCfcCfuccuu | 5291 | CCAAGGAGGGUCCAGGAUG | 5426 |
| 1731173 | cuL96 | | sgsg | | UGCU | |
| AD- | gsusgcugUfcGfAfCfaagaguuu | 5157 | asAfsaaaCfuCfUfugucGfaCfagcac | 5292 | AUGUGCUGUCGACAAGAGU | 5427 |
| 1731189 | uuL96 | | sasu | | UUUU | |
| AD- | ususuuuuGfuGfGfAfcuuccgug | 5158 | asUfscacGfgAfAfguccAfcAfaaaaa | 5293 | AGUUUUUUGUGGACUUCCG | 5428 |
| 1731205 | auL96 | | scsu | | UGAG | |
| AD- | gscsacgaCfuGfGfAfucauccagc | 5159 | asGfscugGfaUfGfauccAfgUfcgug | 5294 | UGGCACGACUGGAUCAUCC | 5429 |
| 1731234 | uL96 | | cscsa | | AGCC | |
| AD- | csgsccauGfaAfCfUfucugcauag | 5160 | asCfsuauGfcAfGfaaguUfcAfuggc | 5295 | UACGCCAUGAACUUCUGCA | 5430 |
| 1731264 | uL96 | | gsusa | | UAGG | |
| AD- | usgscccaCfuAfCfAfcauagcagg | 5161 | asCfscugCfuAfUfguguAfgUfgggc | 5296 | AGUGCCCACUACACAUAGC | 5431 |
| 1731289 | uL96 | | ascsu | | AGGC | |
| AD- | gsgscaugCfcUfGfGfuauugcug | 5162 | asGfscagCfaAfUfaccaGfgCfaugcc | 5297 | CAGGCAUGCCUGGUAUUGC | 5432 |
| 1731307 | cuL96 | | susg | | UGCC | |
| AD- | csusgccuCfcUfUfUfcacacugca | 5163 | asUfsgcaGfuGfUfgaaaGfgAfggca | 5298 | UGCUGCCUCCUUUCACACU | 5433 |
| 1731323 | uL96 | | gscsa | | GCAG | |
| AD- | gscsagugCfuCfAfAfucuucucaa | 5164 | asUfsugaGfaAfGfauugAfgCfacug | 5299 | CUGCAGUGCUCAAUCUUCU | 5434 |
| 1731340 | uL96 | | csasg | | CAAG | |
| AD- | asasggccAfaCfAfCfagcugcagg | 5165 | asCfscugCfaGfCfugugUfuGfgccu | 5300 | UCAAGGCCAACACAGCUGC | 5435 |
| 1731358 | uL96 | | usgsa | | AGGC | |
| AD- | gscsucauGfcUfGfUfguacccacg | 5166 | asCfsgugGfgUfAfcacaGfcAfugagc | 5301 | GGGCUCAUGCUGUGUACCC | 5436 |
| 1731371 | uL96 | | scsc | | ACGG | |
| AD- | gsuscucuGfcUfCfUfauuaugaca | 5167 | asUfsgucAfuAfAfuagaGfcAfgaga | 5302 | CUGUCUCUGCUCUAUUAUG | 5437 |
| 1731380 | uL96 | | csasg | | ACAG | |
| AD- | gsascaggGfaCfAfGfcaacauugu | 5168 | asAfscaaUfgUfUfgcugUfcCfcuguc | 5303 | AUGACAGGGACAGCAACAU | 5438 |
| 1731398 | uL96 | | sasu | | UGUC | |
| AD- | usgsucaaGfaCfUfGfacauaccug | 5169 | asCfsaggUfaUfGfucagUfcUfugaca | 5304 | AUUGUCAAGACUGACAUAC | 5439 |
| 1731415 | uL96 | | sasu | | CUGA | |
| AD- | cscsugacAfuGfGfUfaguagagg | 5170 | asGfsccuCfuAfCfuaccAfuGfucagg | 5305 | UACCUGACAUGGUAGUAGA | 5440 |
| 1731431 | cuL96 | | susa | | GGCC | |
| AD- | asgsuuagUfcUfAfUfguguggua | 5171 | asAfsuacCfaCfAfcauaGfaCfuaacu | 5306 | GCAGUUAGUCUAUGUGUGG | 5441 |
| 1731457 | uuL96 | | sgsc | | UAUG | |
| AD- | cscsaaggUfuGfCfAfugggaaaac | 5172 | asGfsuuuUfcCfCfaugcAfaCfcuugg | 5307 | GCCCAAGGUUGCAUGGGAA | 5442 |
| 1731484 | uL96 | | sgsc | | AACA | |
| AD- | ascsagaaGfuGfCfAfcuuccuuga | 5173 | asUfscaaGfgAfAfgugcAfcUfucug | 5308 | CUACAGAAGUGCACUUCCU | 5443 |
| 1731492 | uL96 | | usasg | | UGAG | |
| AD- | asgsaggaGfgGfAfAfugaccuca | 5174 | asAfsugaGfgUfCfauucCfcUfccucu | 5309 | UGAGAGGAGGGAAUGACCU | 5444 |
| 1731511 | uuL96 | | scsa | | CAUU | |
| AD- | uscsauucUfcUfGfUfccagaaugu | 5175 | asAfscauUfcUfGfgacaGfaGfaauga | 5310 | CCUCAUUCUCUGUCCAGAA | 5445 |
| 1731527 | uL96 | | sgsg | | UGUG | |
| AD- | gsusggacUfcCfCfUfcuuccugag | 5176 | asCfsucaGfgAfAfgaggGfaGfuccac | 5311 | AUGUGGACUCCCUCUUCCU | 5446 |
| 1731545 | uL96 | | sasu | | GAGC | |
| AD- | gsasgcauCfuUfAfUfggaaauuac | 5177 | asGfsuaaUfuUfCfcauaAfgAfugcuc | 5312 | CUGAGCAUCUUAUGGAAAU | 5447 |
| 1731562 | uL96 | | sasg | | UACC | |
| AD- | csasccuuUfgAfCfUfugaagaaac | 5178 | asGfsuuuCfuUfCfaaguCfaAfaggu | 5313 | CCCACCUUUGACUUGAAGA | 5448 |
| 1731564 | uL96 | | gsgsg | | AACC | |
| AD- | csusucauCfuAfAfAfgcaagucac | 5179 | asGfsugaCfuUfGfcuuuAfgAfugaa | 5314 | ACCUUCAUCUAAAGCAAGU | 5449 |
| 1731584 | uL96 | | gsgsu | | CACU | |
| AD- | uscsacugUfgCfCfAfucuuccuga | 5180 | asUfscagGfaAfGfauggCfaCfaguga | 5315 | AGUCACUGUGCCAUCUUCC | 5450 |
| 1731600 | uL96 | | scsu | | UGAC | |
| AD- | gsasccacUfaCfCfCfucuuuccua | 5181 | asUfsaggAfaAfGfagggUfaGfuggu | 5316 | CUGACCACUACCCUCUUUCC | 5451 |
| 1731618 | uL96 | | csasg | | UAG | |
| AD- | uscscaucCfcGfCfUfaguccaucc | 5182 | asGfsgauGfgAfCfuagcGfgGfaugg | 5317 | AGUCCAUCCCGCUAGUCCA | 5452 |
| 1731646 | uL96 | | ascsu | | UCCC | |
| AD- | ascsccauCfuCfCfAfaccaugagc | 5183 | asGfscucAfuGfGfuuggAfgAfuggg | 5318 | AGACCCAUCUCCAACCAUG | 5453 |
| 1731671 | uL96 | | uscsu | | AGCA | |
| AD- | gsasgcaaUfgCfCfAfucugguucc | 5184 | asGfsgaaCfcAfGfauggCfaUfugcuc | 5319 | AUGAGCAAUGCCAUCUGGU | 5454 |
| 1731687 | uL96 | | sasu | | UCCC | |
| AD- | uscsccagGfcAfAfAfgacacccuu | 5185 | asAfsaggGfuGfUfcuuuGfcCfuggg | 5320 | GUUCCCAGGCAAAGACACC | 5455 |
| 1731704 | uL96 | | asasc | | CUUA | |
| AD- | cscsuuagCfuCfAfCfcuuuaauag | 5186 | asCfsuauUfaAfAfggugAfgCfuaag | 5321 | ACCCUUAGCUCACCUUUAA | 5456 |
| 1731720 | uL96 | | gsgsu | | UAGA | |
| AD- | ascsccacUfaUfGfCfcuuccuguc | 5187 | asGfsacaGfgAfAfggcaUfaGfuggg | 5322 | UAACCCACUAUGCCUUCCU | 5457 |
| 1731728 | uL96 | | ususa | | GUCC | |
| AD- | gsusccuuUfcUfAfCfucaauggu | 5188 | asGfsaccAfuUfGfaguaGfaAfaggac | 5323 | CUGUCCUUUCUACUCAAUG | 5458 |
| 1731745 | cuL96 | | sasg | | GUCC | |
| AD- | uscscaagAfuGfAfGfuugacacaa | 5189 | asUfsuguGfuCfAfacucAfuCfuugg | 5324 | ACUCCAAGAUGAGUUGACA | 5459 |
| 1731750 | uL96 | | asgsu | | CAAC | |
| AD- | csasauuuUfuGfUfGfgaucucca | 5190 | asCfsuggAfgAfUfccacAfaAfaauug | 5325 | CCCAAUUUUUGUGGAUCUC | 5460 |
| 1731753 | guL96 | | sgsg | | CAGA | |
| AD- | uscsuuugGfaUfUfCfaccaaaguu | 5191 | asAfsacuUfuGfGfugaaUfcCfaaaga | 5326 | CUUCUUUGGAUUCACCAAA | 5461 |
| 1731782 | uL96 | | sasg | | GUUU | |
| AD- | usgscccaAfaAfUfAfgaggcuuac | 5192 | asGfsuaaGfcCfUfcuauUfuUfgggca | 5327 | GCUGCCCAAAAUAGAGGCU | 5462 |
| 1731813 | uL96 | | sgsc | | UACC | |
| AD- | csusguccUfuCfUfUfaguugucc | 5193 | asUfsggaCfaAfCfuaagAfaGfgacag | 5328 | CCCUGUCCUUCUUAGUUGU | 5463 |
| 1731819 | auL96 | | sgsg | | CCAG | |
| AD- | gsasacuaCfuAfAfAfgcucucuu | 5194 | asAfsaagAfgAfGfcuuuAfgUfaguu | 5329 | GUGAACUACUAAAGCUCUC | 5464 |
| 1731842 | uuL96 | | csasc | | UUUG | |
| AD- | csusuugcAfuAfCfCfuucauccau | 5195 | asAfsuggAfuGfAfagguAfuGfcaaa | 5330 | CUCUUUGCAUACCUUCAUC | 5465 |
| 1731858 | uL96 | | gsasg | | CAUU | |
| AD- | cscsauuuUfuUfGfUfccuucucu | 5196 | asCfsagaGfaAfGfgacaAfaAfaaugg | 5331 | AUCCAUUUUUUGUCCUUCU | 5466 |
| 1731874 | guL96 | | sasu | | CUGC | |
| AD- | gscscuuuCfuCfUfAfugcccuuaa | 5197 | asUfsuaaGfgGfCfauagAfgAfaaggc | 5332 | CUGCCUUUCUCUAUGCCCU | 5467 |
| 1731890 | uL96 | | sasg | | UAAG | |
| AD- | ususaaggGfcUfGfAfcuugccug | 5198 | asUfscagGfcAfAfgucaGfcCfcuuaa | 5333 | CCUUAAGGGCUGACUUGCC | 5468 |
| 1731906 | auL96 | | sgsg | | UGAG | |
| AD- | usgsagcuCfuAfUfCfaccugagcu | 5199 | asAfsgcuCfaGfGfugauAfgAfgcuc | 5334 | CCUGAGCUCUAUCACCUGA | 5469 |
| 1731923 | uL96 | | asgsg | | GCUC | |
| AD- | uscsuggcUfuCfCfUfgcugaggu | 5200 | asGfsaccUfcAfGfcaggAfaGfccaga | 5335 | CCUCUGGCUUCCUGCUGAG | 5470 |
| 1731932 | cuL96 | | sgsg | | GUCA | |
| AD- | ususucuuAfuCfCfCfuguucccu | 5201 | asGfsaggGfaAfCfagggAfuAfagaaa | 5336 | CAUUUCUUAUCCCUGUUCC | 5471 |
| 1731958 | cuL96 | | susg | | CUCU | |
| AD- | uscsugucUfaGfGfUfgucauggu | 5202 | asAfsaccAfuGfAfcaccUfaGfacaga | 5337 | UCUCUGUCUAGGUGUCAUG | 5472 |
| 1731978 | uuL96 | | sgsa | | GUUC | |
| AD- | uscsugugUfaAfCfUfguggcuau | 5203 | asAfsauaGfcCfAfcaguUfaCfacaga | 5338 | GUUCUGUGUAACUGUGGCU | 5473 |
| 1731997 | uuL96 | | sasc | | AUUC | |
| AD- | usasuucuGfuGfUfCfccuacacua | 5204 | asUfsaguGfuAfGfggacAfcAfgaau | 5339 | GCUAUUCUGUGUCCCUACA | 5474 |
| 1732013 | uL96 | | asgsc | | CUAC | |
| AD- | gscscuacAfuUfCfUfgauauaacu | 5205 | asAfsguuAfuAfUfcagaAfuGfuagg | 5340 | CUGCCUACAUUCUGAUAUA | 5475 |
| 1732031 | uL96 | | csasg | | ACUG | |
| AD- | cscsuaaaGfgCfUfUfucuaucuug | 5206 | asCfsaagAfuAfGfaaagCfcUfuuagg | 5341 | GUCCUAAAGGCUUUCUAUC | 5476 |
| 1732048 | uL96 | | sasc | | UUGC | |
| AD- | csuscaacAfuCfUfCfauacugguu | 5207 | asAfsaccAfgUfAfugagAfuGfuuga | 5342 | GCCUCAACAUCUCAUACUG | 5477 |
| 1732062 | uL96 | | gsgsc | | GUUC | |
| AD- | gsgsuuccCfuUfAfAfcucugccu | 5208 | asUfsaggCfaGfAfguuaAfgGfgaacc | 5343 | CUGGUUCCCUUAACUCUGC | 5478 |
| 1732078 | auL96 | | sasg | | CUAU | |
| AD- | cscsuauaCfcUfCfUfguaaauaau | 5209 | asAfsuuaUfuUfAfcagaGfgUfauag | 5344 | UGCCUAUACCUCUGUAAAU | 5479 |
| 1732094 | uL96 | | gscsa | | AAUU | |
| AD- | usasauucCfuUfCfAfcuaaguucu | 5210 | asAfsgaaCfuUfAfgugaAfgGfaauu | 5345 | AAUAAUUCCUUCACUAAGU | 5480 |
| 1732110 | uL96 | | asusu | | UCUC | |
| AD- | asasagucCfuCfUfAfucuccuaca | 5211 | asUfsguaGfgAfGfauagAfgGfacuu | 5346 | GAAAAGUCCUCUAUCUCCU | 5481 |
| 1732157 | uL96 | | ususc | | ACAA | |
| AD- | usascaagGfgCfCfCfuaacuggca | 5212 | asUfsgccAfgUfUfagggCfcCfuugu | 5347 | CCUACAAGGGCCCUAACUG | 5482 |
| 1732173 | uL96 | | asgsg | | GCAC | |
| AD- | csasgaugAfcAfCfAfgagccugcc | 5213 | asGfsgcaGfgCfUfcuguGfuCfaucu | 5348 | CCCAGAUGACACAGAGCCU | 5483 |
| 1732176 | uL96 | | gsgsg | | GCCU | |
| AD- | csusgcuuAfuGfCfUfguagucug | 5214 | asGfscagAfcUfAfcagcAfuAfagcag | 5349 | GCCUGCUUAUGCUGUAGUC | 5484 |
| 1732195 | cuL96 | | sgsc | | UGCC | |
| AD- | ascsucugCfuGfUfCfucuucacau | 5215 | asAfsuguGfaAfGfagacAfgCfagag | 5350 | CUACUCUGCUGUCUCUUCA | 5485 |
| 1732217 | uL96 | | usasg | | CAUG | |
| AD- | asusggucUfcCfUfCfagaacugaa | 5216 | asUfsucaGfuUfCfugagGfaGfaccau | 5351 | ACAUGGUCUCCUCAGAACU | 5486 |
| 1732235 | uL96 | | sgsu | | GAAC | |
| AD- | asascuauUfgUfAfUfccaucucac | 5217 | asGfsugaGfaUfGfgauaCfaAfuagu | 5352 | UGAACUAUUGUAUCCAUCU | 5487 |
| 1732253 | uL96 | | uscsa | | CACA | |
| AD- | uscsacacUfuUfAfUfgccucuucu | 5218 | asAfsgaaGfaGfGfcauaAfaGfuguga | 5353 | UCUCACACUUUAUGCCUCU | 5488 |
| 1732269 | uL96 | | sgsa | | UCUU | |
| AD- | asusccuuCfcAfGfAfaccaucuuu | 5219 | asAfsaagAfuGfGfuucuGfgAfagga | 5354 | CCAUCCUUCCAGAACCAUCU | 5489 |
| 1732291 | uL96 | | usgsg | | UUG | |
| AD- | ususugagGfuCfUfCfauggcuaa | 5220 | asAfsuuaGfcCfAfugagAfcCfucaaa | 5355 | UCUUUGAGGUCUCAUGGCU | 5490 |
| 1732308 | uuL96 | | sgsa | | AAUA | |
| AD- | usasggcuUfuAfCfCfuguucccu | 5221 | asGfsaggGfaAfCfagguAfaAfgccua | 5356 | CCUAGGCUUUACCUGUUCC | 5491 |
| 1732335 | cuL96 | | sgsg | | CUCU | |
| AD- | uscsuguaAfuCfCfCfuccaaaaga | 5222 | asUfscuuUfuGfGfagggAfuUfacag | 5357 | CCUCUGUAAUCCCUCCAAA | 5492 |
| 1732353 | uL96 | | asgsg | | AGAU | |
| AD- | asusgagaCfaGfAfUfcuaugcuu | 5223 | asCfsaagCfaUfAfgaucUfgUfcucau | 5358 | AGAUGAGACAGAUCUAUGC | 5493 |
| 1732372 | gul96 | | scsu | | UUGG | |
| AD- | ususggucAfuCfCfAfguaaacug | 5224 | asUfscagUfuUfAfcuggAfuGfaccaa | 5359 | GCUUGGUCAUCCAGUAAAC | 5494 |
| 1732389 | auL96 | | sgsc | | UGAC | |
| AD- | gsusgggcAfcGfCfAfaguguggg | 5225 | asUfscccAfcAfCfuugcGfuGfcccac | 5360 | CUGUGGGCACGCAAGUGUG | 5495 |
| 1732415 | auL96 | | sasg | | GGAG | |
| AD- | asgsgcauGfcUfCfAfgagcuggc | 5226 | asAfsgccAfgCfUfcugaGfcAfugccu | 5361 | AGAGGCAUGCUCAGAGCUG | 5496 |
| 1732440 | uuL96 | | scsu | | GCUG | |
| AD- | uscsugacUfuGfCfCfuuccuuuca | 5227 | asUfsgaaAfgGfAfaggcAfaGfucaga | 5362 | CCUCUGACUUGCCUUCCUU | 5497 |
| 1732469 | uL96 | | sgsg | | UCAC | |
| AD- | usgscuccAfcCfCfAfggaguccug | 5228 | asCfsaggAfcUfCfcuggGfuGfgagca | 5363 | AGUGCUCCACCCAGGAGUC | 5498 |
| 1732479 | uL96 | | scsu | | CUGC | |
| AD- | csusggaaGfcUfGfGfaaugggcaa | 5229 | asUfsugcCfcAfUfuccaGfcUfuccag | 5364 | GCCUGGAAGCUGGAAUGGG | 5499 |
| 1732500 | uL96 | | sgsc | | CAAG | |
| AD- | gsgsgcugCfuGfGfAfgugggaca | 5230 | asCfsuguCfcCfAfcuccAfgCfagccc | 5365 | AAGGGCUGCUGGAGUGGGA | 5500 |
| 1732520 | guL96 | | susu | | CAGG | |
| AD- | csasgggaGfaAfGfAfggaaggcc | 5231 | asAfsggcCfuUfCfcucuUfcUfcccug | 5366 | GACAGGGAGAAGAGGAAGG | 5501 |
| 1732533 | uuL96 | | susc | | CCUG | |
| AD- | gscscuggAfuGfAfGfgagagggu | 5232 | asCfsaccCfuCfUfccucAfuCfcaggc | 5367 | AGGCCUGGAUGAGGAGAGG | 5502 |
| 1732549 | gul96 | | scsu | | GUGG | |
| AD- | gsusggcaUfuUfGfCfucugagac | 5233 | asAfsgucUfcAfGfagcaAfaUfgccac | 5368 | GGGUGGCAUUUGCUCUGAG | 5503 |
| 1732565 | uuL96 | | scsc | | ACUG | |
| AD- | usgsggucCfuUfUfUfuagaccuu | 5234 | asAfsaagGfuCfUfaaaaAfgGfaccca | 5369 | ACUGGGUCCUUUUUAGACC | 5504 |
| 1732584 | uuL96 | | sgsu | | UUUG | |
| AD- | csuscccuUfuGfGfCfuggacaguc | 5235 | asGfsacuGfuCfCfagccAfaAfgggag | 5370 | UCCUCCCUUUGGCUGGACA | 5505 |
| 1732604 | uL96 | | sgsa | | GUCC | |
| AD- | usgsaaccAfuGfAfGfgucgauaa | 5236 | asAfsuuaUfcGfAfccucAfuGfguuc | 5371 | CCUGAACCAUGAGGUCGAU | 5506 |
| 1732625 | uuL96 | | asgsg | | AAUG | |
| AD- | usgsucugCfaGfCfCfcaaggccga | 5237 | asUfscggCfcUfUfgggcUfgCfagaca | 5372 | AAUGUCUGCAGCCCAAGGC | 5507 |
| 1732644 | uL96 | | susu | | CGAG | |
| AD- | csgsaguuUfgCfGfCfaaaacccau | 5238 | asAfsuggGfuUfUfugcgCfaAfacuc | 5373 | GCCGAGUUUGCGCAAAACC | 5508 |
| 1732661 | uL96 | | gsgsc | | CAUG | |
| AD- | cscsauguGfuUfCfUfuugguaaa | 5239 | asGfsuuuAfcCfAfaagaAfcAfcaugg | 5374 | ACCCAUGUGUUCUUUGGUA | 5509 |
| 1732677 | cuL96 | | sgsu | | AACG | |
| AD- | csgsugauGfuCfUfGfuguuugcu | 5240 | asGfsagcAfaAfCfacagAfcAfucacg | 5375 | AACGUGAUGUCUGUGUUUG | 5510 |
| 1732696 | cuL96 | | susu | | CUCA | |
| AD- | csusccuaUfgAfGfGfguaagagg | 5241 | asAfsccuCfuUfAfcccuCfaUfaggag | 5376 | CCCUCCUAUGAGGGUAAGA | 5511 |
| 1732708 | uuL96 | | sgsg | | GGUC | |
| AD- | cscscugaAfaUfAfGfgaacccuag | 5242 | asCfsuagGfgUfUfccuaUfuUfcagg | 5377 | GUCCCUGAAAUAGGAACCC | 5512 |
| 1732728 | uL96 | | gsasc | | UAGA | |
| AD- | csusagagGfaGfAfAfagucugaaa | 5243 | asUfsuucAfgAfCfuuucUfcCfucua | 5378 | CCCUAGAGGAGAAAGUCUG | 5513 |
| 1732744 | uL96 | | gsgsg | | AAAA | |
| AD- | gsascuguAfaAfUfCfugagcuug | 5244 | asUfscaaGfcUfCfagauUfuAfcaguc | 5379 | GGGACUGUAAAUCUGAGCU | 5514 |
| 1732757 | auL96 | | scsc | | UGAG | |
| AD- | gsasgcaaCfcCfAfUfggaaguuau | 5245 | asAfsuaaCfuUfCfcaugGfgUfugcuc | 5380 | CUGAGCAACCCAUGGAAGU | 5515 |
| 1732786 | uL96 | | sasg | | UAUC | |
| AD- | cscsaccuUfuGfAfCfuugaggaga | 5246 | asUfscucCfuCfAfagucAfaAfggug | 5381 | UCCCACCUUUGACUUGAGG | 5516 |
| 1732807 | uL96 | | gsgsa | | AGAC | |
| AD- | cscsuucaUfcUfAfAfggagaaucu | 5247 | asAfsgauUfcUfCfcuuaGfaUfgaagg | 5382 | GACCUUCAUCUAAGGAGAA | 5517 |
| 1732827 | uL96 | | susc | | UCUA | |
| AD- | gsgsaggcCfuUfCfUfggugucuc | 5248 | asGfsgagAfcAfCfcagaAfgGfccucc | 5383 | AAGGAGGCCUUCUGGUGUC | 5518 |
| 1732849 | cuL96 | | susu | | UCCC | |
| AD- | uscsccaaUfuAfCfAfgcuuagucu | 5249 | asAfsgacUfaAfGfcuguAfaUfuggg | 5384 | CUUCCCAAUUACAGCUUAG | 5519 |
| 1732865 | uL96 | | asasg | | UCUC | |
| AD- | gsuscuccAfgGfGfCfuaggacug | 5250 | asCfscagUfcCfUfagccCfuGfgagac | 5385 | UAGUCUCCAGGGCUAGGAC | 5520 |
| 1732881 | gul96 | | susa | | UGGG | |
| AD- | asasgcaaAfgUfGfAfgucauucac | 5251 | asGfsugaAfuGfAfcucaCfuUfugcu | 5386 | UAAAGCAAAGUGAGUCAUU | 5521 |
| 1732885 | uL96 | | ususa | | CACC | |
| AD- | gsusggugAfaCfAfAfuuuauuaa | 5252 | asAfsuuaAfuAfAfauugUfuCfaccac | 5387 | GGGUGGUGAACAAUUUAUU | 5522 |
| 1732890 | uuL96 | | scsc | | AAUC | |
| AD- | usasggacUfuUfAfAfugcaauau | 5253 | asAfsauaUfuGfCfauuaAfaGfuccua | 5388 | GAUAGGACUUUAAUGCAAU | 5523 |
| 1732908 | uuL96 | | susc | | AUUA | |
| AD- | gsasacaaAfaUfAfGfccuacuuuu | 5254 | asAfsaaaGfuAfGfgcuaUfuUfuguu | 5389 | AUGAACAAAAUAGCCUACU | 5524 |
| 1732940 | uL96 | | csasu | | UUUA | |

TABLE 18
Single dose screen for dsRNA agents
targeting INHBE in Hep3b cells

| | INHBE/gapdh | | INHBE/gapdh | |
|---|---|---|---|---|
| | 10 nM | | 1 nM | |
| | Average % | | Average % | |
| | message | | message | |
| Duplex Name | remaining | SD | remaining | SD |
| AD-1657845.1 | 111.502 | 7.324 | 91.264 | 6.933 |
| AD-1657834.1 | 73.740 | 4.726 | 60.700 | 3.044 |
| AD-1657822.1 | 44.254 | 6.361 | 31.710 | 2.225 |
| AD-1657811.1 | 57.311 | 6.952 | 42.989 | 3.234 |
| AD-1657793.1 | 57.109 | 9.054 | 57.657 | 1.772 |
| AD-1657776.1 | 31.680 | 4.646 | 29.169 | 6.609 |
| AD-1657760.1 | 20.839 | 4.152 | 19.336 | 1.898 |
| AD-1657744.1 | 34.473 | 7.839 | 30.596 | 0.788 |
| AD-1657741.1 | 74.347 | 14.701 | 74.106 | 5.550 |
| AD-1657727.1 | 72.423 | 11.797 | 80.936 | 2.697 |
| AD-1657716.1 | 22.638 | 3.700 | 23.912 | 6.962 |
| AD-1657704.1 | 28.552 | 6.159 | 28.798 | 6.146 |
| AD-1657687.1 | 54.039 | 9.112 | 54.137 | 1.783 |
| AD-1657674.1 | 47.061 | 4.830 | 43.380 | 3.109 |
| AD-1657653.1 | 31.466 | 2.523 | 32.508 | 1.736 |
| AD-1657641.1 | 24.346 | 3.640 | 25.044 | 1.349 |
| AD-1657615.1 | 48.959 | 8.120 | 56.602 | 4.347 |
| AD-1657600.1 | 68.423 | 6.167 | 71.585 | 7.687 |
| AD-1657586.1 | 54.978 | 13.599 | 52.685 | 2.375 |
| AD-1657575.1 | 55.241 | 7.227 | 57.979 | 7.288 |
| AD-1657564.1 | 45.901 | 2.503 | 54.016 | 1.990 |
| AD-1657552.1 | 82.298 | 13.007 | 76.189 | 6.130 |
| AD-1657540.1 | 22.575 | 2.322 | 21.798 | 2.756 |
| AD-1657529.1 | 33.762 | 2.785 | 32.357 | 0.747 |
| AD-1657520.1 | 40.770 | 2.904 | 40.577 | 2.140 |
| AD-1657503.1 | 81.097 | 10.061 | 95.267 | 5.483 |
| AD-1657463.1 | 104.817 | 3.003 | 102.395 | 7.680 |
| AD-1657475.1 | 32.866 | 3.805 | 36.728 | 3.060 |
| AD-1657457.1 | 55.309 | 7.525 | 62.481 | 4.757 |
| AD-1657446.1 | 64.718 | 5.426 | 70.633 | 2.386 |
| AD-1657431.1 | 82.429 | 3.640 | 94.677 | 7.863 |
| AD-1657410.1 | 85.127 | 11.511 | 95.982 | 4.312 |
| AD-1657395.1 | 34.606 | 4.035 | 44.299 | 3.633 |
| AD-1657385.1 | 25.376 | 4.571 | 30.272 | 1.859 |
| AD-1657374.1 | 34.005 | 3.832 | 40.414 | 6.995 |
| AD-1657359.1 | 36.416 | 4.539 | 42.496 | 1.445 |
| AD-1657347.1 | 49.056 | 7.109 | 53.442 | 1.120 |
| AD-1657335.1 | 38.944 | 8.573 | 57.606 | 15.402 |
| AD-1657324.1 | 67.982 | 8.933 | 60.199 | 1.498 |
| AD-1657322.1 | 70.552 | 6.423 | 98.389 | 1.565 |
| AD-1657299.1 | 51.716 | 10.063 | 51.866 | 3.171 |
| AD-1657286.1 | 58.362 | 4.990 | 59.650 | 3.084 |
| AD-1657274.1 | 49.867 | 7.374 | 55.066 | 2.475 |
| AD-1657261.1 | 67.171 | 10.247 | 75.283 | 5.022 |
| AD-1657245.1 | 107.148 | 10.325 | 107.609 | 3.856 |
| AD-1657234.1 | 49.466 | 10.471 | 55.763 | 3.564 |
| AD-1657211.1 | 66.217 | 9.659 | 89.842 | 2.170 |
| AD-1657202.1 | 24.284 | 0.920 | 30.464 | 1.354 |
| AD-1657185.1 | 52.769 | 4.360 | 57.078 | 1.715 |
| AD-1657164.1 | 98.337 | 9.509 | 102.454 | 1.987 |
| AD-1657147.1 | 33.650 | 4.858 | 37.393 | 2.032 |
| AD-1657133.1 | 47.322 | 3.533 | 59.465 | 4.976 |
| AD-1657119.1 | 33.540 | 5.318 | 27.596 | 0.347 |
| AD-1657113.1 | 19.963 | 4.057 | 20.771 | 1.598 |
| AD-1657099.1 | 34.125 | 3.942 | 37.359 | 1.925 |
| AD-1657085.1 | 37.089 | 9.439 | 33.790 | 1.346 |
| AD-1657069.1 | 40.171 | 5.158 | 39.186 | 5.693 |
| AD-1657058.1 | 22.085 | 1.950 | 23.312 | 5.043 |
| AD-1657045.1 | 37.085 | 2.715 | 32.953 | 2.922 |
| AD-1657037.1 | 27.931 | 2.008 | 28.287 | 1.070 |
| AD-1657022.1 | 43.503 | 4.641 | 49.124 | 2.709 |
| AD-1657013.1 | 25.911 | 5.728 | 31.816 | 2.016 |
| AD-1656996.1 | 66.202 | 1.771 | 84.949 | 2.887 |
| AD-1656969.1 | 22.138 | 0.831 | 20.535 | 1.620 |
| AD-1656958.1 | 15.865 | 1.070 | 16.371 | 1.040 |
| AD-1656954.1 | 40.878 | 9.408 | 53.844 | 4.173 |
| AD-1656942.1 | 30.879 | 6.184 | 43.036 | 3.002 |
| AD-1656926.1 | 83.175 | 10.550 | 103.354 | 10.184 |
| AD-1656915.1 | 43.426 | 5.790 | 45.498 | 3.633 |
| AD-1656900.1 | 57.647 | 7.574 | 71.612 | 1.628 |
| AD-1656888.1 | 20.414 | 2.786 | 20.645 | 0.527 |
| AD-1656876.1 | 41.507 | 8.799 | 64.531 | 3.928 |
| AD-1656873.1 | 95.455 | 1.755 | 110.427 | 4.031 |
| AD-1656862.1 | 28.261 | 3.728 | 25.877 | 4.127 |
| AD-1656849.1 | 42.736 | 6.226 | 53.757 | 4.118 |
| AD-1656832.1 | 22.284 | 4.193 | 24.704 | 1.507 |
| AD-1656820.1 | 36.282 | 2.484 | 49.723 | 2.973 |
| AD-1656808.1 | 33.056 | 6.984 | 23.344 | 1.171 |
| AD-1656792.1 | 32.327 | 4.602 | 63.303 | 4.848 |
| AD-1656775.1 | 78.089 | 6.399 | 74.958 | 10.131 |
| AD-1656762.1 | 34.695 | 5.445 | 45.070 | 2.460 |
| AD-1656754.1 | 68.025 | 10.751 | 95.733 | 6.112 |
| AD-1656740.1 | 109.099 | 15.708 | 110.169 | 5.851 |
| AD-1656728.1 | 58.629 | 6.016 | 78.387 | 19.524 |
| AD-1656716.1 | 58.703 | 8.377 | 76.566 | 8.896 |
| AD-1656701.1 | 101.804 | 8.079 | 101.812 | 6.138 |
| AD-1656690.1 | 72.753 | 13.083 | 85.011 | 9.161 |
| AD-1656679.1 | 26.622 | 3.632 | 44.404 | 2.181 |
| AD-1656667.1 | 84.688 | 16.798 | 93.321 | 4.608 |
| AD-1656647.1 | 52.261 | 9.437 | 79.158 | 1.290 |
| AD-1656634.1 | 68.804 | 4.037 | 72.522 | 8.828 |
| AD-1656622.1 | 64.773 | 3.958 | 61.094 | 3.211 |
| AD-1656602.1 | 90.930 | 8.206 | 97.503 | 6.469 |
| AD-1656591.1 | 67.929 | 6.205 | 50.621 | 2.250 |
| AD-1656587.1 | 130.517 | 14.507 | 112.466 | 5.072 |
| AD-1656570.1 | 54.831 | 8.259 | 67.275 | 4.341 |
| AD-1656559.1 | 99.324 | 16.587 | 94.525 | 10.986 |
| AD-1656547.1 | 47.881 | 6.431 | 47.546 | 13.507 |
| AD-1656535.1 | 45.730 | 4.759 | 47.345 | 3.749 |
| AD-1656504.1 | 18.728 | 1.669 | 28.522 | 5.548 |
| AD-1656492.1 | 56.190 | 5.381 | 90.874 | 4.381 |
| AD-1656480.1 | 123.739 | 13.306 | 109.755 | 2.612 |
| AD-1656468.1 | 109.278 | 12.715 | 110.494 | 6.230 |
| AD-1656449.1 | 59.340 | 4.424 | 63.755 | 3.688 |
| AD-1656437.1 | 37.011 | 10.928 | 37.870 | 1.699 |
| AD-1656417.1 | 71.490 | 5.406 | 76.482 | 4.881 |
| AD-1656406.1 | 24.283 | 4.442 | 22.173 | 1.760 |
| AD-1656392.1 | 32.989 | 8.824 | 25.987 | 9.238 |
| AD-1656383.1 | 136.848 | 18.447 | 130.314 | 12.433 |
| AD-1656372.1 | 108.305 | 5.297 | 103.207 | 3.375 |
| AD-1656360.1 | 67.214 | 8.162 | 87.294 | 8.571 |
| AD-1656333.1 | 28.433 | 5.041 | 26.718 | 2.141 |
| AD-1656319.1 | 56.184 | 4.092 | 52.184 | 3.756 |
| AD-1656307.1 | 102.315 | 8.887 | 96.572 | 4.261 |
| AD-1656292.1 | 26.799 | 5.415 | 30.140 | 4.062 |
| AD-1656280.1 | 42.240 | 7.706 | 36.464 | 2.246 |
| AD-1656265.1 | 72.020 | 14.577 | 80.758 | 6.589 |
| AD-1656260.1 | 102.537 | 13.790 | 115.141 | 23.155 |
| AD-1656254.1 | 114.062 | 4.103 | 126.823 | 2.379 |
| AD-1656233.1 | 99.276 | 14.267 | 93.223 | 3.260 |
| AD-1656220.1 | 52.087 | 6.444 | 47.137 | 2.748 |
| AD-1656196.1 | 69.556 | 7.457 | 78.281 | 3.008 |
| AD-1656185.1 | 59.059 | 6.916 | 59.771 | 1.753 |
| AD-1656164.1 | 52.037 | 5.249 | 49.894 | 1.671 |
| AD-1656146.1 | 61.416 | 9.782 | 69.569 | 10.125 |
| AD-1656139.1 | 81.533 | 5.159 | 79.120 | 3.969 |
| AD-1656125.1 | 106.018 | 7.449 | 120.205 | 7.924 |
| AD-1656108.1 | 92.474 | 5.568 | 120.457 | 12.135 |
| AD-1656097.1 | 86.405 | 6.346 | 95.682 | 6.379 |
| AD-1656086.1 | 97.906 | 14.028 | 98.562 | 6.521 |
| AD-1656074.1 | 78.172 | 13.741 | 91.731 | 5.480 |
| AD-1656054.1 | 85.044 | 8.142 | 90.847 | 4.543 |
| AD-1656043.1 | 50.700 | 6.709 | 47.910 | 3.196 |
| AD-1656026.1 | 109.741 | 12.514 | 93.624 | 7.670 |
| AD-1656008.1 | 86.662 | 8.226 | 98.543 | 23.583 |

### Example 4. Design, Synthesis and In Vitro Screening of Additional dsRNA Duplexes

[1014] Additional siRNAs were designed, synthesized, and prepared using methods known in the art and described above in Example 2.

[1015] A detailed list of the additional unmodified INHBE sense and antisense strand nucleotide sequences is shown in Table 19. A detailed list of the modified INHBE sense and antisense strand nucleotide sequences is shown in Table 20.

[1016] Single dose screens of the additional agents were performed by free uptake and transfection.

[1017] For free uptake, experiments were performed by adding 2.5 μl of siRNA duplexes in PBS per well into a 96 well plate. Complete growth media (47.5 μl) containing about 1.5×10⁴ primary human hepatocytes (PHH) or primary cynomolgus hepatocytes (PCH) were then added to the siRNA. Cells were incubated for 48 hours prior to RNA purification and RT-qPCR. Single dose experiments were performed at 250 nM, 100 nM, 10 nM and 1 nM final duplex concentration.

[1018] For transfections, cells (i.e., Hep3b cells, primary human hepatocytes, or primary cynomolgus hepatocytes) were grown to near confluence at 37° C. in an atmosphere of 5% CO₂ in Eagle's Minimum Essential Medium (Gibco) supplemented with 10% FBS (ATCC) before being released from the plate by trypsinization. Transfection was carried out by adding 7.5 μl of Opti-MEM plus 0.1 μl of Lipofectamine RNAiMax per well (Invitrogen, Carlsbad CA. cat 13778-150) to 2.5 μl of each siRNA duplex to an individual well in a 384-well plate. The mixture was then incubated at room temperature for 15 minutes. Forty μl of complete growth media without antibiotic containing ˜1.5×10⁴ cells were then added to the siRNA mixture. Cells were incubated for 24 hours prior to RNA purification. Single dose experiments were performed at 10, 1 and 0.1 nM final duplex concentration.

[1019] Total RNA isolation was performed using DYNABEADS. Briefly, cells were lysed in 10 μl of Lysis/Binding Buffer containing 3 μL of beads per well and mixed for 10 minutes on an electrostatic shaker. The washing steps were automated on a Biotek EL406, using a magnetic plate support. Beads were washed (in 3 μl) once in Buffer A, once in Buffer B, and twice in Buffer E, with aspiration steps in between. Following a final aspiration, complete 12 μl RT mixture was added to each well, as described below.

[1020] For cDNA synthesis, a master mix of 1.5 μl 10× Buffer, 0.6 μl 10×dNTPs, 1.5 μl Random primers, 0.75 μl Reverse Transcriptase, 0.75 μl RNase inhibitor and 9.9 μl of H2O per reaction were added per well. Plates were sealed, agitated for 10 minutes on an electrostatic shaker, and then incubated at 37 degrees C. for 2 hours. Following this, the plates were agitated at 80 degrees C. for 8 minutes.

[1021] RT-qPCR was performed as described above and relative fold change was calculated as described above.

[1022] The results of the transfection assays of the dsRNA agents listed in Tables 19 and 20 in Hep3b cells are shown in Table 21A.

[1023] The results of the free uptake experiments and the transfection assays of the dsRNA agents listed in Tables 19 and 20 in primary human hepatocytes (PHH) are shown in Table 21B.

[1024] The results of the free uptake experiments and the transfection assays of the dsRNA agents listed in Tables 19 and 20 in primary cynomolgus hepatocytes (PCH) are shown in Table 21C.

TABLE 19
Unmodified Sense and Antisense Strand Sequences of INHBE dsRNA Agents

| | | SEQ | Range in | | SEQ | Range in |
|---|---|---|---|---|---|---|
| | Sense Strand Sequence | ID | NM_ | Antisense Strand Sequence | ID | NM_ |
| Duplex Name | 5′ to 3′ | NO. | 031479.5 | 5′ to 3′ | NO. | 031479.5 |
| AD-1706265.1 | GCCAGACAUGAGCUGUGAGGU | 5525 | 5-25 | ACCUCACAGCUCAUGUCUGGCUA | 5978 | 3-25 |
| AD-1706266.1 | CCAGACAUGAGCUGUGAGGGU | 5526 | 6-26 | ACCCTCACAGCTCAUGUCUGGCU | 5979 | 4-26 |
| AD-1706268.1 | AGACAUGAGCUGUGAGGGUCU | 5527 | 8-28 | AGACCCTCACAGCUCAUGUCUGG | 5980 | 6-28 |
| AD-1706269.1 | GACAUGAGCUGUGAGGGUCAU | 5528 | 9-29 | ATGACCCUCACAGCUCAUGUCUG | 5981 | 7-29 |
| AD-1706270.1 | ACAUGAGCUGUGAGGGUCAAU | 5529 | 10-30 | ATUGACCCUCACAGCUCAUGUCU | 5982 | 8-30 |
| AD-1706271.1 | CAUGAGCUGUGAGGGUCAAGU | 5530 | 11-31 | ACUUGACCCUCACAGCUCAUGUC | 5983 | 9-31 |
| AD-1706272.1 | AUGAGCUGUGAGGGUCAAGCU | 5531 | 12-32 | AGCUTGACCCUCACAGCUCAUGU | 5984 | 10-32 |
| AD-1706273.1 | UGAGCUGUGAGGGUCAAGCAU | 5532 | 13-33 | ATGCTUGACCCTCACAGCUCAUG | 5985 | 11-33 |
| AD-1706274.1 | GAGCUGUGAGGGUCAAGCACU | 5533 | 14-34 | AGUGCUTGACCCUCACAGCUCAU | 5986 | 12-34 |
| AD-1706275.1 | AGCUGUGAGGGUCAAGCACAU | 5534 | 15-35 | ATGUGCTUGACCCUCACAGCUCA | 5987 | 13-35 |
| AD-1706276.1 | GCUGUGAGGGUCAAGCACAGU | 5535 | 16-36 | ACUGTGCUUGACCCUCACAGCUC | 5988 | 14-36 |
| AD-1706277.1 | CUGUGAGGGUCAAGCACAGCU | 5536 | 17-37 | AGCUGUGCUUGACCCUCACAGCU | 5989 | 15-37 |
| AD-1706278.1 | UGUGAGGGUCAAGCACAGCUU | 5537 | 18-38 | AAGCTGTGCUUGACCCUCACAGC | 5990 | 16-38 |
| AD-1706279.1 | GUGAGGGUCAAGCACAGCUAU | 5538 | 19-39 | ATAGCUGUGCUTGACCCUCACAG | 5991 | 17-39 |
| AD-1706280.1 | UGAGGGUCAAGCACAGCUAUU | 5539 | 20-40 | AAUAGCTGUGCTUGACCCUCACA | 5992 | 18-40 |
| AD-1706281.1 | GAGGGUCAAGCACAGCUAUCU | 129 | 21-41 | AGAUAGCUGUGCUUGACCCUCAC | 263 | 19-41 |
| AD-1706282.1 | AGGGUCAAGCACAGCUAUCCU | 5540 | 22-42 | AGGATAGCUGUGCUUGACCCUCA | 5993 | 20-42 |
| AD-1706283.1 | GGGUCAAGCACAGCUAUCCAU | 5541 | 23-43 | ATGGAUAGCUGTGCUUGACCCUC | 5994 | 21-43 |
| AD-1706287.1 | CAAGCACAGCUAUCCAUCAGU | 5542 | 27-47 | ACUGAUGGAUAGCUGUGCUUGAC | 5995 | 25-47 |
| AD-1706288.1 | AAGCACAGCUAUCCAUCAGAU | 5543 | 28-48 | ATCUGATGGAUAGCUGUGCUUGA | 5996 | 26-48 |
| AD-1706290.1 | GCACAGCUAUCCAUCAGAUGU | 5544 | 30-50 | ACAUCUGAUGGAUAGCUGUGCUU | 5997 | 28-50 |
| AD-1706291.1 | CACAGCUAUCCAUCAGAUGAU | 5545 | 31-51 | ATCATCTGAUGGAUAGCUGUGCU | 5998 | 29-51 |
| AD-1706292.1 | ACAGCUAUCCAUCAGAUGAUU | 5546 | 32-52 | AAUCAUCUGAUGGAUAGCUGUGC | 5999 | 30-52 |
| AD-1706293.1 | CAGCUAUCCAUCAGAUGAUCU | 5547 | 33-53 | AGAUCATCUGATGGAUAGCUGUG | 6000 | 31-53 |
| AD-1706294.1 | AGCUAUCCAUCAGAUGAUCUU | 5548 | 34-54 | AAGATCAUCUGAUGGAUAGCUGU | 6001 | 32-54 |
| AD-1706295.1 | GCUAUCCAUCAGAUGAUCUAU | 5549 | 35-55 | ATAGAUCAUCUGAUGGAUAGCUG | 6002 | 33-55 |
| AD-1706296.1 | CUAUCCAUCAGAUGAUCUACU | 5550 | 36-56 | AGUAGATCAUCTGAUGGAUAGCU | 6003 | 34-56 |
| AD-1706297.1 | UAUCCAUCAGAUGAUCUACUU | 5551 | 37-57 | AAGUAGAUCAUCUGAUGGAUAGC | 6004 | 35-57 |
| AD-1706298.1 | AUCCAUCAGAUGAUCUACUUU | 130 | 38-58 | AAAGTAGAUCATCUGAUGGAUAG | 6005 | 36-58 |
| AD-1706299.1 | UCCAUCAGAUGAUCUACUUUU | 5552 | 39-59 | AAAAGUAGAUCAUCUGAUGGAUA | 6006 | 37-59 |
| AD-1706300.1 | CCAUCAGAUGAUCUACUUUCU | 5553 | 40-60 | AGAAAGTAGAUCAUCUGAUGGAU | 6007 | 38-60 |
| AD-1706301.1 | CAUCAGAUGAUCUACUUUCAU | 5554 | 41-61 | ATGAAAGUAGATCAUCUGAUGGA | 6008 | 39-61 |
| AD-1706302.1 | AUCAGAUGAUCUACUUUCAGU | 5555 | 42-62 | ACUGAAAGUAGAUCAUCUGAUGG | 6009 | 40-62 |
| AD-1706303.1 | UCAGAUGAUCUACUUUCAGCU | 5556 | 43-63 | AGCUGAAAGUAGAUCAUCUGAUG | 6010 | 41-63 |
| AD-1706304.1 | CAGAUGAUCUACUUUCAGCCU | 5557 | 44-64 | AGGCTGAAAGUAGAUCAUCUGAU | 6011 | 42-64 |
| AD-1706305.1 | AGAUGAUCUACUUUCAGCCUU | 5558 | 45-65 | AAGGCUGAAAGTAGAUCAUCUGA | 6012 | 43-65 |
| AD-1706306.1 | GAUGAUCUACUUUCAGCCUUU | 5559 | 46-66 | AAAGGCTGAAAGUAGAUCAUCUG | 6013 | 44-66 |
| AD-1706307.1 | AUGAUCUACUUUCAGCCUUCU | 5560 | 47-67 | AGAAGGCUGAAAGUAGAUCAUCU | 6014 | 45-67 |
| AD-1706308.1 | UGAUCUACUUUCAGCCUUCCU | 5561 | 48-68 | AGGAAGGCUGAAAGUAGAUCAUC | 6015 | 46-68 |
| AD-1706309.1 | GAUCUACUUUCAGCCUUCCUU | 131 | 49-69 | AAGGAAGGCUGAAAGUAGAUCAU | 265 | 47-69 |
| AD-1706310.1 | AUCUACUUUCAGCCUUCCUGU | 5562 | 50-70 | ACAGGAAGGCUGAAAGUAGAUCA | 6016 | 48-70 |
| AD-1706311.1 | UCUACUUUCAGCCUUCCUGAU | 5563 | 51-71 | ATCAGGAAGGCTGAAAGUAGAUC | 6017 | 49-71 |
| AD-1706312.1 | CUACUUUCAGCCUUCCUGAGU | 5564 | 52-72 | ACUCAGGAAGGCUGAAAGUAGAU | 6018 | 50-72 |
| AD-1706313.1 | UACUUUCAGCCUUCCUGAGUU | 5565 | 53-73 | AACUCAGGAAGGCUGAAAGUAGA | 6019 | 51-73 |
| AD-1706314.1 | ACUUUCAGCCUUCCUGAGUCU | 5566 | 54-74 | AGACTCAGGAAGGCUGAAAGUAG | 6020 | 52-74 |
| AD-1706318.1 | UCAGCCUUCCUGAGUCCCAGU | 5567 | 58-78 | ACUGGGACUCAGGAAGGCUGAAA | 6021 | 56-78 |
| AD-1706337.1 | GACAAUAGAAGACAGGUGGCU | 5568 | 77-97 | AGCCACCUGUCTUCUAUUGUCUG | 6022 | 75-97 |
| AD-1706338.1 | ACAAUAGAAGACAGGUGGCUU | 5569 | 78-98 | AAGCCACCUGUCUUCUAUUGUCU | 6023 | 76-98 |
| AD-1706380.1 | GUGGCAGUGGUGUCUGCUGUU | 136 | 120-140 | AACAGCAGACACCACUGCCACAC | 270 | 118-140 |
| AD-1706381.1 | UGGCAGUGGUGUCUGCUGUCU | 5570 | 121-141 | AGACAGCAGACACCACUGCCACA | 6024 | 119-141 |
| AD-1706382.1 | GGCAGUGGUGUCUGCUGUCAU | 5571 | 122-142 | ATGACAGCAGACACCACUGCCAC | 6025 | 120-142 |
| AD-1706383.1 | GCAGUGGUGUCUGCUGUCACU | 5572 | 123-143 | AGUGACAGCAGACACCACUGCCA | 6026 | 121-143 |
| AD-1706384.1 | CAGUGGUGUCUGCUGUCACUU | 5573 | 124-144 | AAGUGACAGCAGACACCACUGCC | 6027 | 122-144 |
| AD-1706385.1 | AGUGGUGUCUGCUGUCACUGU | 5574 | 125-145 | ACAGTGACAGCAGACACCACUGC | 6028 | 123-145 |
| AD-1706386.1 | GUGGUGUCUGCUGUCACUGUU | 5575 | 126-146 | AACAGUGACAGCAGACACCACUG | 6029 | 124-146 |
| AD-1706387.1 | UGGUGUCUGCUGUCACUGUGU | 5576 | 127-147 | ACACAGTGACAGCAGACACCACU | 6030 | 125-147 |
| AD-1706388.1 | GGUGUCUGCUGUCACUGUGCU | 5577 | 128-148 | AGCACAGUGACAGCAGACACCAC | 6031 | 126-148 |
| AD-1706407.1 | CAGACUCAACAGACGGAGCAU | 5578 | 168-188 | ATGCTCCGUCUGUUGAGUCUGAU | 6032 | 166-188 |
| AD-1706408.1 | AGACUCAACAGACGGAGCAAU | 5579 | 169-189 | ATUGCUCCGUCTGUUGAGUCUGA | 6033 | 167-189 |
| AD-1706409.1 | GACUCAACAGACGGAGCAACU | 5580 | 170-190 | AGUUGCTCCGUCUGUUGAGUCUG | 6034 | 168-190 |
| AD-1706410.1 | ACUCAACAGACGGAGCAACUU | 5581 | 171-191 | AAGUTGCUCCGTCUGUUGAGUCU | 6035 | 169-191 |
| AD-1706411.1 | CUCAACAGACGGAGCAACUGU | 5582 | 172-192 | ACAGTUGCUCCGUCUGUUGAGUC | 6036 | 170-192 |
| AD-1706412.1 | UCAACAGACGGAGCAACUGCU | 5583 | 173-193 | AGCAGUTGCUCCGUCUGUUGAGU | 6037 | 171-193 |
| AD-1706413.1 | CAACAGACGGAGCAACUGCCU | 5584 | 174-194 | AGGCAGTUGCUCCGUCUGUUGAG | 6038 | 172-194 |
| AD-1706414.1 | AACAGACGGAGCAACUGCCAU | 5585 | 175-195 | ATGGCAGUUGCTCCGUCUGUUGA | 6039 | 173-195 |
| AD-1706415.1 | ACAGACGGAGCAACUGCCAUU | 5586 | 176-196 | AAUGGCAGUUGCUCCGUCUGUUG | 6040 | 174-196 |
| AD-1706416.1 | CAGACGGAGCAACUGCCAUCU | 5587 | 177-197 | AGAUGGCAGUUGCUCCGUCUGUU | 6041 | 175-197 |
| AD-1706417.1 | AGACGGAGCAACUGCCAUCCU | 5588 | 178-198 | AGGATGGCAGUTGCUCCGUCUGU | 6042 | 176-198 |
| AD-1706418.1 | GACGGAGCAACUGCCAUCCGU | 5589 | 179-199 | ACGGAUGGCAGTUGCUCCGUCUG | 6043 | 177-199 |
| AD-1706419.1 | ACGGAGCAACUGCCAUCCGAU | 139 | 180-200 | ATCGGATGGCAGUUGCUCCGUCU | 6044 | 178-200 |
| AD-1706420.1 | CGGAGCAACUGCCAUCCGAGU | 5590 | 181-201 | ACUCGGAUGGCAGUUGCUCCGUC | 6045 | 179-201 |
| AD-1706421.1 | GGAGCAACUGCCAUCCGAGGU | 5591 | 182-202 | ACCUCGGAUGGCAGUUGCUCCGU | 6046 | 180-202 |
| AD-1706423.1 | AGCAACUGCCAUCCGAGGCUU | 5592 | 184-204 | AAGCCUCGGAUGGCAGUUGCUCC | 6047 | 182-204 |
| AD-1706424.1 | GCAACUGCCAUCCGAGGCUCU | 5593 | 185-205 | AGAGCCTCGGATGGCAGUUGCUC | 6048 | 183-205 |
| AD-1706425.1 | CAACUGCCAUCCGAGGCUCCU | 5594 | 186-206 | AGGAGCCUCGGAUGGCAGUUGCU | 6049 | 184-206 |
| AD-1706520.1 | CAAGCAGAACGAGCUCUGGUU | 146 | 339-359 | AACCAGAGCUCGUUCUGCUUGGG | 280 | 337-359 |
| AD-1706521.1 | AAGCAGAACGAGCUCUGGUGU | 5595 | 340-360 | ACACCAGAGCUCGUUCUGCUUGG | 6050 | 338-360 |
| AD-1706522.1 | AGCAGAACGAGCUCUGGUGCU | 5596 | 341-361 | AGCACCAGAGCTCGUUCUGCUUG | 6051 | 339-361 |
| AD-1706523.1 | GCAGAACGAGCUCUGGUGCUU | 5597 | 342-362 | AAGCACCAGAGCUCGUUCUGCUU | 6052 | 340-362 |
| AD-1706524.1 | CAGAACGAGCUCUGGUGCUGU | 5598 | 343-363 | ACAGCACCAGAGCUCGUUCUGCU | 6053 | 341-363 |
| AD-1706525.1 | AGAACGAGCUCUGGUGCUGGU | 5599 | 344-364 | ACCAGCACCAGAGCUCGUUCUGC | 6054 | 342-364 |
| AD-1706526.1 | GAACGAGCUCUGGUGCUGGAU | 5600 | 345-365 | ATCCAGCACCAGAGCUCGUUCUG | 6055 | 343-365 |
| AD-1706527.1 | AACGAGCUCUGGUGCUGGAGU | 5601 | 346-366 | ACUCCAGCACCAGAGCUCGUUCU | 6056 | 344-366 |
| AD-1706528.1 | ACGAGCUCUGGUGCUGGAGCU | 5602 | 347-367 | AGCUCCAGCACCAGAGCUCGUUC | 6057 | 345-367 |
| AD-1706530.1 | GAGCUCUGGUGCUGGAGCUAU | 5603 | 349-369 | ATAGCUCCAGCACCAGAGCUCGU | 6058 | 347-369 |
| AD-1706532.1 | GCUCUGGUGCUGGAGCUAGCU | 5604 | 351-371 | AGCUAGCUCCAGCACCAGAGCUC | 6059 | 349-371 |
| AD-1706533.1 | CUCUGGUGCUGGAGCUAGCCU | 5605 | 352-372 | AGGCTAGCUCCAGCACCAGAGCU | 6060 | 350-372 |
| AD-1706534.1 | UCUGGUGCUGGAGCUAGCCAU | 5606 | 353-373 | ATGGCUAGCUCCAGCACCAGAGC | 6061 | 351-373 |
| AD-1706535.1 | CUGGUGCUGGAGCUAGCCAAU | 147 | 354-374 | ATUGGCTAGCUCCAGCACCAGAG | 6062 | 352-374 |
| AD-1706536.1 | UGGUGCUGGAGCUAGCCAAGU | 5607 | 355-375 | ACUUGGCUAGCTCCAGCACCAGA | 6063 | 353-375 |
| AD-1706537.1 | GGUGCUGGAGCUAGCCAAGCU | 5608 | 356-376 | AGCUTGGCUAGCUCCAGCACCAG | 6064 | 354-376 |
| AD-1706538.1 | GUGCUGGAGCUAGCCAAGCAU | 5609 | 357-377 | ATGCTUGGCUAGCUCCAGCACCA | 6065 | 355-377 |
| AD-1706539.1 | UGCUGGAGCUAGCCAAGCAGU | 5610 | 358-378 | ACUGCUTGGCUAGCUCCAGCACC | 6066 | 356-378 |
| AD-1706543.1 | GGAGCUAGCCAAGCAGCAAAU | 5611 | 362-382 | ATUUGCTGCUUGGCUAGCUCCAG | 6067 | 360-382 |
| AD-1706544.1 | GAGCUAGCCAAGCAGCAAAUU | 5612 | 363-383 | AAUUTGCUGCUTGGCUAGCUCCA | 6068 | 361-383 |
| AD-1706545.1 | AGCUAGCCAAGCAGCAAAUCU | 5613 | 364-384 | AGAUTUGCUGCTUGGCUAGCUCC | 6069 | 362-384 |
| AD-1706546.1 | GCUAGCCAAGCAGCAAAUCCU | 5614 | 365-385 | AGGATUTGCUGCUUGGCUAGCUC | 6070 | 363-385 |
| AD-1706547.1 | CUAGCCAAGCAGCAAAUCCUU | 148 | 366-386 | AAGGAUTUGCUGCUUGGCUAGCU | 6071 | 364-386 |
| AD-1706548.1 | UAGCCAAGCAGCAAAUCCUGU | 5615 | 367-387 | ACAGGATUUGCTGCUUGGCUAGC | 6072 | 365-387 |
| AD-1706549.1 | AGCCAAGCAGCAAAUCCUGGU | 5616 | 368-388 | ACCAGGAUUUGCUGCUUGGCUAG | 6073 | 366-388 |
| AD-1706550.1 | GCCAAGCAGCAAAUCCUGGAU | 5617 | 369-389 | ATCCAGGAUUUGCUGCUUGGCUA | 6074 | 367-389 |
| AD-1706578.1 | ACCUGACCAGUCGUCCCAGAU | 5618 | 397-417 | ATCUGGGACGACUGGUCAGGUGC | 6075 | 395-417 |
| AD-1706579.1 | CCUGACCAGUCGUCCCAGAAU | 5619 | 398-418 | ATUCTGGGACGACUGGUCAGGUG | 6076 | 396-418 |
| AD-1706580.1 | CUGACCAGUCGUCCCAGAAUU | 5620 | 399-419 | AAUUCUGGGACGACUGGUCAGGU | 6077 | 397-419 |
| AD-1706581.1 | UGACCAGUCGUCCCAGAAUAU | 5621 | 400-420 | ATAUTCTGGGACGACUGGUCAGG | 6078 | 398-420 |
| AD-1706582.1 | GACCAGUCGUCCCAGAAUAAU | 5622 | 401-421 | ATUATUCUGGGACGACUGGUCAG | 6079 | 399-421 |
| AD-1706583.1 | ACCAGUCGUCCCAGAAUAACU | 66 | 402-422 | AGUUAUTCUGGGACGACUGGUCA | 57 | 400-422 |
| AD-1706584.1 | CCAGUCGUCCCAGAAUAACUU | 5623 | 403-423 | AAGUTATUCUGGGACGACUGGUC | 6080 | 401-423 |
| AD-1706585.1 | CAGUCGUCCCAGAAUAACUCU | 5624 | 404-424 | AGAGTUAUUCUGGGACGACUGGU | 6081 | 402-424 |
| AD-1706586.1 | AGUCGUCCCAGAAUAACUCAU | 5625 | 405-425 | ATGAGUTAUUCTGGGACGACUGG | 6082 | 403-425 |
| AD-1706587.1 | GUCGUCCCAGAAUAACUCAUU | 5626 | 406-426 | AAUGAGTUAUUCUGGGACGACUG | 6083 | 404-426 |
| AD-1706588.1 | UCGUCCCAGAAUAACUCAUCU | 151 | 407-427 | AGAUGAGUUAUTCUGGGACGACU | 6084 | 405-427 |
| AD-1706589.1 | CGUCCCAGAAUAACUCAUCCU | 5627 | 408-428 | AGGATGAGUUATUCUGGGACGAC | 6085 | 406-428 |
| AD-1706590.1 | GUCCCAGAAUAACUCAUCCUU | 5628 | 409-429 | AAGGAUGAGUUAUUCUGGGACGA | 6086 | 407-429 |
| AD-1706591.1 | UCCCAGAAUAACUCAUCCUCU | 5629 | 410-430 | AGAGGATGAGUTAUUCUGGGACG | 6087 | 408-430 |
| AD-1706592.1 | CCCAGAAUAACUCAUCCUCCU | 5630 | 411-431 | AGGAGGAUGAGTUAUUCUGGGAC | 6088 | 409-431 |
| AD-1706593.1 | CCAGAAUAACUCAUCCUCCAU | 67 | 412-432 | ATGGAGGAUGAGUUAUUCUGGGA | 59 | 410-432 |
| AD-1706594.1 | CAGAAUAACUCAUCCUCCACU | 5631 | 413-433 | AGUGGAGGAUGAGUUAUUCUGGG | 6089 | 411-433 |
| AD-1706635.1 | GGGAGUGUGGCUCCAGGGAAU | 5632 | 474-494 | ATUCCCTGGAGCCACACUCCCUG | 6090 | 472-494 |
| AD-1706636.1 | GGAGUGUGGCUCCAGGGAAUU | 5633 | 475-495 | AAUUCCCUGGAGCCACACUCCCU | 6091 | 473-495 |
| AD-1706637.1 | GAGUGUGGCUCCAGGGAAUGU | 5634 | 476-496 | ACAUTCCCUGGAGCCACACUCCC | 6092 | 474-496 |
| AD-1706638.1 | AGUGUGGCUCCAGGGAAUGGU | 154 | 477-497 | ACCATUCCCUGGAGCCACACUCC | 6093 | 475-497 |
| AD-1706639.1 | GAGGAGGUCAUCAGCUUUGCU | 5635 | 498-518 | AGCAAAGCUGATGACCUCCUCCC | 6094 | 496-518 |
| AD-1706640.1 | AGGAGGUCAUCAGCUUUGCUU | 5636 | 499-519 | AAGCAAAGCUGAUGACCUCCUCC | 6095 | 497-519 |
| AD-1706641.1 | GGAGGUCAUCAGCUUUGCUAU | 5637 | 500-520 | ATAGCAAAGCUGAUGACCUCCUC | 6096 | 498-520 |
| AD-1706642.1 | GAGGUCAUCAGCUUUGCUACU | 5638 | 501-521 | AGUAGCAAAGCTGAUGACCUCCU | 6097 | 499-521 |
| AD-1706643.1 | AGGUCAUCAGCUUUGCUACUU | 5639 | 502-522 | AAGUAGCAAAGCUGAUGACCUCC | 6098 | 500-522 |
| AD-1706644.1 | GGUCAUCAGCUUUGCUACUGU | 5640 | 503-523 | ACAGTAGCAAAGCUGAUGACCUC | 6099 | 501-523 |
| AD-1706645.1 | GUCAUCAGCUUUGCUACUGUU | 5641 | 504-524 | AACAGUAGCAAAGCUGAUGACCU | 6100 | 502-524 |
| AD-1706646.1 | UCAUCAGCUUUGCUACUGUCU | 5642 | 505-525 | AGACAGTAGCAAAGCUGAUGACC | 6101 | 503-525 |
| AD-1706649.1 | UCAGCUUUGCUACUGUCACAU | 5643 | 508-528 | ATGUGACAGUAGCAAAGCUGAUG | 6102 | 506-528 |
| AD-1706650.1 | CAGCUUUGCUACUGUCACAGU | 5644 | 509-529 | ACUGTGACAGUAGCAAAGCUGAU | 6103 | 507-529 |
| AD-1706651.1 | AGCUUUGCUACUGUCACAGAU | 5645 | 510-530 | ATCUGUGACAGTAGCAAAGCUGA | 6104 | 508-530 |
| AD-1706652.1 | GCUUUGCUACUGUCACAGACU | 5646 | 511-531 | AGUCTGTGACAGUAGCAAAGCUG | 6105 | 509-531 |
| AD-1706653.1 | CUUUGCUACUGUCACAGACUU | 5647 | 512-532 | AAGUCUGUGACAGUAGCAAAGCU | 6106 | 510-532 |
| AD-1706654.1 | UUUGCUACUGUCACAGACUCU | 5648 | 513-533 | AGAGTCTGUGACAGUAGCAAAGC | 6107 | 511-533 |
| AD-1706655.1 | UUGCUACUGUCACAGACUCCU | 5649 | 514-534 | AGGAGUCUGUGACAGUAGCAAAG | 6108 | 512-534 |
| AD-1706656.1 | UGCUACUGUCACAGACUCCAU | 5650 | 515-535 | ATGGAGTCUGUGACAGUAGCAAA | 6109 | 513-535 |
| AD-1706660.1 | ACUGUCACAGACUCCACUUCU | 5651 | 519-539 | AGAAGUGGAGUCUGUGACAGUAG | 6110 | 517-539 |
| AD-1706661.1 | CUGUCACAGACUCCACUUCAU | 68 | 520-540 | ATGAAGTGGAGTCUGUGACAGUA | 6111 | 518-540 |
| AD-1706662.1 | UGUCACAGACUCCACUUCAGU | 69 | 521-541 | ACUGAAGUGGAGUCUGUGACAGU | 61 | 519-541 |
| AD-1706664.1 | UCACAGACUCCACUUCAGCCU | 5652 | 523-543 | AGGCTGAAGUGGAGUCUGUGACA | 6112 | 521-543 |
| AD-1706665.1 | CACAGACUCCACUUCAGCCUU | 5653 | 524-544 | AAGGCUGAAGUGGAGUCUGUGAC | 6113 | 522-544 |
| AD-1706666.1 | ACAGACUCCACUUCAGCCUAU | 5654 | 525-545 | ATAGGCTGAAGTGGAGUCUGUGA | 6114 | 523-545 |
| AD-1706667.1 | CAGACUCCACUUCAGCCUACU | 5655 | 526-546 | AGUAGGCUGAAGUGGAGUCUGUG | 6115 | 524-546 |
| AD-1706668.1 | AGACUCCACUUCAGCCUACAU | 5656 | 527-547 | ATGUAGGCUGAAGUGGAGUCUGU | 6116 | 525-547 |
| AD-1706669.1 | GACUCCACUUCAGCCUACAGU | 5657 | 528-548 | ACUGTAGGCUGAAGUGGAGUCUG | 6117 | 526-548 |
| AD-1706670.1 | ACUCCACUUCAGCCUACAGCU | 5658 | 529-549 | AGCUGUAGGCUGAAGUGGAGUCU | 6118 | 527-549 |
| AD-1706671.1 | CUCCACUUCAGCCUACAGCUU | 5659 | 530-550 | AAGCTGTAGGCTGAAGUGGAGUC | 6119 | 528-550 |
| AD-1706672.1 | UCCACUUCAGCCUACAGCUCU | 156 | 531-551 | AGAGCUGUAGGCUGAAGUGGAGU | 291 | 529-551 |
| AD-1706673.1 | CCACUUCAGCCUACAGCUCCU | 5660 | 532-552 | AGGAGCTGUAGGCUGAAGUGGAG | 6120 | 530-552 |
| AD-1706674.1 | CACUUCAGCCUACAGCUCCCU | 5661 | 533-553 | AGGGAGCUGUAGGCUGAAGUGGA | 6121 | 531-553 |
| AD-1706675.1 | ACUUCAGCCUACAGCUCCCUU | 5662 | 534-554 | AAGGGAGCUGUAGGCUGAAGUGG | 6122 | 532-554 |
| AD-1706678.1 | UCAGCCUACAGCUCCCUGCUU | 5663 | 537-557 | AAGCAGGGAGCTGUAGGCUGAAG | 6123 | 535-557 |
| AD-1706729.1 | CACCUGUACCAUGCCCGCCUU | 5664 | 588-608 | AAGGCGGGCAUGGUACAGGUGGU | 6124 | 586-608 |
| AD-1706731.1 | CCUGUACCAUGCCCGCCUGUU | 5665 | 590-610 | AACAGGCGGGCAUGGUACAGGUG | 6125 | 588-610 |
| AD-1706732.1 | CUGUACCAUGCCCGCCUGUGU | 5666 | 591-611 | ACACAGGCGGGCAUGGUACAGGU | 6126 | 589-611 |
| AD-1706735.1 | UACCAUGCCCGCCUGUGGCUU | 160 | 594-614 | AAGCCACAGGCGGGCAUGGUACA | 295 | 592-614 |
| AD-1706745.1 | CACCCUUCCUGGCACUCUUUU | 5667 | 626-646 | AAAAGAGUGCCAGGAAGGGUGGG | 6127 | 624-646 |
| AD-1706746.1 | ACCCUUCCUGGCACUCUUUGU | 5668 | 627-647 | ACAAAGAGUGCCAGGAAGGGUGG | 6128 | 625-647 |
| AD-1706747.1 | CCCUUCCUGGCACUCUUUGCU | 161 | 628-648 | AGCAAAGAGUGCCAGGAAGGGUG | 296 | 626-648 |
| AD-1706748.1 | CCUUCCUGGCACUCUUUGCUU | 5669 | 629-649 | AAGCAAAGAGUGCCAGGAAGGGU | 6129 | 627-649 |
| AD-1706749.1 | CUUCCUGGCACUCUUUGCUUU | 5670 | 630-650 | AAAGCAAAGAGTGCCAGGAAGGG | 6130 | 628-650 |
| AD-1706750.1 | UUCCUGGCACUCUUUGCUUGU | 5671 | 631-651 | ACAAGCAAAGAGUGCCAGGAAGG | 6131 | 629-651 |
| AD-1706751.1 | UCCUGGCACUCUUUGCUUGAU | 5672 | 632-652 | ATCAAGCAAAGAGUGCCAGGAAG | 6132 | 630-652 |
| AD-1706752.1 | CCUGGCACUCUUUGCUUGAGU | 5673 | 633-653 | ACUCAAGCAAAGAGUGCCAGGAA | 6133 | 631-653 |
| AD-1706753.1 | CUGGCACUCUUUGCUUGAGGU | 5674 | 634-654 | ACCUCAAGCAAAGAGUGCCAGGA | 6134 | 632-654 |
| AD-1706754.1 | UGGCACUCUUUGCUUGAGGAU | 5675 | 635-655 | ATCCTCAAGCAAAGAGUGCCAGG | 6135 | 633-655 |
| AD-1706755.1 | GGCACUCUUUGCUUGAGGAUU | 5676 | 636-656 | AAUCCUCAAGCAAAGAGUGCCAG | 6136 | 634-656 |
| AD-1706756.1 | GCACUCUUUGCUUGAGGAUCU | 5677 | 637-657 | AGAUCCTCAAGCAAAGAGUGCCA | 6137 | 635-657 |
| AD-1706758.1 | ACUCUUUGCUUGAGGAUCUUU | 5678 | 639-659 | AAAGAUCCUCAAGCAAAGAGUGC | 6138 | 637-659 |
| AD-1706759.1 | CUCUUUGCUUGAGGAUCUUCU | 162 | 640-660 | AGAAGATCCUCAAGCAAAGAGUG | 6139 | 638-660 |
| AD-1706760.1 | UCUUUGCUUGAGGAUCUUCCU | 5679 | 641-661 | AGGAAGAUCCUCAAGCAAAGAGU | 6140 | 639-661 |
| AD-1706761.1 | CUUUGCUUGAGGAUCUUCCGU | 70 | 642-662 | ACGGAAGAUCCTCAAGCAAAGAG | 62 | 640-662 |
| AD-1706762.1 | UUUGCUUGAGGAUCUUCCGAU | 5680 | 643-663 | ATCGGAAGAUCCUCAAGCAAAGA | 6141 | 641-663 |
| AD-1706763.1 | UUGCUUGAGGAUCUUCCGAUU | 5681 | 644-664 | AAUCGGAAGAUCCUCAAGCAAAG | 6142 | 642-664 |
| AD-1706764.1 | UGCUUGAGGAUCUUCCGAUGU | 5682 | 645-665 | ACAUCGGAAGATCCUCAAGCAAA | 6143 | 643-665 |
| AD-1706765.1 | GCUUGAGGAUCUUCCGAUGGU | 5683 | 646-666 | ACCATCGGAAGAUCCUCAAGCAA | 6144 | 644-666 |
| AD-1706796.1 | CUGGCUGAGCACCACAUCACU | 5684 | 702-722 | AGUGAUGUGGUGCUCAGCCAGGA | 6145 | 700-722 |
| AD-1706797.1 | UGGCUGAGCACCACAUCACCU | 5685 | 703-723 | AGGUGATGUGGTGCUCAGCCAGG | 6146 | 701-723 |
| AD-1706798.1 | GGCUGAGCACCACAUCACCAU | 5686 | 704-724 | ATGGTGAUGUGGUGCUCAGCCAG | 6147 | 702-724 |
| AD-1706799.1 | GCUGAGCACCACAUCACCAAU | 5687 | 705-725 | ATUGGUGAUGUGGUGCUCAGCCA | 6148 | 703-725 |
| AD-1706800.1 | CUGAGCACCACAUCACCAACU | 5688 | 706-726 | AGUUGGTGAUGTGGUGCUCAGCC | 6149 | 704-726 |
| AD-1706801.1 | UGAGCACCACAUCACCAACCU | 5689 | 707-727 | AGGUTGGUGAUGUGGUGCUCAGC | 6150 | 705-727 |
| AD-1706802.1 | GAGCACCACAUCACCAACCUU | 164 | 708-728 | AAGGTUGGUGATGUGGUGCUCAG | 6151 | 706-728 |
| AD-1706803.1 | AGCACCACAUCACCAACCUGU | 5690 | 709-729 | ACAGGUTGGUGAUGUGGUGCUCA | 6152 | 707-729 |
| AD-1706804.1 | GCACCACAUCACCAACCUGGU | 5691 | 710-730 | ACCAGGTUGGUGAUGUGGUGCUC | 6153 | 708-730 |
| AD-1706807.1 | CCACAUCACCAACCUGGGCUU | 5692 | 713-733 | AAGCCCAGGUUGGUGAUGUGGUG | 6154 | 711-733 |
| AD-1706808.1 | CACAUCACCAACCUGGGCUGU | 5693 | 714-734 | ACAGCCCAGGUTGGUGAUGUGGU | 6155 | 712-734 |
| AD-1706809.1 | ACAUCACCAACCUGGGCUGGU | 5694 | 715-735 | ACCAGCCCAGGTUGGUGAUGUGG | 6156 | 713-735 |
| AD-1706811.1 | AUCACCAACCUGGGCUGGCAU | 5695 | 717-737 | ATGCCAGCCCAGGUUGGUGAUGU | 6157 | 715-737 |
| AD-1706812.1 | UCACCAACCUGGGCUGGCAUU | 5696 | 718-738 | AAUGCCAGCCCAGGUUGGUGAUG | 6158 | 716-738 |
| AD-1706831.1 | UACCUUAACUCUGCCCUCUAU | 5697 | 737-757 | ATAGAGGGCAGAGUUAAGGUAUG | 6159 | 735-757 |
| AD-1706832.1 | ACCUUAACUCUGCCCUCUAGU | 5698 | 738-758 | ACUAGAGGGCAGAGUUAAGGUAU | 6160 | 736-758 |
| AD-1706833.1 | CCUUAACUCUGCCCUCUAGUU | 5699 | 739-759 | AACUAGAGGGCAGAGUUAAGGUA | 6161 | 737-759 |
| AD-1706834.1 | CUUAACUCUGCCCUCUAGUGU | 5700 | 740-760 | ACACTAGAGGGCAGAGUUAAGGU | 6162 | 738-760 |
| AD-1706835.1 | UUAACUCUGCCCUCUAGUGGU | 5701 | 741-761 | ACCACUAGAGGGCAGAGUUAAGG | 6163 | 739-761 |
| AD-1706836.1 | UAACUCUGCCCUCUAGUGGCU | 5702 | 742-762 | AGCCACTAGAGGGCAGAGUUAAG | 6164 | 740-762 |
| AD-1706848.1 | AAGUCUGGUGUCCUGAAACUU | 5703 | 774-794 | AAGUTUCAGGACACCAGACUUCU | 6165 | 772-794 |
| AD-1706849.1 | AGUCUGGUGUCCUGAAACUGU | 5704 | 775-795 | ACAGTUTCAGGACACCAGACUUC | 6166 | 773-795 |
| AD-1706850.1 | GUCUGGUGUCCUGAAACUGCU | 5705 | 776-796 | AGCAGUTUCAGGACACCAGACUU | 6167 | 774-796 |
| AD-1706851.1 | UCUGGUGUCCUGAAACUGCAU | 5706 | 777-797 | ATGCAGTUUCAGGACACCAGACU | 6168 | 775-797 |
| AD-1706852.1 | CUGGUGUCCUGAAACUGCAAU | 5707 | 778-798 | ATUGCAGUUUCAGGACACCAGAC | 6169 | 776-798 |
| AD-1706853.1 | UGGUGUCCUGAAACUGCAACU | 5708 | 779-799 | AGUUGCAGUUUCAGGACACCAGA | 6170 | 777-799 |
| AD-1706854.1 | GGUGUCCUGAAACUGCAACUU | 5709 | 780-800 | AAGUTGCAGUUTCAGGACACCAG | 6171 | 778-800 |
| AD-1706855.1 | GUGUCCUGAAACUGCAACUAU | 5710 | 781-801 | ATAGTUGCAGUTUCAGGACACCA | 6172 | 779-801 |
| AD-1706856.1 | UGUCCUGAAACUGCAACUAGU | 5711 | 782-802 | ACUAGUTGCAGTUUCAGGACACC | 6173 | 780-802 |
| AD-1706857.1 | GUCCUGAAACUGCAACUAGAU | 169 | 783-803 | ATCUAGTUGCAGUUUCAGGACAC | 6174 | 781-803 |
| AD-1706858.1 | UCCUGAAACUGCAACUAGACU | 5712 | 784-804 | AGUCTAGUUGCAGUUUCAGGACA | 6175 | 782-804 |
| AD-1706859.1 | CCUGAAACUGCAACUAGACUU | 5713 | 785-805 | AAGUCUAGUUGCAGUUUCAGGAC | 6176 | 783-805 |
| AD-1706860.1 | CUGAAACUGCAACUAGACUGU | 5714 | 786-806 | ACAGTCTAGUUGCAGUUUCAGGA | 6177 | 784-806 |
| AD-1706861.1 | UGAAACUGCAACUAGACUGCU | 5715 | 787-807 | AGCAGUCUAGUTGCAGUUUCAGG | 6178 | 785-807 |
| AD-1706862.1 | GAAACUGCAACUAGACUGCAU | 5716 | 788-808 | ATGCAGTCUAGTUGCAGUUUCAG | 6179 | 786-808 |
| AD-1706863.1 | AAACUGCAACUAGACUGCAGU | 5717 | 789-809 | ACUGCAGUCUAGUUGCAGUUUCA | 6180 | 787-809 |
| AD-1706864.1 | AACUGCAACUAGACUGCAGAU | 5718 | 790-810 | ATCUGCAGUCUAGUUGCAGUUUC | 6181 | 788-810 |
| AD-1706866.1 | CUGCAACUAGACUGCAGACCU | 5719 | 792-812 | AGGUCUGCAGUCUAGUUGCAGUU | 6182 | 790-812 |
| AD-1706873.1 | GGCAACAGCACAGUUACUGGU | 5720 | 819-839 | ACCAGUAACUGTGCUGUUGCCUU | 6183 | 817-839 |
| AD-1706874.1 | GCAACAGCACAGUUACUGGAU | 5721 | 820-840 | ATCCAGTAACUGUGCUGUUGCCU | 6184 | 818-840 |
| AD-1706875.1 | CAACAGCACAGUUACUGGACU | 5722 | 821-841 | AGUCCAGUAACTGUGCUGUUGCC | 6185 | 819-841 |
| AD-1706876.1 | AACAGCACAGUUACUGGACAU | 5723 | 822-842 | ATGUCCAGUAACUGUGCUGUUGC | 6186 | 820-842 |
| AD-1706877.1 | ACAGCACAGUUACUGGACAAU | 170 | 823-843 | ATUGTCCAGUAACUGUGCUGUUG | 6187 | 821-843 |
| AD-1706878.1 | CAGCACAGUUACUGGACAACU | 5724 | 824-844 | AGUUGUCCAGUAACUGUGCUGUU | 6188 | 822-844 |
| AD-1706879.1 | AGCACAGUUACUGGACAACCU | 5725 | 825-845 | AGGUTGTCCAGTAACUGUGCUGU | 6189 | 823-845 |
| AD-1706908.1 | CUUGGACACAGCAGGACACCU | 5726 | 854-874 | AGGUGUCCUGCTGUGUCCAAGAG | 6190 | 852-874 |
| AD-1706909.1 | UUGGACACAGCAGGACACCAU | 5727 | 855-875 | ATGGTGTCCUGCUGUGUCCAAGA | 6191 | 853-875 |
| AD-1706910.1 | UGGACACAGCAGGACACCAGU | 5728 | 856-876 | ACUGGUGUCCUGCUGUGUCCAAG | 6192 | 854-876 |
| AD-1706911.1 | GGACACAGCAGGACACCAGCU | 5729 | 857-877 | AGCUGGTGUCCTGCUGUGUCCAA | 6193 | 855-877 |
| AD-1706912.1 | GACACAGCAGGACACCAGCAU | 5730 | 858-878 | ATGCTGGUGUCCUGCUGUGUCCA | 6194 | 856-878 |
| AD-1706913.1 | ACACAGCAGGACACCAGCAGU | 5731 | 859-879 | ACUGCUGGUGUCCUGCUGUGUCC | 6195 | 857-879 |
| AD-1706914.1 | CACAGCAGGACACCAGCAGCU | 5732 | 860-880 | AGCUGCTGGUGTCCUGCUGUGUC | 6196 | 858-880 |
| AD-1706918.1 | GCAGGACACCAGCAGCCCUUU | 5733 | 864-884 | AAAGGGCUGCUGGUGUCCUGCUG | 6197 | 862-884 |
| AD-1706921.1 | GGACACCAGCAGCCCUUCCUU | 5734 | 867-887 | AAGGAAGGGCUGCUGGUGUCCUG | 6198 | 865-887 |
| AD-1706922.1 | GACACCAGCAGCCCUUCCUAU | 173 | 868-888 | ATAGGAAGGGCTGCUGGUGUCCU | 6199 | 866-888 |
| AD-1706923.1 | ACACCAGCAGCCCUUCCUAGU | 5735 | 869-889 | ACUAGGAAGGGCUGCUGGUGUCC | 6200 | 867-889 |
| AD-1706925.1 | ACCAGCAGCCCUUCCUAGAGU | 5736 | 871-891 | ACUCTAGGAAGGGCUGCUGGUGU | 6201 | 869-891 |
| AD-1706926.1 | CCAGCAGCCCUUCCUAGAGCU | 5737 | 872-892 | AGCUCUAGGAAGGGCUGCUGGUG | 6202 | 870-892 |
| AD-1706927.1 | CAGCAGCCCUUCCUAGAGCUU | 5738 | 873-893 | AAGCTCTAGGAAGGGCUGCUGGU | 6203 | 871-893 |
| AD-1706929.1 | GCAGCCCUUCCUAGAGCUUAU | 5739 | 875-895 | ATAAGCTCUAGGAAGGGCUGCUG | 6204 | 873-895 |
| AD-1706930.1 | CAGCCCUUCCUAGAGCUUAAU | 5740 | 876-896 | ATUAAGCUCUAGGAAGGGCUGCU | 6205 | 874-896 |
| AD-1706931.1 | AGCCCUUCCUAGAGCUUAAGU | 5741 | 877-897 | ACUUAAGCUCUAGGAAGGGCUGC | 6206 | 875-897 |
| AD-1706932.1 | GCCCUUCCUAGAGCUUAAGAU | 5742 | 878-898 | ATCUTAAGCUCTAGGAAGGGCUG | 6207 | 876-898 |
| AD-1706933.1 | CCCUUCCUAGAGCUUAAGAUU | 5743 | 879-899 | AAUCTUAAGCUCUAGGAAGGGCU | 6208 | 877-899 |
| AD-1706934.1 | CCUUCCUAGAGCUUAAGAUCU | 174 | 880-900 | AGAUCUTAAGCTCUAGGAAGGGC | 6209 | 878-900 |
| AD-1706982.1 | UUACGUAGACUUCCAGGAACU | 5744 | 986-1006 | AGUUCCTGGAAGUCUACGUAAUG | 6210 | 984-1006 |
| AD-1706983.1 | UACGUAGACUUCCAGGAACUU | 178 | 987-1007 | AAGUTCCUGGAAGUCUACGUAAU | 6211 | 985-1007 |
| AD-1706984.1 | ACGUAGACUUCCAGGAACUGU | 5745 | 988-1008 | ACAGTUCCUGGAAGUCUACGUAA | 6212 | 986-1008 |
| AD-1706985.1 | CGUAGACUUCCAGGAACUGGU | 5746 | 989-1009 | ACCAGUTCCUGGAAGUCUACGUA | 6213 | 987-1009 |
| AD-1706987.1 | UAGACUUCCAGGAACUGGGAU | 5747 | 991-1011 | ATCCCAGUUCCTGGAAGUCUACG | 6214 | 989-1011 |
| AD-1706988.1 | AGACUUCCAGGAACUGGGAUU | 5748 | 992-1012 | AAUCCCAGUUCCUGGAAGUCUAC | 6215 | 990-1012 |
| AD-1706989.1 | GACUUCCAGGAACUGGGAUGU | 5749 | 993-1013 | ACAUCCCAGUUCCUGGAAGUCUA | 6216 | 991-1013 |
| AD-1706990.1 | ACUUCCAGGAACUGGGAUGGU | 5750 | 994-1014 | ACCATCCCAGUTCCUGGAAGUCU | 6217 | 992-1014 |
| AD-1706991.1 | CUUCCAGGAACUGGGAUGGCU | 5751 | 995-1015 | AGCCAUCCCAGTUCCUGGAAGUC | 6218 | 993-1015 |
| AD-1707013.1 | GACUGGAUACUGCAGCCCGAU | 5752 | 1017-1037 | ATCGGGCUGCAGUAUCCAGUCCC | 6219 | 1015-1037 |
| AD-1707014.1 | ACUGGAUACUGCAGCCCGAGU | 5753 | 1018-1038 | ACUCGGGCUGCAGUAUCCAGUCC | 6220 | 1016-1038 |
| AD-1707015.1 | CUGGAUACUGCAGCCCGAGGU | 5754 | 1019-1039 | ACCUCGGGCUGCAGUAUCCAGUC | 6221 | 1017-1039 |
| AD-1707016.1 | GUACCAGCUGAAUUACUGCAU | 5755 | 1040-1060 | ATGCAGTAAUUCAGCUGGUACCC | 6222 | 1038-1060 |
| AD-1707017.1 | UACCAGCUGAAUUACUGCAGU | 181 | 1041-1061 | ACUGCAGUAAUTCAGCUGGUACC | 6223 | 1039-1061 |
| AD-1707018.1 | ACCAGCUGAAUUACUGCAGUU | 5756 | 1042-1062 | AACUGCAGUAATUCAGCUGGUAC | 6224 | 1040-1062 |
| AD-1707019.1 | CCAGCUGAAUUACUGCAGUGU | 5757 | 1043-1063 | ACACTGCAGUAAUUCAGCUGGUA | 6225 | 1041-1063 |
| AD-1707020.1 | CAGCUGAAUUACUGCAGUGGU | 5758 | 1044-1064 | ACCACUGCAGUAAUUCAGCUGGU | 6226 | 1042-1064 |
| AD-1707021.1 | AGCUGAAUUACUGCAGUGGGU | 5759 | 1045-1065 | ACCCACTGCAGTAAUUCAGCUGG | 6227 | 1043-1065 |
| AD-1707022.1 | GCUGAAUUACUGCAGUGGGCU | 5760 | 1046-1066 | AGCCCACUGCAGUAAUUCAGCUG | 6228 | 1044-1066 |
| AD-1707023.1 | CUGAAUUACUGCAGUGGGCAU | 5761 | 1047-1067 | ATGCCCACUGCAGUAAUUCAGCU | 6229 | 1045-1067 |
| AD-1707024.1 | UGAAUUACUGCAGUGGGCAGU | 5762 | 1048-1068 | ACUGCCCACUGCAGUAAUUCAGC | 6230 | 1046-1068 |
| AD-1707025.1 | GAAUUACUGCAGUGGGCAGUU | 5763 | 1049-1069 | AACUGCCCACUGCAGUAAUUCAG | 6231 | 1047-1069 |
| AD-1707030.1 | ACUGCAGUGGGCAGUGCCCUU | 182 | 1054-1074 | AAGGGCACUGCCCACUGCAGUAA | 317 | 1052-1074 |
| AD-1707047.1 | CAGGCAUUGCUGCCUCUUUCU | 183 | 1093-1113 | AGAAAGAGGCAGCAAUGCCUGGG | 318 | 1091-1113 |
| AD-1707048.1 | AGGCAUUGCUGCCUCUUUCCU | 5764 | 1094-1114 | AGGAAAGAGGCAGCAAUGCCUGG | 6232 | 1092-1114 |
| AD-1707049.1 | GGCAUUGCUGCCUCUUUCCAU | 5765 | 1095-1115 | ATGGAAAGAGGCAGCAAUGCCUG | 6233 | 1093-1115 |
| AD-1707050.1 | GCAUUGCUGCCUCUUUCCAUU | 5766 | 1096-1116 | AAUGGAAAGAGGCAGCAAUGCCU | 6234 | 1094-1116 |
| AD-1707051.1 | CAUUGCUGCCUCUUUCCAUUU | 5767 | 1097-1117 | AAAUGGAAAGAGGCAGCAAUGCC | 6235 | 1095-1117 |
| AD-1707052.1 | AUUGCUGCCUCUUUCCAUUCU | 5768 | 1098-1118 | AGAATGGAAAGAGGCAGCAAUGC | 6236 | 1096-1118 |
| AD-1707053.1 | UUGCUGCCUCUUUCCAUUCUU | 5769 | 1099-1119 | AAGAAUGGAAAGAGGCAGCAAUG | 6237 | 1097-1119 |
| AD-1707054.1 | UGCUGCCUCUUUCCAUUCUGU | 5770 | 1100-1120 | ACAGAATGGAAAGAGGCAGCAAU | 6238 | 1098-1120 |
| AD-1707055.1 | GCUGCCUCUUUCCAUUCUGCU | 5771 | 1101-1121 | AGCAGAAUGGAAAGAGGCAGCAA | 6239 | 1099-1121 |
| AD-1707056.1 | CUGCCUCUUUCCAUUCUGCCU | 5772 | 1102-1122 | AGGCAGAAUGGAAAGAGGCAGCA | 6240 | 1100-1122 |
| AD-1707057.1 | UGCCUCUUUCCAUUCUGCCGU | 5773 | 1103-1123 | ACGGCAGAAUGGAAAGAGGCAGC | 6241 | 1101-1123 |
| AD-1707058.1 | GCCUCUUUCCAUUCUGCCGUU | 5774 | 1104-1124 | AACGGCAGAAUGGAAAGAGGCAG | 6242 | 1102-1124 |
| AD-1707059.1 | CCUCUUUCCAUUCUGCCGUCU | 5775 | 1105-1125 | AGACGGCAGAATGGAAAGAGGCA | 6243 | 1103-1125 |
| AD-1707060.1 | CUCUUUCCAUUCUGCCGUCUU | 5776 | 1106-1126 | AAGACGGCAGAAUGGAAAGAGGC | 6244 | 1104-1126 |
| AD-1707061.1 | UCUUUCCAUUCUGCCGUCUUU | 5777 | 1107-1127 | AAAGACGGCAGAAUGGAAAGAGG | 6245 | 1105-1127 |
| AD-1707062.1 | CUUUCCAUUCUGCCGUCUUCU | 5778 | 1108-1128 | AGAAGACGGCAGAAUGGAAAGAG | 6246 | 1106-1128 |
| AD-1707063.1 | UUUCCAUUCUGCCGUCUUCAU | 184 | 1109-1129 | ATGAAGACGGCAGAAUGGAAAGA | 6247 | 1107-1129 |
| AD-1707064.1 | UUCCAUUCUGCCGUCUUCAGU | 5779 | 1110-1130 | ACUGAAGACGGCAGAAUGGAAAG | 6248 | 1108-1130 |
| AD-1707065.1 | UCCAUUCUGCCGUCUUCAGCU | 5780 | 1111-1131 | AGCUGAAGACGGCAGAAUGGAAA | 6249 | 1109-1131 |
| AD-1707066.1 | CCAUUCUGCCGUCUUCAGCCU | 5781 | 1112-1132 | AGGCTGAAGACGGCAGAAUGGAA | 6250 | 1110-1132 |
| AD-1707067.1 | CAUUCUGCCGUCUUCAGCCUU | 5782 | 1113-1133 | AAGGCUGAAGACGGCAGAAUGGA | 6251 | 1111-1133 |
| AD-1707070.1 | UCUGCCGUCUUCAGCCUCCUU | 5783 | 1116-1136 | AAGGAGGCUGAAGACGGCAGAAU | 6252 | 1114-1136 |
| AD-1707074.1 | CCGUCUUCAGCCUCCUCAAAU | 5784 | 1120-1140 | ATUUGAGGAGGCUGAAGACGGCA | 6253 | 1118-1140 |
| AD-1707075.1 | CGUCUUCAGCCUCCUCAAAGU | 185 | 1121-1141 | ACUUTGAGGAGGCUGAAGACGGC | 6254 | 1119-1141 |
| AD-1707076.1 | GUCUUCAGCCUCCUCAAAGCU | 5785 | 1122-1142 | AGCUTUGAGGAGGCUGAAGACGG | 6255 | 1120-1142 |
| AD-1707077.1 | UCUUCAGCCUCCUCAAAGCCU | 5786 | 1123-1143 | AGGCTUTGAGGAGGCUGAAGACG | 6256 | 1121-1143 |
| AD-1707078.1 | CUUCAGCCUCCUCAAAGCCAU | 5787 | 1124-1144 | ATGGCUTUGAGGAGGCUGAAGAC | 6257 | 1122-1144 |
| AD-1707080.1 | UCAGCCUCCUCAAAGCCAACU | 5788 | 1126-1146 | AGUUGGCUUUGAGGAGGCUGAAG | 6258 | 1124-1146 |
| AD-1707081.1 | CAGCCUCCUCAAAGCCAACAU | 5789 | 1127-1147 | ATGUTGGCUUUGAGGAGGCUGAA | 6259 | 1125-1147 |
| AD-1707082.1 | AGCCUCCUCAAAGCCAACAAU | 5790 | 1128-1148 | ATUGTUGGCUUTGAGGAGGCUGA | 6260 | 1126-1148 |
| AD-1707083.1 | GCCUCCUCAAAGCCAACAAUU | 5791 | 1129-1149 | AAUUGUTGGCUTUGAGGAGGCUG | 6261 | 1127-1149 |
| AD-1707084.1 | CCUCCUCAAAGCCAACAAUCU | 5792 | 1130-1150 | AGAUTGTUGGCTUUGAGGAGGCU | 6262 | 1128-1150 |
| AD-1707085.1 | CUCCUCAAAGCCAACAAUCCU | 5793 | 1131-1151 | AGGATUGUUGGCUUUGAGGAGGC | 6263 | 1129-1151 |
| AD-1707086.1 | UCCUCAAAGCCAACAAUCCUU | 5794 | 1132-1152 | AAGGAUTGUUGGCUUUGAGGAGG | 6264 | 1130-1152 |
| AD-1707087.1 | CCUCAAAGCCAACAAUCCUUU | 186 | 1133-1153 | AAAGGATUGUUGGCUUUGAGGAG | 6265 | 1131-1153 |
| AD-1707088.1 | CUCAAAGCCAACAAUCCUUGU | 5795 | 1134-1154 | ACAAGGAUUGUTGGCUUUGAGGA | 6266 | 1132-1154 |
| AD-1707092.1 | AAGCCAACAAUCCUUGGCCUU | 5796 | 1138-1158 | AAGGCCAAGGATUGUUGGCUUUG | 6267 | 1136-1158 |
| AD-1707093.1 | AGCCAACAAUCCUUGGCCUGU | 5797 | 1139-1159 | ACAGGCCAAGGAUUGUUGGCUUU | 6268 | 1137-1159 |
| AD-1707094.1 | GCCAACAAUCCUUGGCCUGCU | 5798 | 1140-1160 | AGCAGGCCAAGGAUUGUUGGCUU | 6269 | 1138-1160 |
| AD-1707095.1 | CCAACAAUCCUUGGCCUGCCU | 5799 | 1141-1161 | AGGCAGGCCAAGGAUUGUUGGCU | 6270 | 1139-1161 |
| AD-1707097.1 | AACAAUCCUUGGCCUGCCAGU | 5800 | 1143-1163 | ACUGGCAGGCCAAGGAUUGUUGG | 6271 | 1141-1163 |
| AD-1707098.1 | ACAAUCCUUGGCCUGCCAGUU | 5801 | 1144-1164 | AACUGGCAGGCCAAGGAUUGUUG | 6272 | 1142-1164 |
| AD-1707105.1 | UUGGCCUGCCAGUACCUCCUU | 5802 | 1151-1171 | AAGGAGGUACUGGCAGGCCAAGG | 6273 | 1149-1171 |
| AD-1707125.1 | GUUGUGUCCCUACUGCCCGAU | 5803 | 1171-1191 | ATCGGGCAGUAGGGACACAACAG | 6274 | 1169-1191 |
| AD-1707126.1 | UUGUGUCCCUACUGCCCGAAU | 5804 | 1172-1192 | ATUCGGGCAGUAGGGACACAACA | 6275 | 1170-1192 |
| AD-1707127.1 | UGUGUCCCUACUGCCCGAAGU | 5805 | 1173-1193 | ACUUCGGGCAGTAGGGACACAAC | 6276 | 1171-1193 |
| AD-1707128.1 | GUGUCCCUACUGCCCGAAGGU | 189 | 1174-1194 | ACCUTCGGGCAGUAGGGACACAA | 6277 | 1172-1194 |
| AD-1707129.1 | UGUCCCUACUGCCCGAAGGCU | 5806 | 1175-1195 | AGCCTUCGGGCAGUAGGGACACA | 6278 | 1173-1195 |
| AD-1707132.1 | UCUCUCUCCUCUACCUGGAUU | 5807 | 1198-1218 | AAUCCAGGUAGAGGAGAGAGAGG | 6279 | 1196-1218 |
| AD-1707133.1 | CUCUCUCCUCUACCUGGAUCU | 5808 | 1199-1219 | AGAUCCAGGUAGAGGAGAGAGAG | 6280 | 1197-1219 |
| AD-1707134.1 | UCUCUCCUCUACCUGGAUCAU | 5809 | 1200-1220 | ATGATCCAGGUAGAGGAGAGAGA | 6281 | 1198-1220 |
| AD-1707135.1 | CUCUCCUCUACCUGGAUCAUU | 5810 | 1201-1221 | AAUGAUCCAGGTAGAGGAGAGAG | 6282 | 1199-1221 |
| AD-1707136.1 | UCUCCUCUACCUGGAUCAUAU | 5811 | 1202-1222 | ATAUGATCCAGGUAGAGGAGAGA | 6283 | 1200-1222 |
| AD-1707137.1 | CUCCUCUACCUGGAUCAUAAU | 5812 | 1203-1223 | ATUATGAUCCAGGUAGAGGAGAG | 6284 | 1201-1223 |
| AD-1707138.1 | UCCUCUACCUGGAUCAUAAUU | 5813 | 1204-1224 | AAUUAUGAUCCAGGUAGAGGAGA | 6285 | 1202-1224 |
| AD-1707139.1 | CCUCUACCUGGAUCAUAAUGU | 5814 | 1205-1225 | ACAUTATGAUCCAGGUAGAGGAG | 6286 | 1203-1225 |
| AD-1707140.1 | CUCUACCUGGAUCAUAAUGGU | 5815 | 1206-1226 | ACCATUAUGAUCCAGGUAGAGGA | 6287 | 1204-1226 |
| AD-1707141.1 | UCUACCUGGAUCAUAAUGGCU | 5816 | 1207-1227 | AGCCAUTAUGATCCAGGUAGAGG | 6288 | 1205-1227 |
| AD-1707142.1 | CUACCUGGAUCAUAAUGGCAU | 5817 | 1208-1228 | ATGCCATUAUGAUCCAGGUAGAG | 6289 | 1206-1228 |
| AD-1707143.1 | UACCUGGAUCAUAAUGGCAAU | 191 | 1209-1229 | ATUGCCAUUAUGAUCCAGGUAGA | 6290 | 1207-1229 |
| AD-1707144.1 | ACCUGGAUCAUAAUGGCAAUU | 5818 | 1210-1230 | AAUUGCCAUUATGAUCCAGGUAG | 6291 | 1208-1230 |
| AD-1707145.1 | CCUGGAUCAUAAUGGCAAUGU | 5819 | 1211-1231 | ACAUTGCCAUUAUGAUCCAGGUA | 6292 | 1209-1231 |
| AD-1707146.1 | CUGGAUCAUAAUGGCAAUGUU | 5820 | 1212-1232 | AACATUGCCAUTAUGAUCCAGGU | 6293 | 1210-1232 |
| AD-1707147.1 | UGGAUCAUAAUGGCAAUGUGU | 5821 | 1213-1233 | ACACAUTGCCATUAUGAUCCAGG | 6294 | 1211-1233 |
| AD-1707148.1 | GGAUCAUAAUGGCAAUGUGGU | 5822 | 1214-1234 | ACCACATUGCCAUUAUGAUCCAG | 6295 | 1212-1234 |
| AD-1707149.1 | GAUCAUAAUGGCAAUGUGGUU | 5823 | 1215-1235 | AACCACAUUGCCAUUAUGAUCCA | 6296 | 1213-1235 |
| AD-1707150.1 | AUCAUAAUGGCAAUGUGGUCU | 5824 | 1216-1236 | AGACCACAUUGCCAUUAUGAUCC | 6297 | 1214-1236 |
| AD-1707151.1 | UCAUAAUGGCAAUGUGGUCAU | 5825 | 1217-1237 | ATGACCACAUUGCCAUUAUGAUC | 6298 | 1215-1237 |
| AD-1707152.1 | CAUAAUGGCAAUGUGGUCAAU | 5826 | 1218-1238 | ATUGACCACAUTGCCAUUAUGAU | 6299 | 1216-1238 |
| AD-1707153.1 | AUAAUGGCAAUGUGGUCAAGU | 5827 | 1219-1239 | ACUUGACCACATUGCCAUUAUGA | 6300 | 1217-1239 |
| AD-1707154.1 | UAAUGGCAAUGUGGUCAAGAU | 5828 | 1220-1240 | ATCUTGACCACAUUGCCAUUAUG | 6301 | 1218-1240 |
| AD-1707155.1 | AAUGGCAAUGUGGUCAAGACU | 192 | 1221-1241 | AGUCTUGACCACAUUGCCAUUAU | 6302 | 1219-1241 |
| AD-1707156.1 | AUGGCAAUGUGGUCAAGACGU | 5829 | 1222-1242 | ACGUCUTGACCACAUUGCCAUUA | 6303 | 1220-1242 |
| AD-1707157.1 | UGGCAAUGUGGUCAAGACGGU | 5830 | 1223-1243 | ACCGTCTUGACCACAUUGCCAUU | 6304 | 1221-1243 |
| AD-1707158.1 | GGCAAUGUGGUCAAGACGGAU | 5831 | 1224-1244 | ATCCGUCUUGACCACAUUGCCAU | 6305 | 1222-1244 |
| AD-1707159.1 | GCAAUGUGGUCAAGACGGAUU | 5832 | 1225-1245 | AAUCCGTCUUGACCACAUUGCCA | 6306 | 1223-1245 |
| AD-1707160.1 | CAAUGUGGUCAAGACGGAUGU | 5833 | 1226-1246 | ACAUCCGUCUUGACCACAUUGCC | 6307 | 1224-1246 |
| AD-1707161.1 | AAUGUGGUCAAGACGGAUGUU | 5834 | 1227-1247 | AACATCCGUCUTGACCACAUUGC | 6308 | 1225-1247 |
| AD-1707162.1 | AUGUGGUCAAGACGGAUGUGU | 5835 | 1228-1248 | ACACAUCCGUCTUGACCACAUUG | 6309 | 1226-1248 |
| AD-1707163.1 | UGUGGUCAAGACGGAUGUGCU | 5836 | 1229-1249 | AGCACATCCGUCUUGACCACAUU | 6310 | 1227-1249 |
| AD-1707164.1 | GUGGUCAAGACGGAUGUGCCU | 5837 | 1230-1250 | AGGCACAUCCGTCUUGACCACAU | 6311 | 1228-1250 |
| AD-1707165.1 | UGGUCAAGACGGAUGUGCCAU | 5838 | 1231-1251 | ATGGCACAUCCGUCUUGACCACA | 6312 | 1229-1251 |
| AD-1707166.1 | GGUCAAGACGGAUGUGCCAGU | 5839 | 1232-1252 | ACUGGCACAUCCGUCUUGACCAC | 6313 | 1230-1252 |
| AD-1707167.1 | GUCAAGACGGAUGUGCCAGAU | 5840 | 1233-1253 | ATCUGGCACAUCCGUCUUGACCA | 6314 | 1231-1253 |
| AD-1707168.1 | UCAAGACGGAUGUGCCAGAUU | 5841 | 1234-1254 | AAUCTGGCACATCCGUCUUGACC | 6315 | 1232-1254 |
| AD-1707169.1 | CAAGACGGAUGUGCCAGAUAU | 5842 | 1235-1255 | ATAUCUGGCACAUCCGUCUUGAC | 6316 | 1233-1255 |
| AD-1707170.1 | AAGACGGAUGUGCCAGAUAUU | 193 | 1236-1256 | AAUATCTGGCACAUCCGUCUUGA | 6317 | 1234-1256 |
| AD-1707171.1 | AGACGGAUGUGCCAGAUAUGU | 5843 | 1237-1257 | ACAUAUCUGGCACAUCCGUCUUG | 6318 | 1235-1257 |
| AD-1707172.1 | GACGGAUGUGCCAGAUAUGGU | 5844 | 1238-1258 | ACCATATCUGGCACAUCCGUCUU | 6319 | 1236-1258 |
| AD-1707173.1 | ACGGAUGUGCCAGAUAUGGUU | 5845 | 1239-1259 | AACCAUAUCUGGCACAUCCGUCU | 6320 | 1237-1259 |
| AD-1707174.1 | CGGAUGUGCCAGAUAUGGUGU | 5846 | 1240-1260 | ACACCATAUCUGGCACAUCCGUC | 6321 | 1238-1260 |
| AD-1707176.1 | GAUGUGCCAGAUAUGGUGGUU | 5847 | 1242-1262 | AACCACCAUAUCUGGCACAUCCG | 6322 | 1240-1262 |
| AD-1707177.1 | AUGUGCCAGAUAUGGUGGUGU | 5848 | 1243-1263 | ACACCACCAUATCUGGCACAUCC | 6323 | 1241-1263 |
| AD-1707178.1 | UGUGCCAGAUAUGGUGGUGGU | 5849 | 1244-1264 | ACCACCACCAUAUCUGGCACAUC | 6324 | 1242-1264 |
| AD-1707179.1 | GUGCCAGAUAUGGUGGUGGAU | 5850 | 1245-1265 | ATCCACCACCATAUCUGGCACAU | 6325 | 1243-1265 |
| AD-1707180.1 | UGCCAGAUAUGGUGGUGGAGU | 5851 | 1246-1266 | ACUCCACCACCAUAUCUGGCACA | 6326 | 1244-1266 |
| AD-1707182.1 | CCAGAUAUGGUGGUGGAGGCU | 5852 | 1248-1268 | AGCCTCCACCACCAUAUCUGGCA | 6327 | 1246-1268 |
| AD-1707189.1 | UGGUGGUGGAGGCCUGUGGCU | 5853 | 1255-1275 | AGCCACAGGCCTCCACCACCAUA | 6328 | 1253-1275 |
| AD-1707190.1 | GGUGGUGGAGGCCUGUGGCUU | 5854 | 1256-1276 | AAGCCACAGGCCUCCACCACCAU | 6329 | 1254-1276 |
| AD-1707197.1 | GAGGCCUGUGGCUGCAGCUAU | 195 | 1263-1283 | ATAGCUGCAGCCACAGGCCUCCA | 6330 | 1261-1283 |
| AD-1707200.1 | GCCUGUGGCUGCAGCUAGCAU | 5855 | 1266-1286 | ATGCTAGCUGCAGCCACAGGCCU | 6331 | 1264-1286 |
| AD-1707201.1 | CCUGUGGCUGCAGCUAGCAAU | 5856 | 1267-1287 | ATUGCUAGCUGCAGCCACAGGCC | 6332 | 1265-1287 |
| AD-1707202.1 | CUGUGGCUGCAGCUAGCAAGU | 5857 | 1268-1288 | ACUUGCTAGCUGCAGCCACAGGC | 6333 | 1266-1288 |
| AD-1707203.1 | UGUGGCUGCAGCUAGCAAGAU | 5858 | 1269-1289 | ATCUTGCUAGCTGCAGCCACAGG | 6334 | 1267-1289 |
| AD-1707204.1 | GUGGCUGCAGCUAGCAAGAGU | 5859 | 1270-1290 | ACUCTUGCUAGCUGCAGCCACAG | 6335 | 1268-1290 |
| AD-1707205.1 | UGGCUGCAGCUAGCAAGAGGU | 5860 | 1271-1291 | ACCUCUTGCUAGCUGCAGCCACA | 6336 | 1269-1291 |
| AD-1707206.1 | GGCUGCAGCUAGCAAGAGGAU | 5861 | 1272-1292 | ATCCTCTUGCUAGCUGCAGCCAC | 6337 | 1270-1292 |
| AD-1707207.1 | GCUGCAGCUAGCAAGAGGACU | 5862 | 1273-1293 | AGUCCUCUUGCTAGCUGCAGCCA | 6338 | 1271-1293 |
| AD-1707208.1 | CUGCAGCUAGCAAGAGGACCU | 5863 | 1274-1294 | AGGUCCTCUUGCUAGCUGCAGCC | 6339 | 1272-1294 |
| AD-1707209.1 | UGCAGCUAGCAAGAGGACCUU | 196 | 1275-1295 | AAGGTCCUCUUGCUAGCUGCAGC | 6340 | 1273-1295 |
| AD-1707210.1 | GCAGCUAGCAAGAGGACCUGU | 5864 | 1276-1296 | ACAGGUCCUCUTGCUAGCUGCAG | 6341 | 1274-1296 |
| AD-1707211.1 | CAGCUAGCAAGAGGACCUGGU | 5865 | 1277-1297 | ACCAGGTCCUCTUGCUAGCUGCA | 6342 | 1275-1297 |
| AD-1707212.1 | GCUUUGGAGUGAAGAGACCAU | 5866 | 1298-1318 | ATGGTCTCUUCACUCCAAAGCCC | 6343 | 1296-1318 |
| AD-1707213.1 | CUUUGGAGUGAAGAGACCAAU | 197 | 1299-1319 | ATUGGUCUCUUCACUCCAAAGCC | 6344 | 1297-1319 |
| AD-1707214.1 | UUUGGAGUGAAGAGACCAAGU | 5867 | 1300-1320 | ACUUGGTCUCUTCACUCCAAAGC | 6345 | 1298-1320 |
| AD-1707216.1 | UGGAGUGAAGAGACCAAGAUU | 5868 | 1302-1322 | AAUCTUGGUCUCUUCACUCCAAA | 6346 | 1300-1322 |
| AD-1707217.1 | GGAGUGAAGAGACCAAGAUGU | 5869 | 1303-1323 | ACAUCUTGGUCTCUUCACUCCAA | 6347 | 1301-1323 |
| AD-1707218.1 | GAGUGAAGAGACCAAGAUGAU | 5870 | 1304-1324 | ATCATCTUGGUCUCUUCACUCCA | 6348 | 1302-1324 |
| AD-1707221.1 | UGAAGAGACCAAGAUGAAGUU | 5871 | 1307-1327 | AACUTCAUCUUGGUCUCUUCACU | 6349 | 1305-1327 |
| AD-1707223.1 | AAGAGACCAAGAUGAAGUUUU | 5872 | 1309-1329 | AAAACUTCAUCTUGGUCUCUUCA | 6350 | 1307-1329 |
| AD-1707224.1 | AGAGACCAAGAUGAAGUUUCU | 198 | 1310-1330 | AGAAACTUCAUCUUGGUCUCUUC | 6351 | 1308-1330 |
| AD-1707225.1 | GAGACCAAGAUGAAGUUUCCU | 5873 | 1311-1331 | AGGAAACUUCATCUUGGUCUCUU | 6352 | 1309-1331 |
| AD-1707226.1 | AGACCAAGAUGAAGUUUCCCU | 5874 | 1312-1332 | AGGGAAACUUCAUCUUGGUCUCU | 6353 | 1310-1332 |
| AD-1707227.1 | GACCAAGAUGAAGUUUCCCAU | 5875 | 1313-1333 | ATGGGAAACUUCAUCUUGGUCUC | 6354 | 1311-1333 |
| AD-1707228.1 | ACCAAGAUGAAGUUUCCCAGU | 5876 | 1314-1334 | ACUGGGAAACUTCAUCUUGGUCU | 6355 | 1312-1334 |
| AD-1707229.1 | CCAAGAUGAAGUUUCCCAGGU | 5877 | 1315-1335 | ACCUGGGAAACTUCAUCUUGGUC | 6356 | 1313-1335 |
| AD-1707230.1 | CAAGAUGAAGUUUCCCAGGCU | 5878 | 1316-1336 | AGCCTGGGAAACUUCAUCUUGGU | 6357 | 1314-1336 |
| AD-1707231.1 | AAGAUGAAGUUUCCCAGGCAU | 5879 | 1317-1337 | ATGCCUGGGAAACUUCAUCUUGG | 6358 | 1315-1337 |
| AD-1707232.1 | AGAUGAAGUUUCCCAGGCACU | 5880 | 1318-1338 | AGUGCCTGGGAAACUUCAUCUUG | 6359 | 1316-1338 |
| AD-1707233.1 | GAUGAAGUUUCCCAGGCACAU | 5881 | 1319-1339 | ATGUGCCUGGGAAACUUCAUCUU | 6360 | 1317-1339 |
| AD-1707234.1 | AUGAAGUUUCCCAGGCACAGU | 5882 | 1320-1340 | ACUGTGCCUGGGAAACUUCAUCU | 6361 | 1318-1340 |
| AD-1707236.1 | GAAGUUUCCCAGGCACAGGGU | 5883 | 1322-1342 | ACCCTGTGCCUGGGAAACUUCAU | 6362 | 1320-1342 |
| AD-1707237.1 | AAGUUUCCCAGGCACAGGGCU | 5884 | 1323-1343 | AGCCCUGUGCCTGGGAAACUUCA | 6363 | 1321-1343 |
| AD-1707239.1 | GUUUCCCAGGCACAGGGCAUU | 5885 | 1325-1345 | AAUGCCCUGUGCCUGGGAAACUU | 6364 | 1323-1345 |
| AD-1707240.1 | UUUCCCAGGCACAGGGCAUCU | 5886 | 1326-1346 | AGAUGCCCUGUGCCUGGGAAACU | 6365 | 1324-1346 |
| AD-1707241.1 | UUCCCAGGCACAGGGCAUCUU | 5887 | 1327-1347 | AAGATGCCCUGTGCCUGGGAAAC | 6366 | 1325-1347 |
| AD-1707242.1 | UCCCAGGCACAGGGCAUCUGU | 5888 | 1328-1348 | ACAGAUGCCCUGUGCCUGGGAAA | 6367 | 1326-1348 |
| AD-1707275.1 | CAACCCAACAACCACCUGGCU | 5889 | 1381-1401 | AGCCAGGUGGUTGUUGGGUUGGG | 6368 | 1379-1401 |
| AD-1707276.1 | AACCCAACAACCACCUGGCAU | 5890 | 1382-1402 | ATGCCAGGUGGTUGUUGGGUUGG | 6369 | 1380-1402 |
| AD-1707277.1 | ACCCAACAACCACCUGGCAAU | 201 | 1383-1403 | ATUGCCAGGUGGUUGUUGGGUUG | 6370 | 1381-1403 |
| AD-1707278.1 | CCCAACAACCACCUGGCAAUU | 5891 | 1384-1404 | AAUUGCCAGGUGGUUGUUGGGUU | 6371 | 1382-1404 |
| AD-1707279.1 | CCAACAACCACCUGGCAAUAU | 5892 | 1385-1405 | ATAUTGCCAGGTGGUUGUUGGGU | 6372 | 1383-1405 |
| AD-1707280.1 | CAACAACCACCUGGCAAUAUU | 5893 | 1386-1406 | AAUATUGCCAGGUGGUUGUUGGG | 6373 | 1384-1406 |
| AD-1707281.1 | AACAACCACCUGGCAAUAUGU | 5894 | 1387-1407 | ACAUAUTGCCAGGUGGUUGUUGG | 6374 | 1385-1407 |
| AD-1707282.1 | ACAACCACCUGGCAAUAUGAU | 5895 | 1388-1408 | ATCATATUGCCAGGUGGUUGUUG | 6375 | 1386-1408 |
| AD-1707283.1 | CAACCACCUGGCAAUAUGACU | 5896 | 1389-1409 | AGUCAUAUUGCCAGGUGGUUGUU | 6376 | 1387-1409 |
| AD-1707284.1 | AACCACCUGGCAAUAUGACUU | 5897 | 1390-1410 | AAGUCATAUUGCCAGGUGGUUGU | 6377 | 1388-1410 |
| AD-1707285.1 | ACCACCUGGCAAUAUGACUCU | 5898 | 1391-1411 | AGAGTCAUAUUGCCAGGUGGUUG | 6378 | 1389-1411 |
| AD-1707286.1 | CCACCUGGCAAUAUGACUCAU | 5899 | 1392-1412 | ATGAGUCAUAUTGCCAGGUGGUU | 6379 | 1390-1412 |
| AD-1707287.1 | CACCUGGCAAUAUGACUCACU | 5900 | 1393-1413 | AGUGAGTCAUATUGCCAGGUGGU | 6380 | 1391-1413 |
| AD-1707288.1 | ACCUGGCAAUAUGACUCACUU | 5901 | 1394-1414 | AAGUGAGUCAUAUUGCCAGGUGG | 6381 | 1392-1414 |
| AD-1707289.1 | CCUGGCAAUAUGACUCACUUU | 5902 | 1395-1415 | AAAGTGAGUCATAUUGCCAGGUG | 6382 | 1393-1415 |
| AD-1707290.1 | CUGGCAAUAUGACUCACUUGU | 5903 | 1396-1416 | ACAAGUGAGUCAUAUUGCCAGGU | 6383 | 1394-1416 |
| AD-1707291.1 | UGGCAAUAUGACUCACUUGAU | 5904 | 1397-1417 | ATCAAGTGAGUCAUAUUGCCAGG | 6384 | 1395-1417 |
| AD-1707292.1 | GGCAAUAUGACUCACUUGACU | 202 | 1398-1418 | AGUCAAGUGAGTCAUAUUGCCAG | 6385 | 1396-1418 |
| AD-1707293.1 | GCAAUAUGACUCACUUGACCU | 5905 | 1399-1419 | AGGUCAAGUGAGUCAUAUUGCCA | 6386 | 1397-1419 |
| AD-1707299.1 | GGACCCAAAUGGGCACUUUCU | 5906 | 1425-1445 | AGAAAGTGCCCAUUUGGGUCCCA | 6387 | 1423-1445 |
| AD-1707301.1 | ACCCAAAUGGGCACUUUCUUU | 5907 | 1427-1447 | AAAGAAAGUGCCCAUUUGGGUCC | 6388 | 1425-1447 |
| AD-1707302.1 | CCCAAAUGGGCACUUUCUUGU | 5908 | 1428-1448 | ACAAGAAAGUGCCCAUUUGGGUC | 6389 | 1426-1448 |
| AD-1707303.1 | CCAAAUGGGCACUUUCUUGUU | 5909 | 1429-1449 | AACAAGAAAGUGCCCAUUUGGGU | 6390 | 1427-1449 |
| AD-1707304.1 | CAAAUGGGCACUUUCUUGUCU | 5910 | 1430-1450 | AGACAAGAAAGTGCCCAUUUGGG | 6391 | 1428-1450 |
| AD-1707305.1 | AAAUGGGCACUUUCUUGUCUU | 5911 | 1431-1451 | AAGACAAGAAAGUGCCCAUUUGG | 6392 | 1429-1451 |
| AD-1707306.1 | AAUGGGCACUUUCUUGUCUGU | 71 | 1432-1452 | ACAGACAAGAAAGUGCCCAUUUG | 63 | 1430-1452 |
| AD-1707307.1 | AUGGGCACUUUCUUGUCUGAU | 5912 | 1433-1453 | ATCAGACAAGAAAGUGCCCAUUU | 6393 | 1431-1453 |
| AD-1707308.1 | UGGGCACUUUCUUGUCUGAGU | 5913 | 1434-1454 | ACUCAGACAAGAAAGUGCCCAUU | 6394 | 1432-1454 |
| AD-1707309.1 | GGGCACUUUCUUGUCUGAGAU | 5914 | 1435-1455 | ATCUCAGACAAGAAAGUGCCCAU | 6395 | 1433-1455 |
| AD-1707310.1 | GGCACUUUCUUGUCUGAGACU | 5915 | 1436-1456 | AGUCTCAGACAAGAAAGUGCCCA | 6396 | 1434-1456 |
| AD-1707311.1 | GCACUUUCUUGUCUGAGACUU | 5916 | 1437-1457 | AAGUCUCAGACAAGAAAGUGCCC | 6397 | 1435-1457 |
| AD-1707312.1 | CACUUUCUUGUCUGAGACUCU | 5917 | 1438-1458 | AGAGTCTCAGACAAGAAAGUGCC | 6398 | 1436-1458 |
| AD-1707313.1 | ACUUUCUUGUCUGAGACUCUU | 204 | 1439-1459 | AAGAGUCUCAGACAAGAAAGUGC | 339 | 1437-1459 |
| AD-1707314.1 | CUUUCUUGUCUGAGACUCUGU | 5918 | 1440-1460 | ACAGAGTCUCAGACAAGAAAGUG | 6399 | 1438-1460 |
| AD-1707315.1 | UUUCUUGUCUGAGACUCUGGU | 5919 | 1441-1461 | ACCAGAGUCUCAGACAAGAAAGU | 6400 | 1439-1461 |
| AD-1707316.1 | UUCUUGUCUGAGACUCUGGCU | 5920 | 1442-1462 | AGCCAGAGUCUCAGACAAGAAAG | 6401 | 1440-1462 |
| AD-1707317.1 | UCUUGUCUGAGACUCUGGCUU | 5921 | 1443-1463 | AAGCCAGAGUCTCAGACAAGAAA | 6402 | 1441-1463 |
| AD-1707318.1 | CUUGUCUGAGACUCUGGCUUU | 5922 | 1444-1464 | AAAGCCAGAGUCUCAGACAAGAA | 6403 | 1442-1464 |
| AD-1707337.1 | UAUUCCAGGUUGGCUGAUGUU | 5923 | 1463-1483 | AACATCAGCCAACCUGGAAUAAG | 6404 | 1461-1483 |
| AD-1707338.1 | AUUCCAGGUUGGCUGAUGUGU | 5924 | 1464-1484 | ACACAUCAGCCAACCUGGAAUAA | 6405 | 1462-1484 |
| AD-1707339.1 | UUCCAGGUUGGCUGAUGUGUU | 5925 | 1465-1485 | AACACATCAGCCAACCUGGAAUA | 6406 | 1463-1485 |
| AD-1707340.1 | UCCAGGUUGGCUGAUGUGUUU | 206 | 1466-1486 | AAACACAUCAGCCAACCUGGAAU | 341 | 1464-1486 |
| AD-1707341.1 | CCAGGUUGGCUGAUGUGUUGU | 5926 | 1467-1487 | ACAACACAUCAGCCAACCUGGAA | 6407 | 1465-1487 |
| AD-1707342.1 | CAGGUUGGCUGAUGUGUUGGU | 5927 | 1468-1488 | ACCAACACAUCAGCCAACCUGGA | 6408 | 1466-1488 |
| AD-1707388.1 | GAUUUCCUGCCCUAAGUCCUU | 210 | 1534-1554 | AAGGACTUAGGGCAGGAAAUCAU | 6409 | 1532-1554 |
| AD-1707390.1 | UUUCCUGCCCUAAGUCCUGUU | 5928 | 1536-1556 | AACAGGACUUAGGGCAGGAAAUC | 6410 | 1534-1556 |
| AD-1707411.1 | AGAAGAUGUCAGGGACUAGGU | 5929 | 1557-1577 | ACCUAGTCCCUGACAUCUUCUCA | 6411 | 1555-1577 |
| AD-1707412.1 | GAAGAUGUCAGGGACUAGGGU | 5930 | 1558-1578 | ACCCTAGUCCCTGACAUCUUCUC | 6412 | 1556-1578 |
| AD-1707415.1 | AAGAUGUCAGGGACUAGGGAU | 5931 | 1559-1579 | ATCCCUAGUCCCUGACAUCUUCU | 6413 | 1557-1579 |
| AD-1707416.1 | AGAUGUCAGGGACUAGGGAGU | 5932 | 1560-1580 | ACUCCCTAGUCCCUGACAUCUUC | 6414 | 1558-1580 |
| AD-1707417.1 | GAUGUCAGGGACUAGGGAGGU | 5933 | 1561-1581 | ACCUCCCUAGUCCCUGACAUCUU | 6415 | 1559-1581 |
| AD-1707418.1 | AUGUCAGGGACUAGGGAGGGU | 5934 | 1562-1582 | ACCCTCCCUAGTCCCUGACAUCU | 6416 | 1560-1582 |
| AD-1707466.1 | GAGGAGGAAGCAGAUAGAUGU | 5935 | 1646-1666 | ACAUCUAUCUGCUUCCUCCUCCC | 6417 | 1644-1666 |
| AD-1707467.1 | AGGAGGAAGCAGAUAGAUGGU | 5936 | 1647-1667 | ACCATCTAUCUGCUUCCUCCUCC | 6418 | 1645-1667 |
| AD-1707468.1 | GGAGGAAGCAGAUAGAUGGUU | 215 | 1648-1668 | AACCAUCUAUCTGCUUCCUCCUC | 6419 | 1646-1668 |
| AD-1707469.1 | GAGGAAGCAGAUAGAUGGUCU | 5937 | 1649-1669 | AGACCATCUAUCUGCUUCCUCCU | 6420 | 1647-1669 |
| AD-1707470.1 | AGGAAGCAGAUAGAUGGUCCU | 5938 | 1650-1670 | AGGACCAUCUATCUGCUUCCUCC | 6421 | 1648-1670 |
| AD-1707471.1 | GGAAGCAGAUAGAUGGUCCAU | 5939 | 1651-1671 | ATGGACCAUCUAUCUGCUUCCUC | 6422 | 1649-1671 |
| AD-1707472.1 | GAAGCAGAUAGAUGGUCCAGU | 5940 | 1652-1672 | ACUGGACCAUCTAUCUGCUUCCU | 6423 | 1650-1672 |
| AD-1707473.1 | AAGCAGAUAGAUGGUCCAGCU | 5941 | 1653-1673 | AGCUGGACCAUCUAUCUGCUUCC | 6424 | 1651-1673 |
| AD-1707474.1 | AGCAGAUAGAUGGUCCAGCAU | 5942 | 1654-1674 | ATGCTGGACCATCUAUCUGCUUC | 6425 | 1652-1674 |
| AD-1707475.1 | GCAGAUAGAUGGUCCAGCAGU | 5943 | 1655-1675 | ACUGCUGGACCAUCUAUCUGCUU | 6426 | 1653-1675 |
| AD-1707476.1 | CAGAUAGAUGGUCCAGCAGGU | 5944 | 1656-1676 | ACCUGCTGGACCAUCUAUCUGCU | 6427 | 1654-1676 |
| AD-1707477.1 | AGAUAGAUGGUCCAGCAGGCU | 5945 | 1657-1677 | AGCCTGCUGGACCAUCUAUCUGC | 6428 | 1655-1677 |
| AD-1707478.1 | GAUAGAUGGUCCAGCAGGCUU | 5946 | 1658-1678 | AAGCCUGCUGGACCAUCUAUCUG | 6429 | 1656-1678 |
| AD-1707479.1 | AUAGAUGGUCCAGCAGGCUUU | 5947 | 1659-1679 | AAAGCCTGCUGGACCAUCUAUCU | 6430 | 1657-1679 |
| AD-1707480.1 | UAGAUGGUCCAGCAGGCUUGU | 5948 | 1660-1680 | ACAAGCCUGCUGGACCAUCUAUC | 6431 | 1658-1680 |
| AD-1707481.1 | AGAUGGUCCAGCAGGCUUGAU | 5949 | 1661-1681 | ATCAAGCCUGCTGGACCAUCUAU | 6432 | 1659-1681 |
| AD-1707482.1 | GAUGGUCCAGCAGGCUUGAAU | 5950 | 1662-1682 | ATUCAAGCCUGCUGGACCAUCUA | 6433 | 1660-1682 |
| AD-1707483.1 | AUGGUCCAGCAGGCUUGAAGU | 5951 | 1663-1683 | ACUUCAAGCCUGCUGGACCAUCU | 6434 | 1661-1683 |
| AD-1707484.1 | UGGUCCAGCAGGCUUGAAGCU | 5952 | 1664-1684 | AGCUTCAAGCCTGCUGGACCAUC | 6435 | 1662-1684 |
| AD-1707485.1 | GGUCCAGCAGGCUUGAAGCAU | 5953 | 1665-1685 | ATGCTUCAAGCCUGCUGGACCAU | 6436 | 1663-1685 |
| AD-1707486.1 | GUCCAGCAGGCUUGAAGCAGU | 5954 | 1666-1686 | ACUGCUTCAAGCCUGCUGGACCA | 6437 | 1664-1686 |
| AD-1707553.1 | AAGGUCAAGAGGGAGAUGGGU | 5955 | 1733-1753 | ACCCAUCUCCCTCUUGACCUUCC | 6438 | 1731-1753 |
| AD-1707554.1 | AGGUCAAGAGGGAGAUGGGCU | 5956 | 1734-1754 | AGCCCATCUCCCUCUUGACCUUC | 6439 | 1732-1754 |
| AD-1707555.1 | GGUCAAGAGGGAGAUGGGCAU | 5957 | 1735-1755 | ATGCCCAUCUCCCUCUUGACCUU | 6440 | 1733-1755 |
| AD-1707556.1 | GUCAAGAGGGAGAUGGGCAAU | 221 | 1736-1756 | ATUGCCCAUCUCCCUCUUGACCU | 6441 | 1734-1756 |
| AD-1707557.1 | UCAAGAGGGAGAUGGGCAAGU | 5958 | 1737-1757 | ACUUGCCCAUCTCCCUCUUGACC | 6442 | 1735-1757 |
| AD-1707577.1 | GCGCUGAGGGAGGAUGCUUAU | 5959 | 1757-1777 | ATAAGCAUCCUCCCUCAGCGCCU | 6443 | 1755-1777 |
| AD-1707578.1 | CGCUGAGGGAGGAUGCUUAGU | 5960 | 1758-1778 | ACUAAGCAUCCTCCCUCAGCGCC | 6444 | 1756-1778 |
| AD-1707605.1 | GCACUAAGCCUAAGAAGUUCU | 5961 | 1811-1831 | AGAACUTCUUAGGCUUAGUGCCU | 6445 | 1809-1831 |
| AD-1707606.1 | CACUAAGCCUAAGAAGUUCCU | 5962 | 1812-1832 | AGGAACTUCUUAGGCUUAGUGCC | 6446 | 1810-1832 |
| AD-1707623.1 | ACAGGACCCACUGGGAGACAU | 5963 | 1849-1869 | ATGUCUCCCAGTGGGUCCUGUCC | 6447 | 1847-1869 |
| AD-1707624.1 | CAGGACCCACUGGGAGACAAU | 5964 | 1850-1870 | ATUGTCTCCCAGUGGGUCCUGUC | 6448 | 1848-1870 |
| AD-1707625.1 | AGGACCCACUGGGAGACAAGU | 5965 | 1851-1871 | ACUUGUCUCCCAGUGGGUCCUGU | 6449 | 1849-1871 |
| AD-1707626.1 | GGACCCACUGGGAGACAAGCU | 5966 | 1852-1872 | AGCUTGTCUCCCAGUGGGUCCUG | 6450 | 1850-1872 |
| AD-1707627.1 | GACCCACUGGGAGACAAGCAU | 5967 | 1853-1873 | ATGCTUGUCUCCCAGUGGGUCCU | 6451 | 1851-1873 |
| AD-1707628.1 | ACCCACUGGGAGACAAGCAUU | 5968 | 1854-1874 | AAUGCUTGUCUCCCAGUGGGUCC | 6452 | 1852-1874 |
| AD-1707629.1 | CCCACUGGGAGACAAGCAUUU | 5969 | 1855-1875 | AAAUGCTUGUCTCCCAGUGGGUC | 6453 | 1853-1875 |
| AD-1707630.1 | CCACUGGGAGACAAGCAUUUU | 5970 | 1856-1876 | AAAATGCUUGUCUCCCAGUGGGU | 6454 | 1854-1876 |
| AD-1707631.1 | CACUGGGAGACAAGCAUUUAU | 227 | 1857-1877 | ATAAAUGCUUGTCUCCCAGUGGG | 6455 | 1855-1877 |
| AD-1707632.1 | ACUGGGAGACAAGCAUUUAUU | 5971 | 1858-1878 | AAUAAATGCUUGUCUCCCAGUGG | 6456 | 1856-1878 |
| AD-1707633.1 | CUGGGAGACAAGCAUUUAUAU | 5972 | 1859-1879 | ATAUAAAUGCUTGUCUCCCAGUG | 6457 | 1857-1879 |
| AD-1707634.1 | UGGGAGACAAGCAUUUAUACU | 5973 | 1860-1880 | AGUATAAAUGCTUGUCUCCCAGU | 6458 | 1858-1880 |
| AD-1707636.1 | GGAGACAAGCAUUUAUACUUU | 5974 | 1862-1882 | AAAGTATAAAUGCUUGUCUCCCA | 6459 | 1860-1882 |
| AD-1707637.1 | GAGACAAGCAUUUAUACUUUU | 5975 | 1863-1883 | AAAAGUAUAAATGCUUGUCUCCC | 6460 | 1861-1883 |
| AD-1707638.1 | AGACAAGCAUUUAUACUUUCU | 5976 | 1864-1884 | AGAAAGTAUAAAUGCUUGUCUCC | 6461 | 1862-1884 |
| AD-1707639.1 | GACAAGCAUUUAUACUUUCUU | 72 | 1865-1885 | AAGAAAGUAUAAAUGCUUGUCUC | 64 | 1863-1885 |
| AD-1707640.1 | ACAAGCAUUUAUACUUUCUUU | 73 | 1866-1886 | AAAGAAAGUAUAAAUGCUUGUCU | 65 | 1864-1886 |
| AD-1707641.1 | CAAGCAUUUAUACUUUCUUUU | 5977 | 1867-1887 | AAAAGAAAGUATAAAUGCUUGUC | 6462 | 1865-1887 |
| AD-1708118.1 | CCAGACAUGAGCUGUGAGGGU | 5526 | 44373 | ACCCTCACAGCUCAUGUCUGGCU | 6463 | 44312 |
| AD-1708120.1 | AGACAUGAGCUGUGAGGGUCU | 5527 | 860-880 | AGACCCTCACAGCUCAUGUCUGG | 5980 | 858-880 |
| AD-1708124.1 | AUGAGCUGUGAGGGUCAAGCU | 5531 | 864-884 | AGCUTGACCCUCACAGCUCAUGU | 5984 | 862-884 |
| AD-1708126.1 | GAGCUGUGAGGGUCAAGCACU | 5533 | 866-886 | AGUGCUTGACCCUCACAGCUCAU | 5986 | 864-886 |
| AD-1708127.1 | AGCUGUGAGGGUCAAGCACAU | 5534 | 15-35 | AUGUGCTUGACCCUCACAGCUCA | 6464 | 13-35 |
| AD-1708130.1 | UGUGAGGGUCAAGCACAGCUU | 5537 | 870-890 | AAGCTGTGCUUGACCCUCACAGC | 5990 | 868-890 |
| AD-1708132.1 | UGAGGGUCAAGCACAGCUAUU | 5539 | 20-40 | AAUAGCTGUGCUUGACCCUCACA | 6465 | 18-40 |
| AD-1708135.1 | GGGUCAAGCACAGCUAUCCAU | 5541 | 23-43 | AUGGAUAGCUGUGCUUGACCCUC | 6466 | 21-43 |
| AD-1708140.1 | AAGCACAGCUAUCCAUCAGAU | 5543 | 28-48 | AUCUGATGGAUAGCUGUGCUUGA | 6467 | 26-48 |
| AD-1708143.1 | CACAGCUAUCCAUCAGAUGAU | 5545 | 31-51 | AUCATCTGAUGGAUAGCUGUGCU | 6468 | 29-51 |
| AD-1708145.1 | CAGCUAUCCAUCAGAUGAUCU | 5547 | 33-53 | AGAUCATCUGAUGGAUAGCUGUG | 6469 | 31-53 |
| AD-1708146.1 | AGCUAUCCAUCAGAUGAUCUU | 5548 | 886-906 | AAGATCAUCUGAUGGAUAGCUGU | 6001 | 884-906 |
| AD-1708148.1 | CUAUCCAUCAGAUGAUCUACU | 5550 | 36-56 | AGUAGATCAUCUGAUGGAUAGCU | 6470 | 34-56 |
| AD-1708149.1 | UAUCCAUCAGAUGAUCUACUU | 5551 | 37-57 | AAGUAGAUCAUCUGAUGGAUAGC | 6004 | 35-57 |
| AD-1708151.1 | UCCAUCAGAUGAUCUACUUUU | 5552 | 891-911 | AAAAGUAGAUCAUCUGAUGGAUA | 6006 | 889-911 |
| AD-1708152.1 | CCAUCAGAUGAUCUACUUUCU | 5553 | 892-912 | AGAAAGTAGAUCAUCUGAUGGAU | 6007 | 890-912 |
| AD-1708156.1 | CAGAUGAUCUACUUUCAGCCU | 5557 | 44-64 | AGGCTGAAAGUAGAUCAUCUGAU | 6011 | 42-64 |
| AD-1708158.1 | GAUGAUCUACUUUCAGCCUUU | 5559 | 46-66 | AAAGGCTGAAAGUAGAUCAUCUG | 6013 | 44-66 |
| AD-1708163.1 | UCUACUUUCAGCCUUCCUGAU | 5563 | 51-71 | AUCAGGAAGGCUGAAAGUAGAUC | 6471 | 49-71 |
| AD-1708166.1 | ACUUUCAGCCUUCCUGAGUCU | 5566 | 54-74 | AGACTCAGGAAGGCUGAAAGUAG | 6020 | 52-74 |
| AD-1708170.1 | UCAGCCUUCCUGAGUCCCAGU | 5567 | 910-930 | ACUGGGACUCAGGAAGGCUGAAA | 6021 | 908-930 |
| AD-1708220.1 | GUGGCAGUGGUGUCUGCUGUU | 136 | 120-140 | AACAGCAGACACCACUGCCACAC | 270 | 118-140 |
| AD-1708223.1 | GCAGUGGUGUCUGCUGUCACU | 5572 | 123-143 | AGUGACAGCAGACACCACUGCCA | 6026 | 121-143 |
| AD-1708225.1 | AGUGGUGUCUGCUGUCACUGU | 5574 | 125-145 | ACAGTGACAGCAGACACCACUGC | 6028 | 123-145 |
| AD-1708227.1 | UGGUGUCUGCUGUCACUGUGU | 5576 | 127-147 | ACACAGTGACAGCAGACACCACU | 6030 | 125-147 |
| AD-1708245.1 | GACUCAACAGACGGAGCAACU | 5580 | 170-190 | AGUUGCTCCGUCUGUUGAGUCUG | 6034 | 168-190 |
| AD-1708248.1 | UCAACAGACGGAGCAACUGCU | 5583 | 173-193 | AGCAGUTGCUCCGUCUGUUGAGU | 6037 | 171-193 |
| AD-1708249.1 | CAACAGACGGAGCAACUGCCU | 5584 | 1026-1046 | AGGCAGTUGCUCCGUCUGUUGAG | 6038 | 1024-1046 |
| AD-1708251.1 | ACAGACGGAGCAACUGCCAUU | 5586 | 176-196 | AAUGGCAGUUGCUCCGUCUGUUG | 6040 | 174-196 |
| AD-1708255.1 | ACGGAGCAACUGCCAUCCGAU | 139 | 180-200 | AUCGGATGGCAGUUGCUCCGUCU | 6472 | 178-200 |
| AD-1708260.1 | GCAACUGCCAUCCGAGGCUCU | 5593 | 185-205 | AGAGCCTCGGAUGGCAGUUGCUC | 6473 | 183-205 |
| AD-1708342.1 | CAAGCAGAACGAGCUCUGGUU | 146 | 339-359 | AACCAGAGCUCGUUCUGCUUGGG | 280 | 337-359 |
| AD-1708344.1 | AGCAGAACGAGCUCUGGUGCU | 5596 | 341-361 | AGCACCAGAGCUCGUUCUGCUUG | 6474 | 339-361 |
| AD-1708347.1 | AGAACGAGCUCUGGUGCUGGU | 5599 | 1196-1216 | ACCAGCACCAGAGCUCGUUCUGC | 6054 | 1194-1216 |
| AD-1708350.1 | ACGAGCUCUGGUGCUGGAGCU | 5602 | 347-367 | AGCUCCAGCACCAGAGCUCGUUC | 6057 | 345-367 |
| AD-1708356.1 | UCUGGUGCUGGAGCUAGCCAU | 5606 | 1205-1225 | AUGGCUAGCUCCAGCACCAGAGC | 6475 | 1203-1225 |
| AD-1708357.1 | CUGGUGCUGGAGCUAGCCAAU | 147 | 354-374 | AUUGGCTAGCUCCAGCACCAGAG | 6476 | 352-374 |
| AD-1708361.1 | UGCUGGAGCUAGCCAAGCAGU | 5610 | 358-378 | ACUGCUTGGCUAGCUCCAGCACC | 6066 | 356-378 |
| AD-1708365.1 | GGAGCUAGCCAAGCAGCAAAU | 5611 | 362-382 | AUUUGCTGCUUGGCUAGCUCCAG | 6477 | 360-382 |
| AD-1708368.1 | GCUAGCCAAGCAGCAAAUCCU | 5614 | 365-385 | AGGATUTGCUGCUUGGCUAGCUC | 6070 | 363-385 |
| AD-1708369.1 | CUAGCCAAGCAGCAAAUCCUU | 148 | 366-386 | AAGGAUTUGCUGCUUGGCUAGCU | 6071 | 364-386 |
| AD-1708397.1 | UGACCAGUCGUCCCAGAAUAU | 5621 | 1252-1272 | AUAUTCTGGGACGACUGGUCAGG | 6478 | 1250-1272 |
| AD-1708399.1 | ACCAGUCGUCCCAGAAUAACU | 66 | 402-422 | AGUUAUTCUGGGACGACUGGUCA | 57 | 400-422 |
| AD-1708401.1 | CAGUCGUCCCAGAAUAACUCU | 5624 | 1256-1276 | AGAGTUAUUCUGGGACGACUGGU | 6081 | 1254-1276 |
| AD-1708402.1 | AGUCGUCCCAGAAUAACUCAU | 5625 | 405-425 | AUGAGUTAUUCUGGGACGACUGG | 6479 | 403-425 |
| AD-1708403.1 | GUCGUCCCAGAAUAACUCAUU | 5626 | 406-426 | AAUGAGTUAUUCUGGGACGACUG | 6083 | 404-426 |
| AD-1708405.1 | CGUCCCAGAAUAACUCAUCCU | 5627 | 408-428 | AGGATGAGUUAUUCUGGGACGAC | 6480 | 406-428 |
| AD-1708407.1 | UCCCAGAAUAACUCAUCCUCU | 5629 | 410-430 | AGAGGATGAGUUAUUCUGGGACG | 6481 | 408-430 |
| AD-1708408.1 | CCCAGAAUAACUCAUCCUCCU | 5630 | 1263-1283 | AGGAGGAUGAGUUAUUCUGGGAC | 6482 | 1261-1283 |
| AD-1708447.1 | GGGAGUGUGGCUCCAGGGAAU | 5632 | 474-494 | AUUCCCTGGAGCCACACUCCCUG | 6483 | 472-494 |
| AD-1708454.1 | GAGGUCAUCAGCUUUGCUACU | 5638 | 501-521 | AGUAGCAAAGCUGAUGACCUCCU | 6484 | 499-521 |
| AD-1708457.1 | GUCAUCAGCUUUGCUACUGUU | 5641 | 504-524 | AACAGUAGCAAAGCUGAUGACCU | 6100 | 502-524 |
| AD-1708458.1 | UCAUCAGCUUUGCUACUGUCU | 5642 | 1357-1377 | AGACAGTAGCAAAGCUGAUGACC | 6101 | 1355-1377 |
| AD-1708462.1 | CAGCUUUGCUACUGUCACAGU | 5644 | 1361-1381 | ACUGTGACAGUAGCAAAGCUGAU | 6103 | 1359-1381 |
| AD-1708464.1 | GCUUUGCUACUGUCACAGACU | 5646 | 511-531 | AGUCTGTGACAGUAGCAAAGCUG | 6105 | 509-531 |
| AD-1708466.1 | UUUGCUACUGUCACAGACUCU | 5648 | 513-533 | AGAGTCTGUGACAGUAGCAAAGC | 6107 | 511-533 |
| AD-1708468.1 | UGCUACUGUCACAGACUCCAU | 5650 | 515-535 | AUGGAGTCUGUGACAGUAGCAAA | 6485 | 513-535 |
| AD-1708473.1 | CUGUCACAGACUCCACUUCAU | 68 | 520-540 | AUGAAGTGGAGUCUGUGACAGUA | 60 | 518-540 |
| AD-1708476.1 | UCACAGACUCCACUUCAGCCU | 5652 | 523-543 | AGGCTGAAGUGGAGUCUGUGACA | 6112 | 521-543 |
| AD-1708478.1 | ACAGACUCCACUUCAGCCUAU | 5654 | 525-545 | AUAGGCTGAAGUGGAGUCUGUGA | 6486 | 523-545 |
| AD-1708482.1 | ACUCCACUUCAGCCUACAGCU | 5658 | 529-549 | AGCUGUAGGCUGAAGUGGAGUCU | 6118 | 527-549 |
| AD-1708483.1 | CUCCACUUCAGCCUACAGCUU | 5659 | 530-550 | AAGCTGTAGGCUGAAGUGGAGUC | 6487 | 528-550 |
| AD-1708485.1 | CCACUUCAGCCUACAGCUCCU | 5660 | 532-552 | AGGAGCTGUAGGCUGAAGUGGAG | 6120 | 530-552 |
| AD-1708559.1 | UGGCACUCUUUGCUUGAGGAU | 5675 | 635-655 | AUCCTCAAGCAAAGAGUGCCAGG | 6488 | 633-655 |
| AD-1708561.1 | GCACUCUUUGCUUGAGGAUCU | 5677 | 637-657 | AGAUCCTCAAGCAAAGAGUGCCA | 6137 | 635-657 |
| AD-1708564.1 | CUCUUUGCUUGAGGAUCUUCU | 162 | 640-660 | AGAAGATCCUCAAGCAAAGAGUG | 6139 | 638-660 |
| AD-1708565.1 | UCUUUGCUUGAGGAUCUUCCU | 5679 | 641-661 | AGGAAGAUCCUCAAGCAAAGAGU | 6140 | 639-661 |
| AD-1708567.1 | UUUGCUUGAGGAUCUUCCGAU | 5680 | 643-663 | AUCGGAAGAUCCUCAAGCAAAGA | 6489 | 641-663 |
| AD-1708647.1 | UGGCUGAGCACCACAUCACCU | 5685 | 1555-1575 | AGGUGATGUGGUGCUCAGCCAGG | 6490 | 1553-1575 |
| AD-1708648.1 | GGCUGAGCACCACAUCACCAU | 5686 | 1556-1576 | AUGGTGAUGUGGUGCUCAGCCAG | 6491 | 1554-1576 |
| AD-1708650.1 | CUGAGCACCACAUCACCAACU | 5688 | 706-726 | AGUUGGTGAUGUGGUGCUCAGCC | 6492 | 704-726 |
| AD-1708657.1 | CCACAUCACCAACCUGGGCUU | 5692 | 713-733 | AAGCCCAGGUUGGUGAUGUGGUG | 6154 | 711-733 |
| AD-1708662.1 | UCACCAACCUGGGCUGGCAUU | 5696 | 1570-1590 | AAUGCCAGCCCAGGUUGGUGAUG | 6158 | 1568-1590 |
| AD-1708680.1 | CCUUAACUCUGCCCUCUAGUU | 5699 | 739-759 | AACUAGAGGGCAGAGUUAAGGUA | 6161 | 737-759 |
| AD-1708683.1 | UAACUCUGCCCUCUAGUGGCU | 5702 | 742-762 | AGCCACTAGAGGGCAGAGUUAAG | 6164 | 740-762 |
| AD-1708697.1 | GUCUGGUGUCCUGAAACUGCU | 5705 | 1628-1648 | AGCAGUTUCAGGACACCAGACUU | 6167 | 1626-1648 |
| AD-1708698.1 | UCUGGUGUCCUGAAACUGCAU | 5706 | 1629-1649 | AUGCAGTUUCAGGACACCAGACU | 6493 | 1627-1649 |
| AD-1708700.1 | UGGUGUCCUGAAACUGCAACU | 5708 | 779-799 | AGUUGCAGUUUCAGGACACCAGA | 6170 | 777-799 |
| AD-1708704.1 | GUCCUGAAACUGCAACUAGAU | 169 | 783-803 | AUCUAGTUGCAGUUUCAGGACAC | 6494 | 781-803 |
| AD-1708706.1 | CCUGAAACUGCAACUAGACUU | 5713 | 785-805 | AAGUCUAGUUGCAGUUUCAGGAC | 6176 | 783-805 |
| AD-1708707.1 | CUGAAACUGCAACUAGACUGU | 5714 | 786-806 | ACAGTCTAGUUGCAGUUUCAGGA | 6177 | 784-806 |
| AD-1708709.1 | GAAACUGCAACUAGACUGCAU | 5716 | 788-808 | AUGCAGTCUAGUUGCAGUUUCAG | 6495 | 786-808 |
| AD-1708711.1 | AACUGCAACUAGACUGCAGAU | 5718 | 790-810 | AUCUGCAGUCUAGUUGCAGUUUC | 6496 | 788-810 |
| AD-1708719.1 | GCAACAGCACAGUUACUGGAU | 5721 | 820-840 | AUCCAGTAACUGUGCUGUUGCCU | 6497 | 818-840 |
| AD-1708721.1 | AACAGCACAGUUACUGGACAU | 5723 | 1677-1697 | AUGUCCAGUAACUGUGCUGUUGC | 6498 | 1675-1697 |
| AD-1708724.1 | AGCACAGUUACUGGACAACCU | 5725 | 825-845 | AGGUTGTCCAGUAACUGUGCUGU | 6499 | 823-845 |
| AD-1708746.1 | UUGGACACAGCAGGACACCAU | 5727 | 855-875 | AUGGTGTCCUGCUGUGUCCAAGA | 6500 | 853-875 |
| AD-1708748.1 | GGACACAGCAGGACACCAGCU | 5729 | 1712-1732 | AGCUGGTGUCCUGCUGUGUCCAA | 6501 | 1710-1732 |
| AD-1708751.1 | CACAGCAGGACACCAGCAGCU | 5732 | 860-880 | AGCUGCTGGUGUCCUGCUGUGUC | 6502 | 858-880 |
| AD-1708759.1 | GACACCAGCAGCCCUUCCUAU | 173 | 868-888 | AUAGGAAGGGCUGCUGGUGUCCU | 308 | 866-888 |
| AD-1708763.1 | CCAGCAGCCCUUCCUAGAGCU | 5737 | 872-892 | AGCUCUAGGAAGGGCUGCUGGUG | 6202 | 870-892 |
| AD-1708764.1 | CAGCAGCCCUUCCUAGAGCUU | 5738 | 873-893 | AAGCTCTAGGAAGGGCUGCUGGU | 6203 | 871-893 |
| AD-1708766.1 | GCAGCCCUUCCUAGAGCUUAU | 5739 | 1730-1750 | AUAAGCTCUAGGAAGGGCUGCUG | 6503 | 1728-1750 |
| AD-1708771.1 | CCUUCCUAGAGCUUAAGAUCU | 174 | 880-900 | AGAUCUTAAGCUCUAGGAAGGGC | 6504 | 878-900 |
| AD-1708813.1 | UUACGUAGACUUCCAGGAACU | 5744 | 986-1006 | AGUUCCTGGAAGUCUACGUAAUG | 6210 | 984-1006 |
| AD-1708819.1 | AGACUUCCAGGAACUGGGAUU | 5748 | 992-1012 | AAUCCCAGUUCCUGGAAGUCUAC | 6215 | 990-1012 |
| AD-1708842.1 | GUACCAGCUGAAUUACUGCAU | 5755 | 1040-1060 | AUGCAGTAAUUCAGCUGGUACCC | 6505 | 1038-1060 |
| AD-1708844.1 | ACCAGCUGAAUUACUGCAGUU | 5756 | 1042-1062 | AACUGCAGUAAUUCAGCUGGUAC | 6506 | 1040-1062 |
| AD-1708849.1 | CUGAAUUACUGCAGUGGGCAU | 5761 | 1047-1067 | AUGCCCACUGCAGUAAUUCAGCU | 6507 | 1045-1067 |
| AD-1708856.1 | ACUGCAGUGGGCAGUGCCCUU | 182 | 1054-1074 | AAGGGCACUGCCCACUGCAGUAA | 317 | 1052-1074 |
| AD-1708872.1 | CAGGCAUUGCUGCCUCUUUCU | 183 | 1093-1113 | AGAAAGAGGCAGCAAUGCCUGGG | 318 | 1091-1113 |
| AD-1708875.1 | CAUUGCUGCCUCUUUCCAUUU | 5767 | 1097-1117 | AAAUGGAAAGAGGCAGCAAUGCC | 6235 | 1095-1117 |
| AD-1708882.1 | GCCUCUUUCCAUUCUGCCGUU | 5774 | 1104-1124 | AACGGCAGAAUGGAAAGAGGCAG | 6242 | 1102-1124 |
| AD-1708887.1 | UUUCCAUUCUGCCGUCUUCAU | 184 | 1109-1129 | AUGAAGACGGCAGAAUGGAAAGA | 319 | 1107-1129 |
| AD-1708889.1 | UCCAUUCUGCCGUCUUCAGCU | 5780 | 1111-1131 | AGCUGAAGACGGCAGAAUGGAAA | 6249 | 1109-1131 |
| AD-1708890.1 | CCAUUCUGCCGUCUUCAGCCU | 5781 | 1112-1132 | AGGCTGAAGACGGCAGAAUGGAA | 6250 | 1110-1132 |
| AD-1708899.1 | CGUCUUCAGCCUCCUCAAAGU | 185 | 1121-1141 | ACUUTGAGGAGGCUGAAGACGGC | 6254 | 1119-1141 |
| AD-1708901.1 | UCUUCAGCCUCCUCAAAGCCU | 5786 | 1978-1998 | AGGCTUTGAGGAGGCUGAAGACG | 6256 | 1976-1998 |
| AD-1708902.1 | CUUCAGCCUCCUCAAAGCCAU | 5787 | 1979-1999 | AUGGCUTUGAGGAGGCUGAAGAC | 6508 | 1977-1999 |
| AD-1708907.1 | GCCUCCUCAAAGCCAACAAUU | 5791 | 1129-1149 | AAUUGUTGGCUUUGAGGAGGCUG | 6509 | 1127-1149 |
| AD-1708908.1 | CCUCCUCAAAGCCAACAAUCU | 5792 | 1130-1150 | AGAUTGTUGGCUUUGAGGAGGCU | 6510 | 1128-1150 |
| AD-1708911.1 | CCUCAAAGCCAACAAUCCUUU | 186 | 1133-1153 | AAAGGATUGUUGGCUUUGAGGAG | 6265 | 1131-1153 |
| AD-1708921.1 | AACAAUCCUUGGCCUGCCAGU | 5800 | 1143-1163 | ACUGGCAGGCCAAGGAUUGUUGG | 6271 | 1141-1163 |
| AD-1708956.1 | UCUCCUCUACCUGGAUCAUAU | 5811 | 2057-2077 | AUAUGATCCAGGUAGAGGAGAGA | 6511 | 2055-2077 |
| AD-1708957.1 | CUCCUCUACCUGGAUCAUAAU | 5812 | 1203-1223 | AUUATGAUCCAGGUAGAGGAGAG | 6512 | 1201-1223 |
| AD-1708962.1 | CUACCUGGAUCAUAAUGGCAU | 5817 | 2063-2083 | AUGCCATUAUGAUCCAGGUAGAG | 6513 | 2061-2083 |
| AD-1708963.1 | UACCUGGAUCAUAAUGGCAAU | 191 | 1209-1229 | AUUGCCAUUAUGAUCCAGGUAGA | 326 | 1207-1229 |
| AD-1708971.1 | UCAUAAUGGCAAUGUGGUCAU | 5825 | 2072-2092 | AUGACCACAUUGCCAUUAUGAUC | 6514 | 2070-2092 |
| AD-1708974.1 | UAAUGGCAAUGUGGUCAAGAU | 5828 | 1220-1240 | AUCUTGACCACAUUGCCAUUAUG | 6515 | 1218-1240 |
| AD-1708976.1 | AUGGCAAUGUGGUCAAGACGU | 5829 | 1222-1242 | ACGUCUTGACCACAUUGCCAUUA | 6303 | 1220-1242 |
| AD-1708977.1 | UGGCAAUGUGGUCAAGACGGU | 5830 | 2078-2098 | ACCGTCTUGACCACAUUGCCAUU | 6304 | 2076-2098 |
| AD-1708984.1 | GUGGUCAAGACGGAUGUGCCU | 5837 | 2085-2105 | AGGCACAUCCGUCUUGACCACAU | 6516 | 2083-2105 |
| AD-1708986.1 | GGUCAAGACGGAUGUGCCAGU | 5839 | 2087-2107 | ACUGGCACAUCCGUCUUGACCAC | 6313 | 2085-2107 |
| AD-1708990.1 | AAGACGGAUGUGCCAGAUAUU | 193 | 1236-1256 | AAUATCTGGCACAUCCGUCUUGA | 6317 | 1234-1256 |
| AD-1709009.1 | UGGUGGUGGAGGCCUGUGGCU | 5853 | 1255-1275 | AGCCACAGGCCUCCACCACCAUA | 6517 | 1253-1275 |
| AD-1709021.1 | CCUGUGGCUGCAGCUAGCAAU | 5856 | 1267-1287 | AUUGCUAGCUGCAGCCACAGGCC | 6518 | 1265-1287 |
| AD-1709022.1 | CUGUGGCUGCAGCUAGCAAGU | 5857 | 2123-2143 | ACUUGCTAGCUGCAGCCACAGGC | 6333 | 2121-2143 |
| AD-1709026.1 | GGCUGCAGCUAGCAAGAGGAU | 5861 | 1272-1292 | AUCCTCTUGCUAGCUGCAGCCAC | 6519 | 1270-1292 |
| AD-1709028.1 | CUGCAGCUAGCAAGAGGACCU | 5863 | 1274-1294 | AGGUCCTCUUGCUAGCUGCAGCC | 6339 | 1272-1294 |
| AD-1709031.1 | CAGCUAGCAAGAGGACCUGGU | 5865 | 1277-1297 | ACCAGGTCCUCUUGCUAGCUGCA | 6520 | 1275-1297 |
| AD-1709032.1 | GCUUUGGAGUGAAGAGACCAU | 5866 | 2153-2173 | AUGGTCTCUUCACUCCAAAGCCC | 6521 | 2151-2173 |
| AD-1709034.1 | UUUGGAGUGAAGAGACCAAGU | 5867 | 2155-2175 | ACUUGGTCUCUUCACUCCAAAGC | 6522 | 2153-2175 |
| AD-1709038.1 | GAGUGAAGAGACCAAGAUGAU | 5870 | 2159-2179 | AUCATCTUGGUCUCUUCACUCCA | 6523 | 2157-2179 |
| AD-1709041.1 | UGAAGAGACCAAGAUGAAGUU | 5871 | 1307-1327 | AACUTCAUCUUGGUCUCUUCACU | 6349 | 1305-1327 |
| AD-1709044.1 | AGAGACCAAGAUGAAGUUUCU | 198 | 1310-1330 | AGAAACTUCAUCUUGGUCUCUUC | 6351 | 1308-1330 |
| AD-1709052.1 | AGAUGAAGUUUCCCAGGCACU | 5880 | 2173-2193 | AGUGCCTGGGAAACUUCAUCUUG | 6359 | 2171-2193 |
| AD-1709056.1 | GAAGUUUCCCAGGCACAGGGU | 5883 | 1322-1342 | ACCCTGTGCCUGGGAAACUUCAU | 6362 | 1320-1342 |
| AD-1709090.1 | ACCCAACAACCACCUGGCAAU | 201 | 1383-1403 | AUUGCCAGGUGGUUGUUGGGUUG | 336 | 1381-1403 |
| AD-1709097.1 | AACCACCUGGCAAUAUGACUU | 5897 | 1390-1410 | AAGUCATAUUGCCAGGUGGUUGU | 6377 | 1388-1410 |
| AD-1709098.1 | ACCACCUGGCAAUAUGACUCU | 5898 | 2246-2266 | AGAGTCAUAUUGCCAGGUGGUUG | 6378 | 2244-2266 |
| AD-1709100.1 | CACCUGGCAAUAUGACUCACU | 5900 | 1393-1413 | AGUGAGTCAUAUUGCCAGGUGGU | 6524 | 1391-1413 |
| AD-1709102.1 | CCUGGCAAUAUGACUCACUUU | 5902 | 1395-1415 | AAAGTGAGUCAUAUUGCCAGGUG | 6525 | 1393-1415 |
| AD-1709104.1 | UGGCAAUAUGACUCACUUGAU | 5904 | 1397-1417 | AUCAAGTGAGUCAUAUUGCCAGG | 6526 | 1395-1417 |
| AD-1709106.1 | GCAAUAUGACUCACUUGACCU | 5905 | 1399-1419 | AGGUCAAGUGAGUCAUAUUGCCA | 6386 | 1397-1419 |
| AD-1709111.1 | GGACCCAAAUGGGCACUUUCU | 5906 | 1425-1445 | AGAAAGTGCCCAUUUGGGUCCCA | 6387 | 1423-1445 |
| AD-1709120.1 | UGGGCACUUUCUUGUCUGAGU | 5913 | 2289-2309 | ACUCAGACAAGAAAGUGCCCAUU | 6394 | 2287-2309 |
| AD-1709122.1 | GGCACUUUCUUGUCUGAGACU | 5915 | 1436-1456 | AGUCTCAGACAAGAAAGUGCCCA | 6396 | 1434-1456 |
| AD-1709124.1 | CACUUUCUUGUCUGAGACUCU | 5917 | 1438-1458 | AGAGTCTCAGACAAGAAAGUGCC | 6398 | 1436-1458 |
| AD-1709126.1 | CUUUCUUGUCUGAGACUCUGU | 5918 | 1440-1460 | ACAGAGTCUCAGACAAGAAAGUG | 6399 | 1438-1460 |
| AD-1709128.1 | UUCUUGUCUGAGACUCUGGCU | 5920 | 1442-1462 | AGCCAGAGUCUCAGACAAGAAAG | 6401 | 1440-1462 |
| AD-1709130.1 | CUUGUCUGAGACUCUGGCUUU | 5922 | 2299-2319 | AAAGCCAGAGUCUCAGACAAGAA | 6403 | 2297-2319 |
| AD-1709148.1 | UAUUCCAGGUUGGCUGAUGUU | 5923 | 1463-1483 | AACATCAGCCAACCUGGAAUAAG | 6404 | 1461-1483 |
| AD-1709151.1 | UCCAGGUUGGCUGAUGUGUUU | 206 | 1466-1486 | AAACACAUCAGCCAACCUGGAAU | 341 | 1464-1486 |
| AD-1709201.1 | CUCUCUCCUCUACCUGGAUCU | 5808 | 1199-1219 | AGAUCCAGGUAGAGGAGAGAGAG | 6280 | 1197-1219 |
| AD-1709237.1 | GAUUUCCUGCCCUAAGUCCUU | 210 | 1534-1554 | AAGGACTUAGGGCAGGAAAUCAU | 6409 | 1532-1554 |
| AD-1709239.1 | UUUCCUGCCCUAAGUCCUGUU | 5928 | 1536-1556 | AACAGGACUUAGGGCAGGAAAUC | 6410 | 1534-1556 |
| AD-1709253.1 | AGAAGAUGUCAGGGACUAGGU | 5929 | 1557-1577 | ACCUAGTCCCUGACAUCUUCUCA | 6411 | 1555-1577 |
| AD-1709254.1 | AAGAUGUCAGGGACUAGGGAU | 5931 | 1559-1579 | AUCCCUAGUCCCUGACAUCUUCU | 6527 | 1557-1579 |
| AD-1709298.1 | AGGAGGAAGCAGAUAGAUGGU | 5936 | 1647-1667 | ACCATCTAUCUGCUUCCUCCUCC | 6418 | 1645-1667 |
| AD-1709300.1 | GAGGAAGCAGAUAGAUGGUCU | 5937 | 1649-1669 | AGACCATCUAUCUGCUUCCUCCU | 6420 | 1647-1669 |
| AD-1709301.1 | AGGAAGCAGAUAGAUGGUCCU | 5938 | 2499-2519 | AGGACCAUCUAUCUGCUUCCUCC | 6528 | 2497-2519 |
| AD-1709304.1 | AAGCAGAUAGAUGGUCCAGCU | 5941 | 2502-2522 | AGCUGGACCAUCUAUCUGCUUCC | 6424 | 2500-2522 |
| AD-1709307.1 | CAGAUAGAUGGUCCAGCAGGU | 5944 | 1656-1676 | ACCUGCTGGACCAUCUAUCUGCU | 6427 | 1654-1676 |
| AD-1709310.1 | AUAGAUGGUCCAGCAGGCUUU | 5947 | 1659-1679 | AAAGCCTGCUGGACCAUCUAUCU | 6430 | 1657-1679 |
| AD-1709314.1 | AUGGUCCAGCAGGCUUGAAGU | 5951 | 1663-1683 | ACUUCAAGCCUGCUGGACCAUCU | 6434 | 1661-1683 |
| AD-1709315.1 | UGGUCCAGCAGGCUUGAAGCU | 5952 | 2513-2533 | AGCUTCAAGCCUGCUGGACCAUC | 6529 | 2511-2533 |
| AD-1709317.1 | GUCCAGCAGGCUUGAAGCAGU | 5954 | 1666-1686 | ACUGCUTCAAGCCUGCUGGACCA | 6437 | 1664-1686 |
| AD-1709372.1 | GGUCAAGAGGGAGAUGGGCAU | 5957 | 2584-2604 | AUGCCCAUCUCCCUCUUGACCUU | 6530 | 2582-2604 |
| AD-1709390.1 | GCGCUGAGGGAGGAUGCUUAU | 5959 | 1757-1777 | AUAAGCAUCCUCCCUCAGCGCCU | 6531 | 1755-1777 |
| AD-1709410.1 | GCACUAAGCCUAAGAAGUUCU | 5961 | 1811-1831 | AGAACUTCUUAGGCUUAGUGCCU | 6445 | 1809-1831 |
| AD-1709411.1 | CACUAAGCCUAAGAAGUUCCU | 5962 | 1812-1832 | AGGAACTUCUUAGGCUUAGUGCC | 6446 | 1810-1832 |
| AD-1709429.1 | CAGGACCCACUGGGAGACAAU | 5964 | 1850-1870 | AUUGTCTCCCAGUGGGUCCUGUC | 6532 | 1848-1870 |
| AD-1709431.1 | GGACCCACUGGGAGACAAGCU | 5966 | 2701-2721 | AGCUTGTCUCCCAGUGGGUCCUG | 6450 | 2699-2721 |
| AD-1709433.1 | ACCCACUGGGAGACAAGCAUU | 5968 | 1854-1874 | AAUGCUTGUCUCCCAGUGGGUCC | 6452 | 1852-1874 |
| AD-1709434.1 | CCCACUGGGAGACAAGCAUUU | 5969 | 1855-1875 | AAAUGCTUGUCUCCCAGUGGGUC | 6533 | 1853-1875 |
| AD-1709442.1 | GAGACAAGCAUUUAUACUUUU | 5975 | 2712-2732 | AAAAGUAUAAAUGCUUGUCUCCC | 6534 | 2710-2732 |
| AD-1709443.1 | AGACAAGCAUUUAUACUUUCU | 5976 | 1864-1884 | AGAAAGTAUAAAUGCUUGUCUCC | 6461 | 1862-1884 |
| AD-1709502.1 | AGGUCAAGAGGGAGAUGGGCU | 5956 | 1734-1754 | AGCCCATCUCCCUCUUGACCUUC | 6439 | 1732-1754 |
| AD-1711741.1 | CAAGCACAGCUAUCCAUCAGU | 5542 | 27-47 | ACUGAUGGAUAGCUGUGCUUGCU | 6535 | 25-47 |
| AD-1711742.1 | AUCUACUUUCAGCCUUCCUGU | 5562 | 50-70 | ACAGGAAGGCUGAAAGUAGAUCU | 6536 | 48-70 |
| AD-1711743.1 | AGCCAAGCAGCAAAUCCUGGU | 5616 | 368-388 | ACCAGGAUUUGCUGCUUGGCUCU | 6537 | 366-388 |
| AD-1711744.1 | ACCAGUCGUCCCAGAAUAACU | 66 | 402-422 | AGUUAUTCUGGGACGACUGGUCU | 58 | 400-422 |
| AD-1711745.1 | CCUGGCACUCUUUGCUUGAGU | 5673 | 633-653 | ACUCAAGCAAAGAGUGCCAGGCU | 6538 | 631-653 |
| AD-1711746.1 | CUGGCACUCUUUGCUUGAGGU | 5674 | 634-654 | ACCUCAAGCAAAGAGUGCCAGCU | 6539 | 632-654 |
| AD-1711747.1 | CUUUGCUUGAGGAUCUUCCGU | 70 | 642-662 | ACGGAAGAUCCTCAAGCAAAGCU | 6540 | 640-662 |
| AD-1711748.1 | UUUGCUUGAGGAUCUUCCGAU | 5680 | 643-663 | ATCGGAAGAUCCUCAAGCAAACU | 6541 | 641-663 |
| AD-1711749.1 | UUGCUUGAGGAUCUUCCGAUU | 5681 | 644-664 | AAUCGGAAGAUCCUCAAGCAACU | 6542 | 642-664 |
| AD-1711750.1 | UGCUUGAGGAUCUUCCGAUGU | 5682 | 645-665 | ACAUCGGAAGATCCUCAAGCACU | 6543 | 643-665 |
| AD-1711751.1 | GCUUGAGGAUCUUCCGAUGGU | 5683 | 646-666 | ACCATCGGAAGAUCCUCAAGCCU | 6544 | 644-666 |
| AD-1711752.1 | AGCACCACAUCACCAACCUGU | 5690 | 709-729 | ACAGGUTGGUGAUGUGGUGCUCU | 6545 | 707-729 |
| AD-1711753.1 | ACGUAGACUUCCAGGAACUGU | 5745 | 988-1008 | ACAGTUCCUGGAAGUCUACGUCU | 6546 | 986-1008 |
| AD-1711754.1 | CGUAGACUUCCAGGAACUGGU | 5746 | 989-1009 | ACCAGUTCCUGGAAGUCUACGCU | 6547 | 987-1009 |
| AD-1711755.1 | GACUUCCAGGAACUGGGAUGU | 5749 | 993-1013 | ACAUCCCAGUUCCUGGAAGUCCU | 6548 | 991-1013 |
| AD-1711756.1 | UGCUGCCUCUUUCCAUUCUGU | 5770 | 1100-1120 | ACAGAATGGAAAGAGGCAGCACU | 6549 | 1098-1120 |
| AD-1711757.1 | GCUGCCUCUUUCCAUUCUGCU | 5771 | 1101-1121 | AGCAGAAUGGAAAGAGGCAGCCU | 6550 | 1099-1121 |
| AD-1711758.1 | CUGCCUCUUUCCAUUCUGCCU | 5772 | 1102-1122 | AGGCAGAAUGGAAAGAGGCAGCU | 6551 | 1100-1122 |
| AD-1711759.1 | UUCCAUUCUGCCGUCUUCAGU | 5779 | 1110-1130 | ACUGAAGACGGCAGAAUGGAACU | 6552 | 1108-1130 |
| AD-1711760.1 | CCUCAAAGCCAACAAUCCUUU | 186 | 1133-1153 | AAAGGATUGUUGGCUUUGAGGCU | 6553 | 1131-1153 |
| AD-1711761.1 | CUCAAAGCCAACAAUCCUUGU | 5795 | 1134-1154 | ACAAGGAUUGUTGGCUUUGAGCU | 6554 | 1132-1154 |
| AD-1711762.1 | UGUGUCCCUACUGCCCGAAGU | 5805 | 1173-1193 | ACUUCGGGCAGTAGGGACACACU | 6555 | 1171-1193 |
| AD-1711763.1 | GUGUCCCUACUGCCCGAAGGU | 189 | 1174-1194 | ACCUTCGGGCAGUAGGGACACCU | 6556 | 1172-1194 |
| AD-1711764.1 | CCUCUACCUGGAUCAUAAUGU | 5814 | 1205-1225 | ACAUTATGAUCCAGGUAGAGGCU | 6557 | 1203-1225 |
| AD-1711765.1 | CUCUACCUGGAUCAUAAUGGU | 5815 | 1206-1226 | ACCATUAUGAUCCAGGUAGAGCU | 6558 | 1204-1226 |
| AD-1711766.1 | GGAUCAUAAUGGCAAUGUGGU | 5822 | 1214-1234 | ACCACATUGCCAUUAUGAUCCCU | 6559 | 1212-1234 |
| AD-1711767.1 | GAUCAUAAUGGCAAUGUGGUU | 5823 | 1215-1235 | AACCACAUUGCCAUUAUGAUCCU | 6560 | 1213-1235 |
| AD-1711768.1 | AUGGCAAUGUGGUCAAGACGU | 5829 | 1222-1242 | ACGUCUTGACCACAUUGCCAUCU | 6561 | 1220-1242 |
| AD-1711769.1 | GGCAAUGUGGUCAAGACGGAU | 5831 | 1224-1244 | ATCCGUCUUGACCACAUUGCCCU | 6562 | 1222-1244 |
| AD-1711770.1 | GCAAUGUGGUCAAGACGGAUU | 5832 | 1225-1245 | AAUCCGTCUUGACCACAUUGCCU | 6563 | 1223-1245 |
| AD-1711771.1 | UGCCAGAUAUGGUGGUGGAGU | 5851 | 1246-1266 | ACUCCACCACCAUAUCUGGCACU | 6564 | 1244-1266 |
| AD-1711772.1 | UGGCUGCAGCUAGCAAGAGGU | 5860 | 1271-1291 | ACCUCUTGCUAGCUGCAGCCACU | 6565 | 1269-1291 |
| AD-1711773.1 | GGAGUGAAGAGACCAAGAUGU | 5869 | 1303-1323 | ACAUCUTGGUCTCUUCACUCCCU | 6566 | 1301-1323 |
| AD-1711774.1 | AAGAGACCAAGAUGAAGUUUU | 5872 | 1309-1329 | AAAACUTCAUCTUGGUCUCUUCU | 6567 | 1307-1329 |
| AD-1711775.1 | UUCCAGGUUGGCUGAUGUGUU | 5925 | 1465-1485 | AACACATCAGCCAACCUGGAACU | 6568 | 1463-1485 |
| AD-1711776.1 | CCAGGUUGGCUGAUGUGUUGU | 5926 | 1467-1487 | ACAACACAUCAGCCAACCUGGCU | 6569 | 1465-1487 |
| AD-1711777.1 | CAGGUUGGCUGAUGUGUUGGU | 5927 | 1468-1488 | ACCAACACAUCAGCCAACCUGCU | 6570 | 1466-1488 |
| AD-1711778.1 | GUCCAGCAGGCUUGAAGCAGU | 5954 | 1666-1686 | ACUGCUTCAAGCCUGCUGGACCU | 6571 | 1664-1686 |
| AD-1711779.1 | GGAGACAAGCAUUUAUACUUU | 5974 | 1862-1882 | AAAGTATAAAUGCUUGUCUCCCU | 6572 | 1860-1882 |

TABLE 20
Modified Sense and Antisense Strand Sequences of INHBE dsRNA Agents

| | | SEQ | | SEQ | | SEQ |
|---|---|---|---|---|---|---|
| | | ID | | ID | | ID |
| Duplex Name | Sense Strand Sequence 5′ to 3′ | NO. | Antisense Strand Sequence 5′ to 3′ | NO. | mRNA target sequence | NO. |
| AD-1706265.1 | gscscagacaUfGfAfgcugugagguL96 | 6573 | asdCscudCadCagcudCaUfgucuggcsusa | 7233 | UAGCCAGACAUGAGCUGUGAGGG | 7944 |
| AD-1706266.1 | cscsagacauGfAfGfcugugaggguL96 | 6574 | asdCsccdTcdAcagcdTcAfugucuggscsu | 7234 | AGCCAGACAUGAGCUGUGAGGGU | 7945 |
| AD-1706268.1 | asgsacaugaGfCfUfgugagggucuL96 | 6575 | asdGsacdCcdTcacadGcUfcaugucusgsg | 7235 | CCAGACAUGAGCUGUGAGGGUCA | 7946 |
| AD-1706269.1 | gsascaugagCfUfGfugagggucauL96 | 6576 | asdTsgadCcdCucacdAgCfucaugucsusg | 7236 | CAGACAUGAGCUGUGAGGGUCAA | 7947 |
| AD-1706270.1 | ascsaugagcUfGfUfgagggucaauL96 | 6577 | asdTsugdAcdCcucadCaGfcucauguscsu | 7237 | AGACAUGAGCUGUGAGGGUCAAG | 7948 |
| AD-1706271.1 | csasugagcuGfUfGfagggucaaguL96 | 6578 | asdCsuudGadCccucdAcAfgcucaugsusc | 7238 | GACAUGAGCUGUGAGGGUCAAGC | 7949 |
| AD-1706272.1 | asusgagcugUfGfAfgggucaagcuL96 | 6579 | asdGscudTgdAcccudCaCfagcucausgsu | 7239 | ACAUGAGCUGUGAGGGUCAAGCA | 7950 |
| AD-1706273.1 | usgsagcuguGfAfGfggucaagcauL96 | 6580 | asdTsgcdTudGacccdTcAfcagcucasusg | 7240 | CAUGAGCUGUGAGGGUCAAGCAC | 7951 |
| AD-1706274.1 | gsasgcugugAfGfGfgucaagcacuL96 | 6581 | asdGsugdCudTgaccdCuCfacagcucsasu | 7241 | AUGAGCUGUGAGGGUCAAGCACA | 7952 |
| AD-1706275.1 | asgscugugaGfGfGfucaagcacauL96 | 6582 | asdTsgudGcdTugacdCcUfcacagcuscsa | 7242 | UGAGCUGUGAGGGUCAAGCACAG | 7953 |
| AD-1706276.1 | gscsugugagGfGfUfcaagcacaguL96 | 6583 | asdCsugdTgdCuugadCcCfucacagcsusc | 7243 | GAGCUGUGAGGGUCAAGCACAGC | 7954 |
| AD-1706277.1 | csusgugaggGfUfCfaagcacagcuL96 | 6584 | asdGscudGudGcuugdAcCfcucacagscsu | 7244 | AGCUGUGAGGGUCAAGCACAGCU | 7955 |
| AD-1706278.1 | usgsugagggUfCfAfagcacagcuuL96 | 6585 | asdAsgcdTgdTgcuudGaCfccucacasgsc | 7245 | GCUGUGAGGGUCAAGCACAGCUA | 7956 |
| AD-1706279.1 | gsusgaggguCfAfAfgcacagcuauL96 | 6586 | asdTsagdCudGugcudTgAfcccucacsasg | 7246 | CUGUGAGGGUCAAGCACAGCUAU | 7957 |
| AD-1706280.1 | usgsagggucAfAfGfcacagcuauuL96 | 6587 | asdAsuadGcdTgugcdTuGfacccucascsa | 7247 | UGUGAGGGUCAAGCACAGCUAUC | 7958 |
| AD-1706281.1 | gsasgggucaAfGfCfacagcuaucuL96 | 6588 | asdGsaudAgdCugugdCuUfgacccucsasc | 7248 | GUGAGGGUCAAGCACAGCUAUCC | 7959 |
| AD-1706282.1 | asgsggucaaGfCfAfcagcuauccuL96 | 6589 | asdGsgadTadGcugudGcUfugacccuscsa | 7249 | UGAGGGUCAAGCACAGCUAUCCA | 7960 |
| AD-1706283.1 | gsgsgucaagCfAfCfagcuauccauL96 | 6590 | asdTsggdAudAgcugdTgCfuugacccsusc | 7250 | GAGGGUCAAGCACAGCUAUCCAU | 7961 |
| AD-1706287.1 | csasagcacaGfCfUfauccaucaguL96 | 6591 | asdCsugdAudGgauadGcUfgugcuugsasc | 7251 | GUCAAGCACAGCUAUCCAUCAGA | 7962 |
| AD-1706288.1 | asasgcacagCfUfAfuccaucagauL96 | 6592 | asdTscudGadTggaudAgCfugugcuusgsa | 7252 | UCAAGCACAGCUAUCCAUCAGAU | 7963 |
| AD-1706290.1 | gscsacagcuAfUfCfcaucagauguL96 | 6593 | asdCsaudCudGauggdAuAfgcugugcsusu | 7253 | AAGCACAGCUAUCCAUCAGAUGA | 7964 |
| AD-1706291.1 | csascagcuaUfCfCfaucagaugauL96 | 6594 | asdTscadTcdTgaugdGaUfagcugugscsu | 7254 | AGCACAGCUAUCCAUCAGAUGAU | 7965 |
| AD-1706292.1 | ascsagcuauCfCfAfucagaugauuL96 | 6595 | asdAsucdAudCugaudGgAfuagcugusgsc | 7255 | GCACAGCUAUCCAUCAGAUGAUC | 7966 |
| AD-1706293.1 | csasgcuaucCfAfUfcagaugaucuL96 | 6596 | asdGsaudCadTcugadTgGfauagcugsusg | 7256 | CACAGCUAUCCAUCAGAUGAUCU | 7967 |
| AD-1706294.1 | asgscuauccAfUfCfagaugaucuuL96 | 6597 | asdAsgadTcdAucugdAuGfgauagcusgsu | 7257 | ACAGCUAUCCAUCAGAUGAUCUA | 7968 |
| AD-1706295.1 | gscsuauccaUfCfAfgaugaucuauL96 | 6598 | asdTsagdAudCaucudGaUfggauagcsusg | 7258 | CAGCUAUCCAUCAGAUGAUCUAC | 7969 |
| AD-1706296.1 | csusauccauCfAfGfaugaucuacuL96 | 6599 | asdGsuadGadTcaucdTgAfuggauagscsu | 7259 | AGCUAUCCAUCAGAUGAUCUACU | 7970 |
| AD-1706297.1 | usasuccaucAfGfAfugaucuacuuL96 | 6600 | asdAsgudAgdAucaudCuGfauggauasgsc | 7260 | GCUAUCCAUCAGAUGAUCUACUU | 7971 |
| AD-1706298.1 | asusccaucaGfAfUfgaucuacuuuL96 | 6601 | asdAsagdTadGaucadTcUfgauggausasg | 7261 | CUAUCCAUCAGAUGAUCUACUUU | 7972 |
| AD-1706299.1 | uscscaucagAfUfGfaucuacuuuuL96 | 6602 | asdAsaadGudAgaucdAuCfugauggasusa | 7262 | UAUCCAUCAGAUGAUCUACUUUC | 7973 |
| AD-1706300.1 | cscsaucagaUfGfAfucuacuuucuL96 | 6603 | asdGsaadAgdTagaudCaUfcugauggsasu | 7263 | AUCCAUCAGAUGAUCUACUUUCA | 7974 |
| AD-1706301.1 | csasucagauGfAfUfcuacuuucauL96 | 6604 | asdTsgadAadGuagadTcAfucugaugsgsa | 7264 | UCCAUCAGAUGAUCUACUUUCAG | 7975 |
| AD-1706302.1 | asuscagaugAfUfCfuacuuucaguL96 | 6605 | asdCsugdAadAguagdAuCfaucugausgsg | 7265 | CCAUCAGAUGAUCUACUUUCAGC | 7976 |
| AD-1706303.1 | uscsagaugaUfCfUfacuuucagcuL96 | 6606 | asdGscudGadAaguadGaUfcaucugasusg | 7266 | CAUCAGAUGAUCUACUUUCAGCC | 7977 |
| AD-1706304.1 | csasgaugauCfUfAfcuuucagccuL96 | 6607 | asdGsgcdTgdAaagudAgAfucaucugsasu | 7267 | AUCAGAUGAUCUACUUUCAGCCU | 7978 |
| AD-1706305.1 | asgsaugaucUfAfCfuuucagccuuL96 | 6608 | asdAsggdCudGaaagdTaGfaucaucusgsa | 7268 | UCAGAUGAUCUACUUUCAGCCUU | 7979 |
| AD-1706306.1 | gsasugaucuAfCfUfuucagccuuuL96 | 6609 | asdAsagdGcdTgaaadGuAfgaucaucsusg | 7269 | CAGAUGAUCUACUUUCAGCCUUC | 7980 |
| AD-1706307.1 | asusgaucuaCfUfUfucagccuucuL96 | 6610 | asdGsaadGgdCugaadAgUfagaucauscsu | 7270 | AGAUGAUCUACUUUCAGCCUUCC | 7981 |
| AD-1706308.1 | usgsaucuacUfUfUfcagccuuccuL96 | 6611 | asdGsgadAgdGcugadAaGfuagaucasusc | 7271 | GAUGAUCUACUUUCAGCCUUCCU | 7982 |
| AD-1706309.1 | gsasucuacuUfUfCfagccuuccuuL96 | 6612 | asdAsggdAadGgcugdAaAfguagaucsasu | 7272 | AUGAUCUACUUUCAGCCUUCCUG | 7983 |
| AD-1706310.1 | asuscuacuuUfCfAfgccuuccuguL96 | 6613 | asdCsagdGadAggcudGaAfaguagauscsa | 7273 | UGAUCUACUUUCAGCCUUCCUGA | 7984 |
| AD-1706311.1 | uscsuacuuuCfAfGfccuuccugauL96 | 6614 | asdTscadGgdAaggcdTgAfaaguagasusc | 7274 | GAUCUACUUUCAGCCUUCCUGAG | 7985 |
| AD-1706312.1 | csusacuuucAfGfCfcuuccugaguL96 | 6615 | asdCsucdAgdGaaggdCuGfaaaguagsasu | 7275 | AUCUACUUUCAGCCUUCCUGAGU | 7986 |
| AD-1706313.1 | usascuuucaGfCfCfuuccugaguuL96 | 6616 | asdAscudCadGgaagdGcUfgaaaguasgsa | 7276 | UCUACUUUCAGCCUUCCUGAGUC | 7987 |
| AD-1706314.1 | ascsuuucagCfCfUfuccugagucuL96 | 6617 | asdGsacdTcdAggaadGgCfugaaagusasg | 7277 | CUACUUUCAGCCUUCCUGAGUCC | 7988 |
| AD-1706318.1 | uscsagccuuCfCfUfgagucccaguL96 | 6618 | asdCsugdGgdAcucadGgAfaggcugasasa | 7278 | UUUCAGCCUUCCUGAGUCCCAGA | 7989 |
| AD-1706337.1 | gsascaauagAfAfGfacagguggcuL96 | 6619 | asdGsccdAcdCugucdTuCfuauugucsusg | 7279 | CAGACAAUAGAAGACAGGUGGCU | 7990 |
| AD-1706338.1 | ascsaauagaAfGfAfcagguggcuuL96 | 6620 | asdAsgcdCadCcugudCuUfcuauuguscsu | 7280 | AGACAAUAGAAGACAGGUGGCUG | 7991 |
| AD-1706380.1 | gsusggcaguGfGfUfgucugcuguuL96 | 6621 | asdAscadGcdAgacadCcAfcugccacsasc | 7281 | GUGUGGCAGUGGUGUCUGCUGUC | 7992 |
| AD-1706381.1 | usgsgcagugGfUfGfucugcugucuL96 | 6622 | asdGsacdAgdCagacdAcCfacugccascsa | 7282 | UGUGGCAGUGGUGUCUGCUGUCA | 7993 |
| AD-1706382.1 | gsgscaguggUfGfUfcugcugucauL96 | 6623 | asdTsgadCadGcagadCaCfcacugccsasc | 7283 | GUGGCAGUGGUGUCUGCUGUCAC | 7994 |
| AD-1706383.1 | gscsagugguGfUfCfugcugucacuL96 | 6624 | asdGsugdAcdAgcagdAcAfccacugcscsa | 7284 | UGGCAGUGGUGUCUGCUGUCACU | 7995 |
| AD-1706384.1 | csasguggugUfCfUfgcugucacuuL96 | 6625 | asdAsgudGadCagcadGaCfaccacugscsc | 7285 | GGCAGUGGUGUCUGCUGUCACUG | 7996 |
| AD-1706385.1 | asgsugguguCfUfGfcugucacuguL96 | 6626 | asdCsagdTgdAcagcdAgAfcaccacusgsc | 7286 | GCAGUGGUGUCUGCUGUCACUGU | 7997 |
| AD-1706386.1 | gsusggugucUfGfCfugucacuguuL96 | 6627 | asdAscadGudGacagdCaGfacaccacsusg | 7287 | CAGUGGUGUCUGCUGUCACUGUG | 7998 |
| AD-1706387.1 | usgsgugucuGfCfUfgucacuguguL96 | 6628 | asdCsacdAgdTgacadGcAfgacaccascsu | 7288 | AGUGGUGUCUGCUGUCACUGUGC | 7999 |
| AD-1706388.1 | gsgsugucugCfUfGfucacugugcuL96 | 6629 | asdGscadCadGugacdAgCfagacaccsasc | 7289 | GUGGUGUCUGCUGUCACUGUGCC | 8000 |
| AD-1706407.1 | csasgacucaAfCfAfgacggagcauL96 | 6630 | asdTsgcdTcdCgucudGuUfgagucugsasu | 7290 | AUCAGACUCAACAGACGGAGCAA | 8001 |
| AD-1706408.1 | asgsacucaaCfAfGfacggagcaauL96 | 6631 | asdTsugdCudCcgucdTgUfugagucusgsa | 7291 | UCAGACUCAACAGACGGAGCAAC | 8002 |
| AD-1706409.1 | gsascucaacAfGfAfcggagcaacuL96 | 6632 | asdGsuudGcdTccgudCuGfuugagucsusg | 7292 | CAGACUCAACAGACGGAGCAACU | 8003 |
| AD-1706410.1 | ascsucaacaGfAfCfggagcaacuuL96 | 6633 | asdAsgudTgdCuccgdTcUfguugaguscsu | 7293 | AGACUCAACAGACGGAGCAACUG | 8004 |
| AD-1706411.1 | csuscaacagAfCfGfgagcaacuguL96 | 6634 | asdCsagdTudGcuccdGuCfuguugagsusc | 7294 | GACUCAACAGACGGAGCAACUGC | 8005 |
| AD-1706412.1 | uscsaacagaCfGfGfagcaacugcuL96 | 6635 | asdGscadGudTgcucdCgUfcuguugasgsu | 7295 | ACUCAACAGACGGAGCAACUGCC | 8006 |
| AD-1706413.1 | csasacagacGfGfAfgcaacugccuL96 | 6636 | asdGsgcdAgdTugcudCcGfucuguugsasg | 7296 | CUCAACAGACGGAGCAACUGCCA | 8007 |
| AD-1706414.1 | asascagacgGfAfGfcaacugccauL96 | 6637 | asdTsggdCadGuugcdTcCfgucuguusgsa | 7297 | UCAACAGACGGAGCAACUGCCAU | 8008 |
| AD-1706415.1 | ascsagacggAfGfCfaacugccauuL96 | 6638 | asdAsugdGcdAguugdCuCfcgucugususg | 7298 | CAACAGACGGAGCAACUGCCAUC | 8009 |
| AD-1706416.1 | csasgacggaGfCfAfacugccaucuL96 | 6639 | asdGsaudGgdCaguudGcUfccgucugsusu | 7299 | AACAGACGGAGCAACUGCCAUCC | 8010 |
| AD-1706417.1 | asgsacggagCfAfAfcugccauccuL96 | 6640 | asdGsgadTgdGcagudTgCfuccgucusgsu | 7300 | ACAGACGGAGCAACUGCCAUCCG | 8011 |
| AD-1706418.1 | gsascggagcAfAfCfugccauccguL96 | 6641 | asdCsggdAudGgcagdTuGfcuccgucsusg | 7301 | CAGACGGAGCAACUGCCAUCCGA | 8012 |
| AD-1706419.1 | ascsggagcaAfCfUfgccauccgauL96 | 6642 | asdTscgdGadTggcadGuUfgcuccguscsu | 7302 | AGACGGAGCAACUGCCAUCCGAG | 8013 |
| AD-1706420.1 | csgsgagcaaCfUfGfccauccgaguL96 | 6643 | asdCsucdGgdAuggcdAgUfugcuccgsusc | 7303 | GACGGAGCAACUGCCAUCCGAGG | 8014 |
| AD-1706421.1 | gsgsagcaacUfGfCfcauccgagguL96 | 6644 | asdCscudCgdGauggdCaGfuugcuccsgsu | 7304 | ACGGAGCAACUGCCAUCCGAGGC | 8015 |
| AD-1706423.1 | asgscaacugCfCfAfuccgaggcuuL96 | 6645 | asdAsgcdCudCggaudGgCfaguugcuscsc | 7305 | GGAGCAACUGCCAUCCGAGGCUC | 8016 |
| AD-1706424.1 | gscsaacugcCfAfUfccgaggcucuL96 | 6646 | asdGsagdCcdTcggadTgGfcaguugcsusc | 7306 | GAGCAACUGCCAUCCGAGGCUCC | 8017 |
| AD-1706425.1 | csasacugccAfUfCfcgaggcuccuL96 | 6647 | asdGsgadGcdCucggdAuGfgcaguugscsu | 7307 | AGCAACUGCCAUCCGAGGCUCCU | 8018 |
| AD-1706520.1 | csasagcagaAfCfGfagcucugguuL96 | 6648 | asdAsccdAgdAgcucdGuUfcugcuugsgsg | 7308 | CCCAAGCAGAACGAGCUCUGGUG | 8019 |
| AD-1706521.1 | asasgcagaaCfGfAfgcucugguguL96 | 6649 | asdCsacdCadGagcudCgUfucugcuusgsg | 7309 | CCAAGCAGAACGAGCUCUGGUGC | 8020 |
| AD-1706522.1 | asgscagaacGfAfGfcucuggugcuL96 | 6650 | asdGscadCcdAgagcdTcGfuucugcususg | 7310 | CAAGCAGAACGAGCUCUGGUGCU | 8021 |
| AD-1706523.1 | gscsagaacgAfGfCfucuggugcuuL96 | 6651 | asdAsgcdAcdCagagdCuCfguucugcsusu | 7311 | AAGCAGAACGAGCUCUGGUGCUG | 8022 |
| AD-1706524.1 | csasgaacgaGfCfUfcuggugcuguL96 | 6652 | asdCsagdCadCcagadGcUfcguucugscsu | 7312 | AGCAGAACGAGCUCUGGUGCUGG | 8023 |
| AD-1706525.1 | asgsaacgagCfUfCfuggugcugguL96 | 6653 | asdCscadGcdAccagdAgCfucguucusgsc | 7313 | GCAGAACGAGCUCUGGUGCUGGA | 8024 |
| AD-1706526.1 | gsasacgagcUfCfUfggugcuggauL96 | 6654 | asdTsccdAgdCaccadGaGfcucguucsusg | 7314 | CAGAACGAGCUCUGGUGCUGGAG | 8025 |
| AD-1706527.1 | asascgagcuCfUfGfgugcuggaguL96 | 6655 | asdCsucdCadGcaccdAgAfgcucguuscsu | 7315 | AGAACGAGCUCUGGUGCUGGAGC | 8026 |
| AD-1706528.1 | ascsgagcucUfGfGfugcuggagcuL96 | 6656 | asdGscudCcdAgcacdCaGfagcucgususc | 7316 | GAACGAGCUCUGGUGCUGGAGCU | 8027 |
| AD-1706530.1 | gsasgcucugGfUfGfcuggagcuauL96 | 6657 | asdTsagdCudCcagcdAcCfagagcucsgsu | 7317 | ACGAGCUCUGGUGCUGGAGCUAG | 8028 |
| AD-1706532.1 | gscsucugguGfCfUfggagcuagcuL96 | 6658 | asdGscudAgdCuccadGcAfccagagcsusc | 7318 | GAGCUCUGGUGCUGGAGCUAGCC | 8029 |
| AD-1706533.1 | csuscuggugCfUfGfgagcuagccuL96 | 6659 | asdGsgcdTadGcuccdAgCfaccagagscsu | 7319 | AGCUCUGGUGCUGGAGCUAGCCA | 8030 |
| AD-1706534.1 | uscsuggugcUfGfGfagcuagccauL96 | 6660 | asdTsggdCudAgcucdCaGfcaccagasgsc | 7320 | GCUCUGGUGCUGGAGCUAGCCAA | 8031 |
| AD-1706535.1 | csusggugcuGfGfAfgcuagccaauL96 | 6661 | asdTsugdGcdTagcudCcAfgcaccagsasg | 7321 | CUCUGGUGCUGGAGCUAGCCAAG | 8032 |
| AD-1706536.1 | usgsgugcugGfAfGfcuagccaaguL96 | 6662 | asdCsuudGgdCuagcdTcCfagcaccasgsa | 7322 | UCUGGUGCUGGAGCUAGCCAAGC | 8033 |
| AD-1706537.1 | gsgsugcuggAfGfCfuagccaagcuL96 | 6663 | asdGscudTgdGcuagdCuCfcagcaccsasg | 7323 | CUGGUGCUGGAGCUAGCCAAGCA | 8034 |
| AD-1706538.1 | gsusgcuggaGfCfUfagccaagcauL96 | 6664 | asdTsgcdTudGgcuadGcUfccagcacscsa | 7324 | UGGUGCUGGAGCUAGCCAAGCAG | 8035 |
| AD-1706539.1 | usgscuggagCfUfAfgccaagcaguL96 | 6665 | asdCsugdCudTggcudAgCfuccagcascsc | 7325 | GGUGCUGGAGCUAGCCAAGCAGC | 8036 |
| AD-1706543.1 | gsgsagcuagCfCfAfagcagcaaauL96 | 6666 | asdTsuudGcdTgcuudGgCfuagcuccsasg | 7326 | CUGGAGCUAGCCAAGCAGCAAAU | 8037 |
| AD-1706544.1 | gsasgcuagcCfAfAfgcagcaaauuL96 | 6667 | asdAsuudTgdCugcudTgGfcuagcucscsa | 7327 | UGGAGCUAGCCAAGCAGCAAAUC | 8038 |
| AD-1706545.1 | asgscuagccAfAfGfcagcaaaucuL96 | 6668 | asdGsaudTudGcugcdTuGfgcuagcuscsc | 7328 | GGAGCUAGCCAAGCAGCAAAUCC | 8039 |
| AD-1706546.1 | gscsuagccaAfGfCfagcaaauccuL96 | 6669 | asdGsgadTudTgcugdCuUfggcuagcsusc | 7329 | GAGCUAGCCAAGCAGCAAAUCCU | 8040 |
| AD-1706547.1 | csusagccaaGfCfAfgcaaauccuuL96 | 6670 | asdAsggdAudTugcudGcUfuggcuagscsu | 7330 | AGCUAGCCAAGCAGCAAAUCCUG | 8041 |
| AD-1706548.1 | usasgccaagCfAfGfcaaauccuguL96 | 6671 | asdCsagdGadTuugcdTgCfuuggcuasgsc | 7331 | GCUAGCCAAGCAGCAAAUCCUGG | 8042 |
| AD-1706549.1 | asgsccaagcAfGfCfaaauccugguL96 | 6672 | asdCscadGgdAuuugdCuGfcuuggcusasg | 7332 | CUAGCCAAGCAGCAAAUCCUGGA | 8043 |
| AD-1706550.1 | gscscaagcaGfCfAfaauccuggauL96 | 6673 | asdTsccdAgdGauuudGcUfgcuuggcsusa | 7333 | UAGCCAAGCAGCAAAUCCUGGAU | 8044 |
| AD-1706578.1 | ascscugaccAfGfUfcgucccagauL96 | 6674 | asdTscudGgdGacgadCuGfgucaggusgsc | 7334 | GCACCUGACCAGUCGUCCCAGAA | 8045 |
| AD-1706579.1 | cscsugaccaGfUfCfgucccagaauL96 | 6675 | asdTsucdTgdGgacgdAcUfggucaggsusg | 7335 | CACCUGACCAGUCGUCCCAGAAU | 8046 |
| AD-1706580.1 | csusgaccagUfCfGfucccagaauuL96 | 6676 | asdAsuudCudGggacdGaCfuggucagsgsu | 7336 | ACCUGACCAGUCGUCCCAGAAUA | 8047 |
| AD-1706581.1 | usgsaccaguCfGfUfcccagaauauL96 | 6677 | asdTsaudTcdTgggadCgAfcuggucasgsg | 7337 | CCUGACCAGUCGUCCCAGAAUAA | 8048 |
| AD-1706582.1 | gsasccagucGfUfCfccagaauaauL96 | 6678 | asdTsuadTudCugggdAcGfacuggucsasg | 7338 | CUGACCAGUCGUCCCAGAAUAAC | 8049 |
| AD-1706583.1 | ascscagucgUfCfCfcagaauaacuL96 | 6679 | asdGsuudAudTcuggdGaCfgacugguscsa | 75 | UGACCAGUCGUCCCAGAAUAACU | 8050 |
| AD-1706584.1 | cscsagucguCfCfCfagaauaacuuL96 | 6680 | asdAsgudTadTucugdGgAfcgacuggsusc | 7339 | GACCAGUCGUCCCAGAAUAACUC | 8051 |
| AD-1706585.1 | csasgucgucCfCfAfgaauaacucuL96 | 6681 | asdGsagdTudAuucudGgGfacgacugsgsu | 7340 | ACCAGUCGUCCCAGAAUAACUCA | 8052 |
| AD-1706586.1 | asgsucguccCfAfGfaauaacucauL96 | 6682 | asdTsgadGudTauucdTgGfgacgacusgsg | 7341 | CCAGUCGUCCCAGAAUAACUCAU | 8053 |
| AD-1706587.1 | gsuscgucccAfGfAfauaacucauuL96 | 6683 | asdAsugdAgdTuauudCuGfggacgacsusg | 7342 | CAGUCGUCCCAGAAUAACUCAUC | 8054 |
| AD-1706588.1 | uscsgucccaGfAfAfuaacucaucuL96 | 6684 | asdGsaudGadGuuaudTcUfgggacgascsu | 7343 | AGUCGUCCCAGAAUAACUCAUCC | 8055 |
| AD-1706589.1 | csgsucccagAfAfUfaacucauccuL96 | 6685 | asdGsgadTgdAguuadTuCfugggacgsasc | 7344 | GUCGUCCCAGAAUAACUCAUCCU | 8056 |
| AD-1706590.1 | gsuscccagaAfUfAfacucauccuuL96 | 6686 | asdAsggdAudGaguudAuUfcugggacsgsa | 7345 | UCGUCCCAGAAUAACUCAUCCUC | 8057 |
| AD-1706591.1 | uscsccagaaUfAfAfcucauccucuL96 | 6687 | asdGsagdGadTgagudTaUfucugggascsg | 7346 | CGUCCCAGAAUAACUCAUCCUCC | 8058 |
| AD-1706592.1 | cscscagaauAfAfCfucauccuccuL96 | 6688 | asdGsgadGgdAugagdTuAfuucugggsasc | 7347 | GUCCCAGAAUAACUCAUCCUCCA | 8059 |
| AD-1706593.1 | cscsagaauaAfCfUfcauccuccauL96 | 6689 | asdTsggdAgdGaugadGuUfauucuggsgsa | 78 | UCCCAGAAUAACUCAUCCUCCAC | 8060 |
| AD-1706594.1 | csasgaauaaCfUfCfauccuccacuL96 | 6690 | asdGsugdGadGgaugdAgUfuauucugsgsg | 7348 | CCCAGAAUAACUCAUCCUCCACC | 8061 |
| AD-1706635.1 | gsgsgaguguGfGfCfuccagggaauL96 | 6691 | asdTsucdCcdTggagdCcAfcacucccsusg | 7349 | CAGGGAGUGUGGCUCCAGGGAAU | 8062 |
| AD-1706636.1 | gsgsagugugGfCfUfccagggaauuL96 | 6692 | asdAsuudCcdCuggadGcCfacacuccscsu | 7350 | AGGGAGUGUGGCUCCAGGGAAUG | 8063 |
| AD-1706637.1 | gsasguguggCfUfCfcagggaauguL96 | 6693 | asdCsaudTcdCcuggdAgCfcacacucscsc | 7351 | GGGAGUGUGGCUCCAGGGAAUGG | 8064 |
| AD-1706638.1 | asgsuguggcUfCfCfagggaaugguL96 | 6694 | asdCscadTudCccugdGaGfccacacuscsc | 7352 | GGAGUGUGGCUCCAGGGAAUGGG | 8065 |
| AD-1706639.1 | gsasggagguCfAfUfcagcuuugcuL96 | 6695 | asdGscadAadGcugadTgAfccuccucscsc | 7353 | GGGAGGAGGUCAUCAGCUUUGCU | 8066 |
| AD-1706640.1 | asgsgaggucAfUfCfagcuuugcuuL96 | 6696 | asdAsgcdAadAgcugdAuGfaccuccuscsc | 7354 | GGAGGAGGUCAUCAGCUUUGCUA | 8067 |
| AD-1706641.1 | gsgsaggucaUfCfAfgcuuugcuauL96 | 6697 | asdTsagdCadAagcudGaUfgaccuccsusc | 7355 | GAGGAGGUCAUCAGCUUUGCUAC | 8068 |
| AD-1706642.1 | gsasggucauCfAfGfcuuugcuacuL96 | 6698 | asdGsuadGcdAaagcdTgAfugaccucscsu | 7356 | AGGAGGUCAUCAGCUUUGCUACU | 8069 |
| AD-1706643.1 | asgsgucaucAfGfCfuuugcuacuuL96 | 6699 | asdAsgudAgdCaaagdCuGfaugaccuscsc | 7357 | GGAGGUCAUCAGCUUUGCUACUG | 8070 |
| AD-1706644.1 | gsgsucaucaGfCfUfuugcuacuguL96 | 6700 | asdCsagdTadGcaaadGcUfgaugaccsusc | 7358 | GAGGUCAUCAGCUUUGCUACUGU | 8071 |
| AD-1706645.1 | gsuscaucagCfUfUfugcuacuguuL96 | 6701 | asdAscadGudAgcaadAgCfugaugacscsu | 7359 | AGGUCAUCAGCUUUGCUACUGUC | 8072 |
| AD-1706646.1 | uscsaucagcUfUfUfgcuacugucuL96 | 6702 | asdGsacdAgdTagcadAaGfcugaugascsc | 7360 | GGUCAUCAGCUUUGCUACUGUCA | 8073 |
| AD-1706649.1 | uscsagcuuuGfCfUfacugucacauL96 | 6703 | asdTsgudGadCaguadGcAfaagcugasusg | 7361 | CAUCAGCUUUGCUACUGUCACAG | 8074 |
| AD-1706650.1 | csasgcuuugCfUfAfcugucacaguL96 | 6704 | asdCsugdTgdAcagudAgCfaaagcugsasu | 7362 | AUCAGCUUUGCUACUGUCACAGA | 8075 |
| AD-1706651.1 | asgscuuugcUfAfCfugucacagauL96 | 6705 | asdTscudGudGacagdTaGfcaaagcusgsa | 7363 | UCAGCUUUGCUACUGUCACAGAC | 8076 |
| AD-1706652.1 | gscsuuugcuAfCfUfgucacagacuL96 | 6706 | asdGsucdTgdTgacadGuAfgcaaagcsusg | 7364 | CAGCUUUGCUACUGUCACAGACU | 8077 |
| AD-1706653.1 | csusuugcuaCfUfGfucacagacuuL96 | 6707 | asdAsgudCudGugacdAgUfagcaaagscsu | 7365 | AGCUUUGCUACUGUCACAGACUC | 8078 |
| AD-1706654.1 | ususugcuacUfGfUfcacagacucuL96 | 6708 | asdGsagdTcdTgugadCaGfuagcaaasgsc | 7366 | GCUUUGCUACUGUCACAGACUCC | 8079 |
| AD-1706655.1 | ususgcuacuGfUfCfacagacuccuL96 | 6709 | asdGsgadGudCugugdAcAfguagcaasasg | 7367 | CUUUGCUACUGUCACAGACUCCA | 8080 |
| AD-1706656.1 | usgscuacugUfCfAfcagacuccauL96 | 6710 | asdTsggdAgdTcugudGaCfaguagcasasa | 7368 | UUUGCUACUGUCACAGACUCCAC | 8081 |
| AD-1706660.1 | ascsugucacAfGfAfcuccacuucuL96 | 6711 | asdGsaadGudGgagudCuGfugacagusasg | 7369 | CUACUGUCACAGACUCCACUUCA | 8082 |
| AD-1706661.1 | csusgucacaGfAfCfuccacuucauL96 | 6712 | asdTsgadAgdTggagdTcUfgugacagsusa | 7370 | UACUGUCACAGACUCCACUUCAG | 8083 |
| AD-1706662.1 | usgsucacagAfCfUfccacuucaguL96 | 6713 | asdCsugdAadGuggadGuCfugugacasgsu | 82 | ACUGUCACAGACUCCACUUCAGC | 8084 |
| AD-1706664.1 | uscsacagacUfCfCfacuucagccuL96 | 6714 | asdGsgcdTgdAagugdGaGfucugugascsa | 7371 | UGUCACAGACUCCACUUCAGCCU | 8085 |
| AD-1706665.1 | csascagacuCfCfAfcuucagccuuL96 | 6715 | asdAsggdCudGaagudGgAfgucugugsasc | 7372 | GUCACAGACUCCACUUCAGCCUA | 8086 |
| AD-1706666.1 | ascsagacucCfAfCfuucagccuauL96 | 6716 | asdTsagdGcdTgaagdTgGfagucugusgsa | 7373 | UCACAGACUCCACUUCAGCCUAC | 8087 |
| AD-1706667.1 | csasgacuccAfCfUfucagccuacuL96 | 6717 | asdGsuadGgdCugaadGuGfgagucugsusg | 7374 | CACAGACUCCACUUCAGCCUACA | 8088 |
| AD-1706668.1 | asgsacuccaCfUfUfcagccuacauL96 | 6718 | asdTsgudAgdGcugadAgUfggagucusgsu | 7375 | ACAGACUCCACUUCAGCCUACAG | 8089 |
| AD-1706669.1 | gsascuccacUfUfCfagccuacaguL96 | 6719 | asdCsugdTadGgcugdAaGfuggagucsusg | 7376 | CAGACUCCACUUCAGCCUACAGC | 8090 |
| AD-1706670.1 | ascsuccacuUfCfAfgccuacagcuL96 | 6720 | asdGscudGudAggcudGaAfguggaguscsu | 7377 | AGACUCCACUUCAGCCUACAGCU | 8091 |
| AD-1706671.1 | csusccacuuCfAfGfccuacagcuuL96 | 6721 | asdAsgcdTgdTaggcdTgAfaguggagsusc | 7378 | GACUCCACUUCAGCCUACAGCUC | 8092 |
| AD-1706672.1 | uscscacuucAfGfCfcuacagcucuL96 | 6722 | asdGsagdCudGuaggdCuGfaaguggasgsu | 7379 | ACUCCACUUCAGCCUACAGCUCC | 8093 |
| AD-1706673.1 | cscsacuucaGfCfCfuacagcuccuL96 | 6723 | asdGsgadGcdTguagdGcUfgaaguggsasg | 7380 | CUCCACUUCAGCCUACAGCUCCC | 8094 |
| AD-1706674.1 | csascuucagCfCfUfacagcucccuL96 | 6724 | asdGsggdAgdCuguadGgCfugaagugsgsa | 7381 | UCCACUUCAGCCUACAGCUCCCU | 8095 |
| AD-1706675.1 | ascsuucagcCfUfAfcagcucccuuL96 | 6725 | asdAsggdGadGcugudAgGfcugaagusgsg | 7382 | CCACUUCAGCCUACAGCUCCCUG | 8096 |
| AD-1706678.1 | uscsagccuaCfAfGfcucccugcuuL96 | 6726 | asdAsgcdAgdGgagcdTgUfaggcugasasg | 7383 | CUUCAGCCUACAGCUCCCUGCUC | 8097 |
| AD-1706729.1 | csasccuguaCfCfAfugcccgccuuL96 | 6727 | asdAsggdCgdGgcaudGgUfacaggugsgsu | 7384 | ACCACCUGUACCAUGCCCGCCUG | 8098 |
| AD-1706731.1 | cscsuguaccAfUfGfcccgccuguuL96 | 6728 | asdAscadGgdCgggcdAuGfguacaggsusg | 7385 | CACCUGUACCAUGCCCGCCUGUG | 8099 |
| AD-1706732.1 | csusguaccaUfGfCfccgccuguguL96 | 6729 | asdCsacdAgdGcgggdCaUfgguacagsgsu | 7386 | ACCUGUACCAUGCCCGCCUGUGG | 8100 |
| AD-1706735.1 | usasccaugcCfCfGfccuguggcuuL96 | 6730 | asdAsgcdCadCaggcdGgGfcaugguascsa | 7387 | UGUACCAUGCCCGCCUGUGGCUG | 8101 |
| AD-1706745.1 | csascccuucCfUfGfgcacucuuuuL96 | 6731 | asdAsaadGadGugccdAgGfaagggugsgsg | 7388 | CCCACCCUUCCUGGCACUCUUUG | 8102 |
| AD-1706746.1 | ascsccuuccUfGfGfcacucuuuguL96 | 6732 | asdCsaadAgdAgugcdCaGfgaagggusgsg | 7389 | CCACCCUUCCUGGCACUCUUUGC | 8103 |
| AD-1706747.1 | cscscuuccuGfGfCfacucuuugcuL96 | 6733 | asdGscadAadGagugdCcAfggaagggsusg | 7390 | CACCCUUCCUGGCACUCUUUGCU | 8104 |
| AD-1706748.1 | cscsuuccugGfCfAfcucuuugcuuL96 | 6734 | asdAsgcdAadAgagudGcCfaggaaggsgsu | 7391 | ACCCUUCCUGGCACUCUUUGCUU | 8105 |
| AD-1706749.1 | csusuccuggCfAfCfucuuugcuuuL96 | 6735 | asdAsagdCadAagagdTgCfcaggaagsgsg | 7392 | CCCUUCCUGGCACUCUUUGCUUG | 8106 |
| AD-1706750.1 | ususccuggcAfCfUfcuuugcuuguL96 | 6736 | asdCsaadGcdAaagadGuGfccaggaasgsg | 7393 | CCUUCCUGGCACUCUUUGCUUGA | 8107 |
| AD-1706751.1 | uscscuggcaCfUfCfuuugcuugauL96 | 6737 | asdTscadAgdCaaagdAgUfgccaggasasg | 7394 | CUUCCUGGCACUCUUUGCUUGAG | 8108 |
| AD-1706752.1 | cscsuggcacUfCfUfuugcuugaguL96 | 6738 | asdCsucdAadGcaaadGaGfugccaggsasa | 7395 | UUCCUGGCACUCUUUGCUUGAGG | 8109 |
| AD-1706753.1 | csusggcacuCfUfUfugcuugagguL96 | 6739 | asdCscudCadAgcaadAgAfgugccagsgsa | 7396 | UCCUGGCACUCUUUGCUUGAGGA | 8110 |
| AD-1706754.1 | usgsgcacucUfUfUfgcuugaggauL96 | 6740 | asdTsccdTcdAagcadAaGfagugccasgsg | 7397 | CCUGGCACUCUUUGCUUGAGGAU | 8111 |
| AD-1706755.1 | gsgscacucuUfUfGfcuugaggauuL96 | 6741 | asdAsucdCudCaagcdAaAfgagugccsasg | 7398 | CUGGCACUCUUUGCUUGAGGAUC | 8112 |
| AD-1706756.1 | gscsacucuuUfGfCfuugaggaucuL96 | 6742 | asdGsaudCcdTcaagdCaAfagagugcscsa | 7399 | UGGCACUCUUUGCUUGAGGAUCU | 8113 |
| AD-1706758.1 | ascsucuuugCfUfUfgaggaucuuuL96 | 6743 | asdAsagdAudCcucadAgCfaaagagusgsc | 7400 | GCACUCUUUGCUUGAGGAUCUUC | 8114 |
| AD-1706759.1 | csuscuuugcUfUfGfaggaucuucuL96 | 6744 | asdGsaadGadTccucdAaGfcaaagagsusg | 7401 | CACUCUUUGCUUGAGGAUCUUCC | 8115 |
| AD-1706760.1 | uscsuuugcuUfGfAfggaucuuccuL96 | 6745 | asdGsgadAgdAuccudCaAfgcaaagasgsu | 7402 | ACUCUUUGCUUGAGGAUCUUCCG | 8116 |
| AD-1706761.1 | csusuugcuuGfAfGfgaucuuccguL96 | 6746 | asdCsggdAadGauccdTcAfagcaaagsasg | 84 | CUCUUUGCUUGAGGAUCUUCCGA | 8117 |
| AD-1706762.1 | ususugcuugAfGfGfaucuuccgauL96 | 6747 | asdTscgdGadAgaucdCuCfaagcaaasgsa | 7403 | UCUUUGCUUGAGGAUCUUCCGAU | 8118 |
| AD-1706763.1 | ususgcuugaGfGfAfucuuccgauuL96 | 6748 | asdAsucdGgdAagaudCcUfcaagcaasasg | 7404 | CUUUGCUUGAGGAUCUUCCGAUG | 8119 |
| AD-1706764.1 | usgscuugagGfAfUfcuuccgauguL96 | 6749 | asdCsaudCgdGaagadTcCfucaagcasasa | 7405 | UUUGCUUGAGGAUCUUCCGAUGG | 8120 |
| AD-1706765.1 | gscsuugaggAfUfCfuuccgaugguL96 | 6750 | asdCscadTcdGgaagdAuCfcucaagcsasa | 7406 | UUGCUUGAGGAUCUUCCGAUGGG | 8121 |
| AD-1706796.1 | csusggcugaGfCfAfccacaucacuL96 | 6751 | asdGsugdAudGuggudGcUfcagccagsgsa | 7407 | UCCUGGCUGAGCACCACAUCACC | 8122 |
| AD-1706797.1 | usgsgcugagCfAfCfcacaucaccuL96 | 6752 | asdGsgudGadTguggdTgCfucagccasgsg | 7408 | CCUGGCUGAGCACCACAUCACCA | 8123 |
| AD-1706798.1 | gsgscugagcAfCfCfacaucaccauL96 | 6753 | asdTsggdTgdAugugdGuGfcucagccsasg | 7409 | CUGGCUGAGCACCACAUCACCAA | 8124 |
| AD-1706799.1 | gscsugagcaCfCfAfcaucaccaauL96 | 6754 | asdTsugdGudGaugudGgUfgcucagcscsa | 7410 | UGGCUGAGCACCACAUCACCAAC | 8125 |
| AD-1706800.1 | csusgagcacCfAfCfaucaccaacuL96 | 6755 | asdGsuudGgdTgaugdTgGfugcucagscsc | 7411 | GGCUGAGCACCACAUCACCAACC | 8126 |
| AD-1706801.1 | usgsagcaccAfCfAfucaccaaccuL96 | 6756 | asdGsgudTgdGugaudGuGfgugcucasgsc | 7412 | GCUGAGCACCACAUCACCAACCU | 8127 |
| AD-1706802.1 | gsasgcaccaCfAfUfcaccaaccuuL96 | 6757 | asdAsggdTudGgugadTgUfggugcucsasg | 7413 | CUGAGCACCACAUCACCAACCUG | 8128 |
| AD-1706803.1 | asgscaccacAfUfCfaccaaccuguL96 | 6758 | asdCsagdGudTggugdAuGfuggugcuscsa | 7414 | UGAGCACCACAUCACCAACCUGG | 8129 |
| AD-1706804.1 | gscsaccacaUfCfAfccaaccugguL96 | 6759 | asdCscadGgdTuggudGaUfguggugcsusc | 7415 | GAGCACCACAUCACCAACCUGGG | 8130 |
| AD-1706807.1 | cscsacaucaCfCfAfaccugggcuuL96 | 6760 | asdAsgcdCcdAgguudGgUfgauguggsusg | 7416 | CACCACAUCACCAACCUGGGCUG | 8131 |
| AD-1706808.1 | csascaucacCfAfAfccugggcuguL96 | 6761 | asdCsagdCcdCaggudTgGfugaugugsgsu | 7417 | ACCACAUCACCAACCUGGGCUGG | 8132 |
| AD-1706809.1 | ascsaucaccAfAfCfcugggcugguL96 | 6762 | asdCscadGcdCcaggdTuGfgugaugusgsg | 7418 | CCACAUCACCAACCUGGGCUGGC | 8133 |
| AD-1706811.1 | asuscaccaaCfCfUfgggcuggcauL96 | 6763 | asdTsgcdCadGcccadGgUfuggugausgsu | 7419 | ACAUCACCAACCUGGGCUGGCAU | 8134 |
| AD-1706812.1 | uscsaccaacCfUfGfggcuggcauuL96 | 6764 | asdAsugdCcdAgcccdAgGfuuggugasusg | 7420 | CAUCACCAACCUGGGCUGGCAUA | 8135 |
| AD-1706831.1 | usasccuuaaCfUfCfugcccucuauL96 | 6765 | asdTsagdAgdGgcagdAgUfuaagguasusg | 7421 | CAUACCUUAACUCUGCCCUCUAG | 8136 |
| AD-1706832.1 | ascscuuaacUfCfUfgcccucuaguL96 | 6766 | asdCsuadGadGggcadGaGfuuaaggusasu | 7422 | AUACCUUAACUCUGCCCUCUAGU | 8137 |
| AD-1706833.1 | cscsuuaacuCfUfGfcccucuaguuL96 | 6767 | asdAscudAgdAgggcdAgAfguuaaggsusa | 7423 | UACCUUAACUCUGCCCUCUAGUG | 8138 |
| AD-1706834.1 | csusuaacucUfGfCfccucuaguguL96 | 6768 | asdCsacdTadGagggdCaGfaguuaagsgsu | 7424 | ACCUUAACUCUGCCCUCUAGUGG | 8139 |
| AD-1706835.1 | ususaacucuGfCfCfcucuagugguL96 | 6769 | asdCscadCudAgaggdGcAfgaguuaasgsg | 7425 | CCUUAACUCUGCCCUCUAGUGGC | 8140 |
| AD-1706836.1 | usasacucugCfCfCfucuaguggcuL96 | 6770 | asdGsccdAcdTagagdGgCfagaguuasasg | 7426 | CUUAACUCUGCCCUCUAGUGGCU | 8141 |
| AD-1706848.1 | asasgucuggUfGfUfccugaaacuuL96 | 6771 | asdAsgudTudCaggadCaCfcagacuuscsu | 7427 | AGAAGUCUGGUGUCCUGAAACUG | 8142 |
| AD-1706849.1 | asgsucugguGfUfCfcugaaacuguL96 | 6772 | asdCsagdTudTcaggdAcAfccagacususc | 7428 | GAAGUCUGGUGUCCUGAAACUGC | 8143 |
| AD-1706850.1 | gsuscuggugUfCfCfugaaacugcuL96 | 6773 | asdGscadGudTucagdGaCfaccagacsusu | 7429 | AAGUCUGGUGUCCUGAAACUGCA | 8144 |
| AD-1706851.1 | uscsugguguCfCfUfgaaacugcauL96 | 6774 | asdTsgcdAgdTuucadGgAfcaccagascsu | 7430 | AGUCUGGUGUCCUGAAACUGCAA | 8145 |
| AD-1706852.1 | csusggugucCfUfGfaaacugcaauL96 | 6775 | asdTsugdCadGuuucdAgGfacaccagsasc | 7431 | GUCUGGUGUCCUGAAACUGCAAC | 8146 |
| AD-1706853.1 | usgsguguccUfGfAfaacugcaacuL96 | 6776 | asdGsuudGcdAguuudCaGfgacaccasgsa | 7432 | UCUGGUGUCCUGAAACUGCAACU | 8147 |
| AD-1706854.1 | gsgsuguccuGfAfAfacugcaacuuL96 | 6777 | asdAsgudTgdCaguudTcAfggacaccsasg | 7433 | CUGGUGUCCUGAAACUGCAACUA | 8148 |
| AD-1706855.1 | gsusguccugAfAfAfcugcaacuauL96 | 6778 | asdTsagdTudGcagudTuCfaggacacscsa | 7434 | UGGUGUCCUGAAACUGCAACUAG | 8149 |
| AD-1706856.1 | usgsuccugaAfAfCfugcaacuaguL96 | 6779 | asdCsuadGudTgcagdTuUfcaggacascsc | 7435 | GGUGUCCUGAAACUGCAACUAGA | 8150 |
| AD-1706857.1 | gsusccugaaAfCfUfgcaacuagauL96 | 6780 | asdTscudAgdTugcadGuUfucaggacsasc | 7436 | GUGUCCUGAAACUGCAACUAGAC | 8151 |
| AD-1706858.1 | uscscugaaaCfUfGfcaacuagacuL96 | 6781 | asdGsucdTadGuugcdAgUfuucaggascsa | 7437 | UGUCCUGAAACUGCAACUAGACU | 8152 |
| AD-1706859.1 | cscsugaaacUfGfCfaacuagacuuL96 | 6782 | asdAsgudCudAguugdCaGfuuucaggsasc | 7438 | GUCCUGAAACUGCAACUAGACUG | 8153 |
| AD-1706860.1 | csusgaaacuGfCfAfacuagacuguL96 | 6783 | asdCsagdTcdTaguudGcAfguuucagsgsa | 7439 | UCCUGAAACUGCAACUAGACUGC | 8154 |
| AD-1706861.1 | usgsaaacugCfAfAfcuagacugcuL96 | 6784 | asdGscadGudCuagudTgCfaguuucasgsg | 7440 | CCUGAAACUGCAACUAGACUGCA | 8155 |
| AD-1706862.1 | gsasaacugcAfAfCfuagacugcauL96 | 6785 | asdTsgcdAgdTcuagdTuGfcaguuucsasg | 7441 | CUGAAACUGCAACUAGACUGCAG | 8156 |
| AD-1706863.1 | asasacugcaAfCfUfagacugcaguL96 | 6786 | asdCsugdCadGucuadGuUfgcaguuuscsa | 7442 | UGAAACUGCAACUAGACUGCAGA | 8157 |
| AD-1706864.1 | asascugcaaCfUfAfgacugcagauL96 | 6787 | asdTscudGcdAgucudAgUfugcaguususc | 7443 | GAAACUGCAACUAGACUGCAGAC | 8158 |
| AD-1706866.1 | csusgcaacuAfGfAfcugcagaccuL96 | 6788 | asdGsgudCudGcagudCuAfguugcagsusu | 7444 | AACUGCAACUAGACUGCAGACCC | 8159 |
| AD-1706873.1 | gsgscaacagCfAfCfaguuacugguL96 | 6789 | asdCscadGudAacugdTgCfuguugccsusu | 7445 | AAGGCAACAGCACAGUUACUGGA | 8160 |
| AD-1706874.1 | gscsaacagcAfCfAfguuacuggauL96 | 6790 | asdTsccdAgdTaacudGuGfcuguugcscsu | 7446 | AGGCAACAGCACAGUUACUGGAC | 8161 |
| AD-1706875.1 | csasacagcaCfAfGfuuacuggacuL96 | 6791 | asdGsucdCadGuaacdTgUfgcuguugscsc | 7447 | GGCAACAGCACAGUUACUGGACA | 8162 |
| AD-1706876.1 | asascagcacAfGfUfuacuggacauL96 | 6792 | asdTsgudCcdAguaadCuGfugcuguusgsc | 7448 | GCAACAGCACAGUUACUGGACAA | 8163 |
| AD-1706877.1 | ascsagcacaGfUfUfacuggacaauL96 | 6793 | asdTsugdTcdCaguadAcUfgugcugususg | 7449 | CAACAGCACAGUUACUGGACAAC | 8164 |
| AD-1706878.1 | csasgcacagUfUfAfcuggacaacuL96 | 6794 | asdGsuudGudCcagudAaCfugugcugsusu | 7450 | AACAGCACAGUUACUGGACAACC | 8165 |
| AD-1706879.1 | asgscacaguUfAfCfuggacaaccuL96 | 6795 | asdGsgudTgdTccagdTaAfcugugcusgsu | 7451 | ACAGCACAGUUACUGGACAACCG | 8166 |
| AD-1706908.1 | csusuggacaCfAfGfcaggacaccuL96 | 6796 | asdGsgudGudCcugcdTgUfguccaagsasg | 7452 | CUCUUGGACACAGCAGGACACCA | 8167 |
| AD-1706909.1 | ususggacacAfGfCfaggacaccauL96 | 6797 | asdTsggdTgdTccugdCuGfuguccaasgsa | 7453 | UCUUGGACACAGCAGGACACCAG | 8168 |
| AD-1706910.1 | usgsgacacaGfCfAfggacaccaguL96 | 6798 | asdCsugdGudGuccudGcUfguguccasasg | 7454 | CUUGGACACAGCAGGACACCAGC | 8169 |
| AD-1706911.1 | gsgsacacagCfAfGfgacaccagcuL96 | 6799 | asdGscudGgdTguccdTgCfuguguccsasa | 7455 | UUGGACACAGCAGGACACCAGCA | 8170 |
| AD-1706912.1 | gsascacagcAfGfGfacaccagcauL96 | 6800 | asdTsgcdTgdGugucdCuGfcugugucscsa | 7456 | UGGACACAGCAGGACACCAGCAG | 8171 |
| AD-1706913.1 | ascsacagcaGfGfAfcaccagcaguL96 | 6801 | asdCsugdCudGgugudCcUfgcuguguscsc | 7457 | GGACACAGCAGGACACCAGCAGC | 8172 |
| AD-1706914.1 | csascagcagGfAfCfaccagcagcuL96 | 6802 | asdGscudGcdTggugdTcCfugcugugsusc | 7458 | GACACAGCAGGACACCAGCAGCC | 8173 |
| AD-1706918.1 | gscsaggacaCfCfAfgcagcccuuuL96 | 6803 | asdAsagdGgdCugcudGgUfguccugcsusg | 7459 | CAGCAGGACACCAGCAGCCCUUC | 8174 |
| AD-1706921.1 | gsgsacaccaGfCfAfgcccuuccuuL96 | 6804 | asdAsggdAadGggcudGcUfgguguccsusg | 7460 | CAGGACACCAGCAGCCCUUCCUA | 8175 |
| AD-1706922.1 | gsascaccagCfAfGfcccuuccuauL96 | 6805 | asdTsagdGadAgggcdTgCfuggugucscsu | 7461 | AGGACACCAGCAGCCCUUCCUAG | 8176 |
| AD-1706923.1 | ascsaccagcAfGfCfccuuccuaguL96 | 6806 | asdCsuadGgdAagggdCuGfcugguguscsc | 7462 | GGACACCAGCAGCCCUUCCUAGA | 8177 |
| AD-1706925.1 | ascscagcagCfCfCfuuccuagaguL96 | 6807 | asdCsucdTadGgaagdGgCfugcuggusgsu | 7463 | ACACCAGCAGCCCUUCCUAGAGC | 8178 |
| AD-1706926.1 | cscsagcagcCfCfUfuccuagagcuL96 | 6808 | asdGscudCudAggaadGgGfcugcuggsusg | 7464 | CACCAGCAGCCCUUCCUAGAGCU | 8179 |
| AD-1706927.1 | csasgcagccCfUfUfccuagagcuuL96 | 6809 | asdAsgcdTcdTaggadAgGfgcugcugsgsu | 7465 | ACCAGCAGCCCUUCCUAGAGCUU | 8180 |
| AD-1706929.1 | gscsagcccuUfCfCfuagagcuuauL96 | 6810 | asdTsaadGcdTcuagdGaAfgggcugcsusg | 7466 | CAGCAGCCCUUCCUAGAGCUUAA | 8181 |
| AD-1706930.1 | csasgcccuuCfCfUfagagcuuaauL96 | 6811 | asdTsuadAgdCucuadGgAfagggcugscsu | 7467 | AGCAGCCCUUCCUAGAGCUUAAG | 8182 |
| AD-1706931.1 | asgscccuucCfUfAfgagcuuaaguL96 | 6812 | asdCsuudAadGcucudAgGfaagggcusgsc | 7468 | GCAGCCCUUCCUAGAGCUUAAGA | 8183 |
| AD-1706932.1 | gscsccuuccUfAfGfagcuuaagauL96 | 6813 | asdTscudTadAgcucdTaGfgaagggcsusg | 7469 | CAGCCCUUCCUAGAGCUUAAGAU | 8184 |
| AD-1706933.1 | cscscuuccuAfGfAfgcuuaagauuL96 | 6814 | asdAsucdTudAagcudCuAfggaagggscsu | 7470 | AGCCCUUCCUAGAGCUUAAGAUC | 8185 |
| AD-1706934.1 | cscsuuccuaGfAfGfcuuaagaucuL96 | 6815 | asdGsaudCudTaagcdTcUfaggaaggsgsc | 7471 | GCCCUUCCUAGAGCUUAAGAUCC | 8186 |
| AD-1706982.1 | ususacguagAfCfUfuccaggaacuL96 | 6816 | asdGsuudCcdTggaadGuCfuacguaasusg | 7472 | CAUUACGUAGACUUCCAGGAACU | 8187 |
| AD-1706983.1 | usascguagaCfUfUfccaggaacuuL96 | 6817 | asdAsgudTcdCuggadAgUfcuacguasasu | 7473 | AUUACGUAGACUUCCAGGAACUG | 8188 |
| AD-1706984.1 | ascsguagacUfUfCfcaggaacuguL96 | 6818 | asdCsagdTudCcuggdAaGfucuacgusasa | 7474 | UUACGUAGACUUCCAGGAACUGG | 8189 |
| AD-1706985.1 | csgsuagacuUfCfCfaggaacugguL96 | 6819 | asdCscadGudTccugdGaAfgucuacgsusa | 7475 | UACGUAGACUUCCAGGAACUGGG | 8190 |
| AD-1706987.1 | usasgacuucCfAfGfgaacugggauL96 | 6820 | asdTsccdCadGuuccdTgGfaagucuascsg | 7476 | CGUAGACUUCCAGGAACUGGGAU | 8191 |
| AD-1706988.1 | asgsacuuccAfGfGfaacugggauuL96 | 6821 | asdAsucdCcdAguucdCuGfgaagucusasc | 7477 | GUAGACUUCCAGGAACUGGGAUG | 8192 |
| AD-1706989.1 | gsascuuccaGfGfAfacugggauguL96 | 6822 | asdCsaudCcdCaguudCcUfggaagucsusa | 7478 | UAGACUUCCAGGAACUGGGAUGG | 8193 |
| AD-1706990.1 | ascsuuccagGfAfAfcugggaugguL96 | 6823 | asdCscadTcdCcagudTcCfuggaaguscsu | 7479 | AGACUUCCAGGAACUGGGAUGGC | 8194 |
| AD-1706991.1 | csusuccaggAfAfCfugggauggcuL96 | 6824 | asdGsccdAudCccagdTuCfcuggaagsusc | 7480 | GACUUCCAGGAACUGGGAUGGCG | 8195 |
| AD-1707013.1 | gsascuggauAfCfUfgcagcccgauL96 | 6825 | asdTscgdGgdCugcadGuAfuccagucscsc | 7481 | GGGACUGGAUACUGCAGCCCGAG | 8196 |
| AD-1707014.1 | ascsuggauaCfUfGfcagcccgaguL96 | 6826 | asdCsucdGgdGcugcdAgUfauccaguscsc | 7482 | GGACUGGAUACUGCAGCCCGAGG | 8197 |
| AD-1707015.1 | csusggauacUfGfCfagcccgagguL96 | 6827 | asdCscudCgdGgcugdCaGfuauccagsusc | 7483 | GACUGGAUACUGCAGCCCGAGGG | 8198 |
| AD-1707016.1 | gsusaccagcUfGfAfauuacugcauL96 | 6828 | asdTsgcdAgdTaauudCaGfcugguacscsc | 7484 | GGGUACCAGCUGAAUUACUGCAG | 8199 |
| AD-1707017.1 | usasccagcuGfAfAfuuacugcaguL96 | 6829 | asdCsugdCadGuaaudTcAfgcugguascsc | 7485 | GGUACCAGCUGAAUUACUGCAGU | 8200 |
| AD-1707018.1 | ascscagcugAfAfUfuacugcaguuL96 | 6830 | asdAscudGcdAguaadTuCfagcuggusasc | 7486 | GUACCAGCUGAAUUACUGCAGUG | 8201 |
| AD-1707019.1 | cscsagcugaAfUfUfacugcaguguL96 | 6831 | asdCsacdTgdCaguadAuUfcagcuggsusa | 7487 | UACCAGCUGAAUUACUGCAGUGG | 8202 |
| AD-1707020.1 | csasgcugaaUfUfAfcugcagugguL96 | 6832 | asdCscadCudGcagudAaUfucagcugsgsu | 7488 | ACCAGCUGAAUUACUGCAGUGGG | 8203 |
| AD-1707021.1 | asgscugaauUfAfCfugcaguggguL96 | 6833 | asdCsccdAcdTgcagdTaAfuucagcusgsg | 7489 | CCAGCUGAAUUACUGCAGUGGGC | 8204 |
| AD-1707022.1 | gscsugaauuAfCfUfgcagugggcuL96 | 6834 | asdGsccdCadCugcadGuAfauucagcsusg | 7490 | CAGCUGAAUUACUGCAGUGGGCA | 8205 |
| AD-1707023.1 | csusgaauuaCfUfGfcagugggcauL96 | 6835 | asdTsgcdCcdAcugcdAgUfaauucagscsu | 7491 | AGCUGAAUUACUGCAGUGGGCAG | 8206 |
| AD-1707024.1 | usgsaauuacUfGfCfagugggcaguL96 | 6836 | asdCsugdCcdCacugdCaGfuaauucasgsc | 7492 | GCUGAAUUACUGCAGUGGGCAGU | 8207 |
| AD-1707025.1 | gsasauuacuGfCfAfgugggcaguuL96 | 6837 | asdAscudGcdCcacudGcAfguaauucsasg | 7493 | CUGAAUUACUGCAGUGGGCAGUG | 8208 |
| AD-1707030.1 | ascsugcaguGfGfGfcagugcccuuL96 | 6838 | asdAsggdGcdAcugcdCcAfcugcagusasa | 7494 | UUACUGCAGUGGGCAGUGCCCUC | 8209 |
| AD-1707047.1 | csasggcauuGfCfUfgccucuuucuL96 | 6839 | asdGsaadAgdAggcadGcAfaugccugsgsg | 7495 | CCCAGGCAUUGCUGCCUCUUUCC | 8210 |
| AD-1707048.1 | asgsgcauugCfUfGfccucuuuccuL96 | 6840 | asdGsgadAadGaggcdAgCfaaugccusgsg | 7496 | CCAGGCAUUGCUGCCUCUUUCCA | 8211 |
| AD-1707049.1 | gsgscauugcUfGfCfcucuuuccauL96 | 6841 | asdTsggdAadAgaggdCaGfcaaugccsusg | 7497 | CAGGCAUUGCUGCCUCUUUCCAU | 8212 |
| AD-1707050.1 | gscsauugcuGfCfCfucuuuccauuL96 | 6842 | asdAsugdGadAagagdGcAfgcaaugcscsu | 7498 | AGGCAUUGCUGCCUCUUUCCAUU | 8213 |
| AD-1707051.1 | csasuugcugCfCfUfcuuuccauuuL96 | 6843 | asdAsaudGgdAaagadGgCfagcaaugscsc | 7499 | GGCAUUGCUGCCUCUUUCCAUUC | 8214 |
| AD-1707052.1 | asusugcugcCfUfCfuuuccauucuL96 | 6844 | asdGsaadTgdGaaagdAgGfcagcaausgsc | 7500 | GCAUUGCUGCCUCUUUCCAUUCU | 8215 |
| AD-1707053.1 | ususgcugccUfCfUfuuccauucuuL96 | 6845 | asdAsgadAudGgaaadGaGfgcagcaasusg | 7501 | CAUUGCUGCCUCUUUCCAUUCUG | 8216 |
| AD-1707054.1 | usgscugccuCfUfUfuccauucuguL96 | 6846 | asdCsagdAadTggaadAgAfggcagcasasu | 7502 | AUUGCUGCCUCUUUCCAUUCUGC | 8217 |
| AD-1707055.1 | gscsugccucUfUfUfccauucugcuL96 | 6847 | asdGscadGadAuggadAaGfaggcagcsasa | 7503 | UUGCUGCCUCUUUCCAUUCUGCC | 8218 |
| AD-1707056.1 | csusgccucuUfUfCfcauucugccuL96 | 6848 | asdGsgcdAgdAauggdAaAfgaggcagscsa | 7504 | UGCUGCCUCUUUCCAUUCUGCCG | 8219 |
| AD-1707057.1 | usgsccucuuUfCfCfauucugccguL96 | 6849 | asdCsggdCadGaaugdGaAfagaggcasgsc | 7505 | GCUGCCUCUUUCCAUUCUGCCGU | 8220 |
| AD-1707058.1 | gscscucuuuCfCfAfuucugccguuL96 | 6850 | asdAscgdGcdAgaaudGgAfaagaggcsasg | 7506 | CUGCCUCUUUCCAUUCUGCCGUC | 8221 |
| AD-1707059.1 | cscsucuuucCfAfUfucugccgucuL96 | 6851 | asdGsacdGgdCagaadTgGfaaagaggscsa | 7507 | UGCCUCUUUCCAUUCUGCCGUCU | 8222 |
| AD-1707060.1 | csuscuuuccAfUfUfcugccgucuuL96 | 6852 | asdAsgadCgdGcagadAuGfgaaagagsgsc | 7508 | GCCUCUUUCCAUUCUGCCGUCUU | 8223 |
| AD-1707061.1 | uscsuuuccaUfUfCfugccgucuuuL96 | 6853 | asdAsagdAcdGgcagdAaUfggaaagasgsg | 7509 | CCUCUUUCCAUUCUGCCGUCUUC | 8224 |
| AD-1707062.1 | csusuuccauUfCfUfgccgucuucuL96 | 6854 | asdGsaadGadCggcadGaAfuggaaagsasg | 7510 | CUCUUUCCAUUCUGCCGUCUUCA | 8225 |
| AD-1707063.1 | ususuccauuCfUfGfccgucuucauL96 | 6855 | asdTsgadAgdAcggcdAgAfauggaaasgsa | 7511 | UCUUUCCAUUCUGCCGUCUUCAG | 8226 |
| AD-1707064.1 | ususccauucUfGfCfcgucuucaguL96 | 6856 | asdCsugdAadGacggdCaGfaauggaasasg | 7512 | CUUUCCAUUCUGCCGUCUUCAGC | 8227 |
| AD-1707065.1 | uscscauucuGfCfCfgucuucagcuL96 | 6857 | asdGscudGadAgacgdGcAfgaauggasasa | 7513 | UUUCCAUUCUGCCGUCUUCAGCC | 8228 |
| AD-1707066.1 | cscsauucugCfCfGfucuucagccuL96 | 6858 | asdGsgcdTgdAagacdGgCfagaauggsasa | 7514 | UUCCAUUCUGCCGUCUUCAGCCU | 8229 |
| AD-1707067.1 | csasuucugcCfGfUfcuucagccuuL96 | 6859 | asdAsggdCudGaagadCgGfcagaaugsgsa | 7515 | UCCAUUCUGCCGUCUUCAGCCUC | 8230 |
| AD-1707070.1 | uscsugccguCfUfUfcagccuccuuL96 | 6860 | asdAsggdAgdGcugadAgAfcggcagasasu | 7516 | AUUCUGCCGUCUUCAGCCUCCUC | 8231 |
| AD-1707074.1 | cscsgucuucAfGfCfcuccucaaauL96 | 6861 | asdTsuudGadGgaggdCuGfaagacggscsa | 7517 | UGCCGUCUUCAGCCUCCUCAAAG | 8232 |
| AD-1707075.1 | csgsucuucaGfCfCfuccucaaaguL96 | 6862 | asdCsuudTgdAggagdGcUfgaagacgsgsc | 7518 | GCCGUCUUCAGCCUCCUCAAAGC | 8233 |
| AD-1707076.1 | gsuscuucagCfCfUfccucaaagcuL96 | 6863 | asdGscudTudGaggadGgCfugaagacsgsg | 7519 | CCGUCUUCAGCCUCCUCAAAGCC | 8234 |
| AD-1707077.1 | uscsuucagcCfUfCfcucaaagccuL96 | 6864 | asdGsgcdTudTgaggdAgGfcugaagascsg | 7520 | CGUCUUCAGCCUCCUCAAAGCCA | 8235 |
| AD-1707078.1 | csusucagccUfCfCfucaaagccauL96 | 6865 | asdTsggdCudTugagdGaGfgcugaagsasc | 7521 | GUCUUCAGCCUCCUCAAAGCCAA | 8236 |
| AD-1707080.1 | uscsagccucCfUfCfaaagccaacuL96 | 6866 | asdGsuudGgdCuuugdAgGfaggcugasasg | 7522 | CUUCAGCCUCCUCAAAGCCAACA | 8237 |
| AD-1707081.1 | csasgccuccUfCfAfaagccaacauL96 | 6867 | asdTsgudTgdGcuuudGaGfgaggcugsasa | 7523 | UUCAGCCUCCUCAAAGCCAACAA | 8238 |
| AD-1707082.1 | asgsccuccuCfAfAfagccaacaauL96 | 6868 | asdTsugdTudGgcuudTgAfggaggcusgsa | 7524 | UCAGCCUCCUCAAAGCCAACAAU | 8239 |
| AD-1707083.1 | gscscuccucAfAfAfgccaacaauuL96 | 6869 | asdAsuudGudTggcudTuGfaggaggcsusg | 7525 | CAGCCUCCUCAAAGCCAACAAUC | 8240 |
| AD-1707084.1 | cscsuccucaAfAfGfccaacaaucuL96 | 6870 | asdGsaudTgdTuggcdTuUfgaggaggscsu | 7526 | AGCCUCCUCAAAGCCAACAAUCC | 8241 |
| AD-1707085.1 | csusccucaaAfGfCfcaacaauccuL96 | 6871 | asdGsgadTudGuuggdCuUfugaggagsgsc | 7527 | GCCUCCUCAAAGCCAACAAUCCU | 8242 |
| AD-1707086.1 | uscscucaaaGfCfCfaacaauccuuL96 | 6872 | asdAsggdAudTguugdGcUfuugaggasgsg | 7528 | CCUCCUCAAAGCCAACAAUCCUU | 8243 |
| AD-1707087.1 | cscsucaaagCfCfAfacaauccuuuL96 | 6873 | asdAsagdGadTuguudGgCfuuugaggsasg | 7529 | CUCCUCAAAGCCAACAAUCCUUG | 8244 |
| AD-1707088.1 | csuscaaagcCfAfAfcaauccuuguL96 | 6874 | asdCsaadGgdAuugudTgGfcuuugagsgsa | 7530 | UCCUCAAAGCCAACAAUCCUUGG | 8245 |
| AD-1707092.1 | asasgccaacAfAfUfccuuggccuuL96 | 6875 | asdAsggdCcdAaggadTuGfuuggcuususg | 7531 | CAAAGCCAACAAUCCUUGGCCUG | 8246 |
| AD-1707093.1 | asgsccaacaAfUfCfcuuggccuguL96 | 6876 | asdCsagdGcdCaaggdAuUfguuggcususu | 7532 | AAAGCCAACAAUCCUUGGCCUGC | 8247 |
| AD-1707094.1 | gscscaacaaUfCfCfuuggccugcuL96 | 6877 | asdGscadGgdCcaagdGaUfuguuggcsusu | 7533 | AAGCCAACAAUCCUUGGCCUGCC | 8248 |
| AD-1707095.1 | cscsaacaauCfCfUfuggccugccuL96 | 6878 | asdGsgcdAgdGccaadGgAfuuguuggscsu | 7534 | AGCCAACAAUCCUUGGCCUGCCA | 8249 |
| AD-1707097.1 | asascaauccUfUfGfgccugccaguL96 | 6879 | asdCsugdGcdAggccdAaGfgauuguusgsg | 7535 | CCAACAAUCCUUGGCCUGCCAGU | 8250 |
| AD-1707098.1 | ascsaauccuUfGfGfccugccaguuL96 | 6880 | asdAscudGgdCaggcdCaAfggauugususg | 7536 | CAACAAUCCUUGGCCUGCCAGUA | 8251 |
| AD-1707105.1 | ususggccugCfCfAfguaccuccuuL96 | 6881 | asdAsggdAgdGuacudGgCfaggccaasgsg | 7537 | CCUUGGCCUGCCAGUACCUCCUG | 8252 |
| AD-1707125.1 | gsusugugucCfCfUfacugcccgauL96 | 6882 | asdTscgdGgdCaguadGgGfacacaacsasg | 7538 | CUGUUGUGUCCCUACUGCCCGAA | 8253 |
| AD-1707126.1 | ususguguccCfUfAfcugcccgaauL96 | 6883 | asdTsucdGgdGcagudAgGfgacacaascsa | 7539 | UGUUGUGUCCCUACUGCCCGAAG | 8254 |
| AD-1707127.1 | usgsugucccUfAfCfugcccgaaguL96 | 6884 | asdCsuudCgdGgcagdTaGfggacacasasc | 7540 | GUUGUGUCCCUACUGCCCGAAGG | 8255 |
| AD-1707128.1 | gsusgucccuAfCfUfgcccgaagguL96 | 6885 | asdCscudTcdGggcadGuAfgggacacsasa | 7541 | UUGUGUCCCUACUGCCCGAAGGC | 8256 |
| AD-1707129.1 | usgsucccuaCfUfGfcccgaaggcuL96 | 6886 | asdGsccdTudCgggcdAgUfagggacascsa | 7542 | UGUGUCCCUACUGCCCGAAGGCC | 8257 |
| AD-1707132.1 | uscsucucucCfUfCfuaccuggauuL96 | 6887 | asdAsucdCadGguagdAgGfagagagasgsg | 7543 | CCUCUCUCUCCUCUACCUGGAUC | 8258 |
| AD-1707133.1 | csuscucuccUfCfUfaccuggaucuL96 | 6888 | asdGsaudCcdAgguadGaGfgagagagsasg | 7544 | CUCUCUCUCCUCUACCUGGAUCA | 8259 |
| AD-1707134.1 | uscsucuccuCfUfAfccuggaucauL96 | 6889 | asdTsgadTcdCaggudAgAfggagagasgsa | 7545 | UCUCUCUCCUCUACCUGGAUCAU | 8260 |
| AD-1707135.1 | csuscuccucUfAfCfcuggaucauuL96 | 6890 | asdAsugdAudCcaggdTaGfaggagagsasg | 7546 | CUCUCUCCUCUACCUGGAUCAUA | 8261 |
| AD-1707136.1 | uscsuccucuAfCfCfuggaucauauL96 | 6891 | asdTsaudGadTccagdGuAfgaggagasgsa | 7547 | UCUCUCCUCUACCUGGAUCAUAA | 8262 |
| AD-1707137.1 | csusccucuaCfCfUfggaucauaauL96 | 6892 | asdTsuadTgdAuccadGgUfagaggagsasg | 7548 | CUCUCCUCUACCUGGAUCAUAAU | 8263 |
| AD-1707138.1 | uscscucuacCfUfGfgaucauaauuL96 | 6893 | asdAsuudAudGauccdAgGfuagaggasgsa | 7549 | UCUCCUCUACCUGGAUCAUAAUG | 8264 |
| AD-1707139.1 | cscsucuaccUfGfGfaucauaauguL96 | 6894 | asdCsaudTadTgaucdCaGfguagaggsasg | 7550 | CUCCUCUACCUGGAUCAUAAUGG | 8265 |
| AD-1707140.1 | csuscuaccuGfGfAfucauaaugguL96 | 6895 | asdCscadTudAugaudCcAfgguagagsgsa | 7551 | UCCUCUACCUGGAUCAUAAUGGC | 8266 |
| AD-1707141.1 | uscsuaccugGfAfUfcauaauggcuL96 | 6896 | asdGsccdAudTaugadTcCfagguagasgsg | 7552 | CCUCUACCUGGAUCAUAAUGGCA | 8267 |
| AD-1707142.1 | csusaccuggAfUfCfauaauggcauL96 | 6897 | asdTsgcdCadTuaugdAuCfcagguagsasg | 7553 | CUCUACCUGGAUCAUAAUGGCAA | 8268 |
| AD-1707143.1 | usasccuggaUfCfAfuaauggcaauL96 | 6898 | asdTsugdCcdAuuaudGaUfccagguasgsa | 7554 | UCUACCUGGAUCAUAAUGGCAAU | 8269 |
| AD-1707144.1 | ascscuggauCfAfUfaauggcaauuL96 | 6899 | asdAsuudGcdCauuadTgAfuccaggusasg | 7555 | CUACCUGGAUCAUAAUGGCAAUG | 8270 |
| AD-1707145.1 | cscsuggaucAfUfAfauggcaauguL96 | 6900 | asdCsaudTgdCcauudAuGfauccaggsusa | 7556 | UACCUGGAUCAUAAUGGCAAUGU | 8271 |
| AD-1707146.1 | csusggaucaUfAfAfuggcaauguuL96 | 6901 | asdAscadTudGccaudTaUfgauccagsgsu | 7557 | ACCUGGAUCAUAAUGGCAAUGUG | 8272 |
| AD-1707147.1 | usgsgaucauAfAfUfggcaauguguL96 | 6902 | asdCsacdAudTgccadTuAfugauccasgsg | 7558 | CCUGGAUCAUAAUGGCAAUGUGG | 8273 |
| AD-1707148.1 | gsgsaucauaAfUfGfgcaaugugguL96 | 6903 | asdCscadCadTugccdAuUfaugauccsasg | 7559 | CUGGAUCAUAAUGGCAAUGUGGU | 8274 |
| AD-1707149.1 | gsasucauaaUfGfGfcaaugugguuL96 | 6904 | asdAsccdAcdAuugcdCaUfuaugaucscsa | 7560 | UGGAUCAUAAUGGCAAUGUGGUC | 8275 |
| AD-1707150.1 | asuscauaauGfGfCfaauguggucuL96 | 6905 | asdGsacdCadCauugdCcAfuuaugauscsc | 7561 | GGAUCAUAAUGGCAAUGUGGUCA | 8276 |
| AD-1707151.1 | uscsauaaugGfCfAfauguggucauL96 | 6906 | asdTsgadCcdAcauudGcCfauuaugasusc | 7562 | GAUCAUAAUGGCAAUGUGGUCAA | 8277 |
| AD-1707152.1 | csasuaauggCfAfAfuguggucaauL96 | 6907 | asdTsugdAcdCacaudTgCfcauuaugsasu | 7563 | AUCAUAAUGGCAAUGUGGUCAAG | 8278 |
| AD-1707153.1 | asusaauggcAfAfUfguggucaaguL96 | 6908 | asdCsuudGadCcacadTuGfccauuausgsa | 7564 | UCAUAAUGGCAAUGUGGUCAAGA | 8279 |
| AD-1707154.1 | usasauggcaAfUfGfuggucaagauL96 | 6909 | asdTscudTgdAccacdAuUfgccauuasusg | 7565 | CAUAAUGGCAAUGUGGUCAAGAC | 8280 |
| AD-1707155.1 | asasuggcaaUfGfUfggucaagacuL96 | 6910 | asdGsucdTudGaccadCaUfugccauusasu | 7566 | AUAAUGGCAAUGUGGUCAAGACG | 8281 |
| AD-1707156.1 | asusggcaauGfUfGfgucaagacguL96 | 6911 | asdCsgudCudTgaccdAcAfuugccaususa | 7567 | UAAUGGCAAUGUGGUCAAGACGG | 8282 |
| AD-1707157.1 | usgsgcaaugUfGfGfucaagacgguL96 | 6912 | asdCscgdTcdTugacdCaCfauugccasusu | 7568 | AAUGGCAAUGUGGUCAAGACGGA | 8283 |
| AD-1707158.1 | gsgscaauguGfGfUfcaagacggauL96 | 6913 | asdTsccdGudCuugadCcAfcauugccsasu | 7569 | AUGGCAAUGUGGUCAAGACGGAU | 8284 |
| AD-1707159.1 | gscsaaugugGfUfCfaagacggauuL96 | 6914 | asdAsucdCgdTcuugdAcCfacauugcscsa | 7570 | UGGCAAUGUGGUCAAGACGGAUG | 8285 |
| AD-1707160.1 | csasauguggUfCfAfagacggauguL96 | 6915 | asdCsaudCcdGucuudGaCfcacauugscsc | 7571 | GGCAAUGUGGUCAAGACGGAUGU | 8286 |
| AD-1707161.1 | asasugugguCfAfAfgacggauguuL96 | 6916 | asdAscadTcdCgucudTgAfccacauusgsc | 7572 | GCAAUGUGGUCAAGACGGAUGUG | 8287 |
| AD-1707162.1 | asusguggucAfAfGfacggauguguL96 | 6917 | asdCsacdAudCcgucdTuGfaccacaususg | 7573 | CAAUGUGGUCAAGACGGAUGUGC | 8288 |
| AD-1707163.1 | usgsuggucaAfGfAfcggaugugcuL96 | 6918 | asdGscadCadTccgudCuUfgaccacasusu | 7574 | AAUGUGGUCAAGACGGAUGUGCC | 8289 |
| AD-1707164.1 | gsusggucaaGfAfCfggaugugccuL96 | 6919 | asdGsgcdAcdAuccgdTcUfugaccacsasu | 7575 | AUGUGGUCAAGACGGAUGUGCCA | 8290 |
| AD-1707165.1 | usgsgucaagAfCfGfgaugugccauL96 | 6920 | asdTsggdCadCauccdGuCfuugaccascsa | 7576 | UGUGGUCAAGACGGAUGUGCCAG | 8291 |
| AD-1707166.1 | gsgsucaagaCfGfGfaugugccaguL96 | 6921 | asdCsugdGcdAcaucdCgUfcuugaccsasc | 7577 | GUGGUCAAGACGGAUGUGCCAGA | 8292 |
| AD-1707167.1 | gsuscaagacGfGfAfugugccagauL96 | 6922 | asdTscudGgdCacaudCcGfucuugacscsa | 7578 | UGGUCAAGACGGAUGUGCCAGAU | 8293 |
| AD-1707168.1 | uscsaagacgGfAfUfgugccagauuL96 | 6923 | asdAsucdTgdGcacadTcCfgucuugascsc | 7579 | GGUCAAGACGGAUGUGCCAGAUA | 8294 |
| AD-1707169.1 | csasagacggAfUfGfugccagauauL96 | 6924 | asdTsaudCudGgcacdAuCfcgucuugsasc | 7580 | GUCAAGACGGAUGUGCCAGAUAU | 8295 |
| AD-1707170.1 | asasgacggaUfGfUfgccagauauuL96 | 6925 | asdAsuadTcdTggcadCaUfccgucuusgsa | 7581 | UCAAGACGGAUGUGCCAGAUAUG | 8296 |
| AD-1707171.1 | asgsacggauGfUfGfccagauauguL96 | 6926 | asdCsaudAudCuggcdAcAfuccgucususg | 7582 | CAAGACGGAUGUGCCAGAUAUGG | 8297 |
| AD-1707172.1 | gsascggaugUfGfCfcagauaugguL96 | 6927 | asdCscadTadTcuggdCaCfauccgucsusu | 7583 | AAGACGGAUGUGCCAGAUAUGGU | 8298 |
| AD-1707173.1 | ascsggauguGfCfCfagauaugguuL96 | 6928 | asdAsccdAudAucugdGcAfcauccguscsu | 7584 | AGACGGAUGUGCCAGAUAUGGUG | 8299 |
| AD-1707174.1 | csgsgaugugCfCfAfgauaugguguL96 | 6929 | asdCsacdCadTaucudGgCfacauccgsusc | 7585 | GACGGAUGUGCCAGAUAUGGUGG | 8300 |
| AD-1707176.1 | gsasugugccAfGfAfuauggugguuL96 | 6930 | asdAsccdAcdCauaudCuGfgcacaucscsg | 7586 | CGGAUGUGCCAGAUAUGGUGGUG | 8301 |
| AD-1707177.1 | asusgugccaGfAfUfauggugguguL96 | 6931 | asdCsacdCadCcauadTcUfggcacauscsc | 7587 | GGAUGUGCCAGAUAUGGUGGUGG | 8302 |
| AD-1707178.1 | usgsugccagAfUfAfugguggugguL96 | 6932 | asdCscadCcdAccaudAuCfuggcacasusc | 7588 | GAUGUGCCAGAUAUGGUGGUGGA | 8303 |
| AD-1707179.1 | gsusgccagaUfAfUfggugguggauL96 | 6933 | asdTsccdAcdCaccadTaUfcuggcacsasu | 7589 | AUGUGCCAGAUAUGGUGGUGGAG | 8304 |
| AD-1707180.1 | usgsccagauAfUfGfgugguggaguL96 | 6934 | asdCsucdCadCcaccdAuAfucuggcascsa | 7590 | UGUGCCAGAUAUGGUGGUGGAGG | 8305 |
| AD-1707182.1 | cscsagauauGfGfUfgguggaggcuL96 | 6935 | asdGsccdTcdCaccadCcAfuaucuggscsa | 7591 | UGCCAGAUAUGGUGGUGGAGGCC | 8306 |
| AD-1707189.1 | usgsguggugGfAfGfgccuguggcuL96 | 6936 | asdGsccdAcdAggccdTcCfaccaccasusa | 7592 | UAUGGUGGUGGAGGCCUGUGGCU | 8307 |
| AD-1707190.1 | gsgsugguggAfGfGfccuguggcuuL96 | 6937 | asdAsgcdCadCaggcdCuCfcaccaccsasu | 7593 | AUGGUGGUGGAGGCCUGUGGCUG | 8308 |
| AD-1707197.1 | gsasggccugUfGfGfcugcagcuauL96 | 6938 | asdTsagdCudGcagcdCaCfaggccucscsa | 7594 | UGGAGGCCUGUGGCUGCAGCUAG | 8309 |
| AD-1707200.1 | gscscuguggCfUfGfcagcuagcauL96 | 6939 | asdTsgcdTadGcugcdAgCfcacaggcscsu | 7595 | AGGCCUGUGGCUGCAGCUAGCAA | 8310 |
| AD-1707201.1 | cscsuguggcUfGfCfagcuagcaauL96 | 6940 | asdTsugdCudAgcugdCaGfccacaggscsc | 7596 | GGCCUGUGGCUGCAGCUAGCAAG | 8311 |
| AD-1707202.1 | csusguggcuGfCfAfgcuagcaaguL96 | 6941 | asdCsuudGcdTagcudGcAfgccacagsgsc | 7597 | GCCUGUGGCUGCAGCUAGCAAGA | 8312 |
| AD-1707203.1 | usgsuggcugCfAfGfcuagcaagauL96 | 6942 | asdTscudTgdCuagcdTgCfagccacasgsg | 7598 | CCUGUGGCUGCAGCUAGCAAGAG | 8313 |
| AD-1707204.1 | gsusggcugcAfGfCfuagcaagaguL96 | 6943 | asdCsucdTudGcuagdCuGfcagccacsasg | 7599 | CUGUGGCUGCAGCUAGCAAGAGG | 8314 |
| AD-1707205.1 | usgsgcugcaGfCfUfagcaagagguL96 | 6944 | asdCscudCudTgcuadGcUfgcagccascsa | 7600 | UGUGGCUGCAGCUAGCAAGAGGA | 8315 |
| AD-1707206.1 | gsgscugcagCfUfAfgcaagaggauL96 | 6945 | asdTsccdTcdTugcudAgCfugcagccsasc | 7601 | GUGGCUGCAGCUAGCAAGAGGAC | 8316 |
| AD-1707207.1 | gscsugcagcUfAfGfcaagaggacuL96 | 6946 | asdGsucdCudCuugcdTaGfcugcagcscsa | 7602 | UGGCUGCAGCUAGCAAGAGGACC | 8317 |
| AD-1707208.1 | csusgcagcuAfGfCfaagaggaccuL96 | 6947 | asdGsgudCcdTcuugdCuAfgcugcagscsc | 7603 | GGCUGCAGCUAGCAAGAGGACCU | 8318 |
| AD-1707209.1 | usgscagcuaGfCfAfagaggaccuuL96 | 6948 | asdAsggdTcdCucuudGcUfagcugcasgsc | 7604 | GCUGCAGCUAGCAAGAGGACCUG | 8319 |
| AD-1707210.1 | gscsagcuagCfAfAfgaggaccuguL96 | 6949 | asdCsagdGudCcucudTgCfuagcugcsasg | 7605 | CUGCAGCUAGCAAGAGGACCUGG | 8320 |
| AD-1707211.1 | csasgcuagcAfAfGfaggaccugguL96 | 6950 | asdCscadGgdTccucdTuGfcuagcugscsa | 7606 | UGCAGCUAGCAAGAGGACCUGGG | 8321 |
| AD-1707212.1 | gscsuuuggaGfUfGfaagagaccauL96 | 6951 | asdTsggdTcdTcuucdAcUfccaaagcscsc | 7607 | GGGCUUUGGAGUGAAGAGACCAA | 8322 |
| AD-1707213.1 | csusuuggagUfGfAfagagaccaauL96 | 6952 | asdTsugdGudCucuudCaCfuccaaagscsc | 7608 | GGCUUUGGAGUGAAGAGACCAAG | 8323 |
| AD-1707214.1 | ususuggaguGfAfAfgagaccaaguL96 | 6953 | asdCsuudGgdTcucudTcAfcuccaaasgsc | 7609 | GCUUUGGAGUGAAGAGACCAAGA | 8324 |
| AD-1707216.1 | usgsgagugaAfGfAfgaccaagauuL96 | 6954 | asdAsucdTudGgucudCuUfcacuccasasa | 7610 | UUUGGAGUGAAGAGACCAAGAUG | 8325 |
| AD-1707217.1 | gsgsagugaaGfAfGfaccaagauguL96 | 6955 | asdCsaudCudTggucdTcUfucacuccsasa | 7611 | UUGGAGUGAAGAGACCAAGAUGA | 8326 |
| AD-1707218.1 | gsasgugaagAfGfAfccaagaugauL96 | 6956 | asdTscadTcdTuggudCuCfuucacucscsa | 7612 | UGGAGUGAAGAGACCAAGAUGAA | 8327 |
| AD-1707221.1 | usgsaagagaCfCfAfagaugaaguuL96 | 6957 | asdAscudTcdAucuudGgUfcucuucascsu | 7613 | AGUGAAGAGACCAAGAUGAAGUU | 8328 |
| AD-1707223.1 | asasgagaccAfAfGfaugaaguuuuL96 | 6958 | asdAsaadCudTcaucdTuGfgucucuuscsa | 7614 | UGAAGAGACCAAGAUGAAGUUUC | 8329 |
| AD-1707224.1 | asgsagaccaAfGfAfugaaguuucuL96 | 6959 | asdGsaadAcdTucaudCuUfggucucususc | 7615 | GAAGAGACCAAGAUGAAGUUUCC | 8330 |
| AD-1707225.1 | gsasgaccaaGfAfUfgaaguuuccuL96 | 6960 | asdGsgadAadCuucadTcUfuggucucsusu | 7616 | AAGAGACCAAGAUGAAGUUUCCC | 8331 |
| AD-1707226.1 | asgsaccaagAfUfGfaaguuucccuL96 | 6961 | asdGsggdAadAcuucdAuCfuuggucuscsu | 7617 | AGAGACCAAGAUGAAGUUUCCCA | 8332 |
| AD-1707227.1 | gsasccaagaUfGfAfaguuucccauL96 | 6962 | asdTsggdGadAacuudCaUfcuuggucsusc | 7618 | GAGACCAAGAUGAAGUUUCCCAG | 8333 |
| AD-1707228.1 | ascscaagauGfAfAfguuucccaguL96 | 6963 | asdCsugdGgdAaacudTcAfucuugguscsu | 7619 | AGACCAAGAUGAAGUUUCCCAGG | 8334 |
| AD-1707229.1 | cscsaagaugAfAfGfuuucccagguL96 | 6964 | asdCscudGgdGaaacdTuCfaucuuggsusc | 7620 | GACCAAGAUGAAGUUUCCCAGGC | 8335 |
| AD-1707230.1 | csasagaugaAfGfUfuucccaggcuL96 | 6965 | asdGsccdTgdGgaaadCuUfcaucuugsgsu | 7621 | ACCAAGAUGAAGUUUCCCAGGCA | 8336 |
| AD-1707231.1 | asasgaugaaGfUfUfucccaggcauL96 | 6966 | asdTsgcdCudGggaadAcUfucaucuusgsg | 7622 | CCAAGAUGAAGUUUCCCAGGCAC | 8337 |
| AD-1707232.1 | asgsaugaagUfUfUfcccaggcacuL96 | 6967 | asdGsugdCcdTgggadAaCfuucaucususg | 7623 | CAAGAUGAAGUUUCCCAGGCACA | 8338 |
| AD-1707233.1 | gsasugaaguUfUfCfccaggcacauL96 | 6968 | asdTsgudGcdCugggdAaAfcuucaucsusu | 7624 | AAGAUGAAGUUUCCCAGGCACAG | 8339 |
| AD-1707234.1 | asusgaaguuUfCfCfcaggcacaguL96 | 6969 | asdCsugdTgdCcuggdGaAfacuucauscsu | 7625 | AGAUGAAGUUUCCCAGGCACAGG | 8340 |
| AD-1707236.1 | gsasaguuucCfCfAfggcacaggguL96 | 6970 | asdCsccdTgdTgccudGgGfaaacuucsasu | 7626 | AUGAAGUUUCCCAGGCACAGGGC | 8341 |
| AD-1707237.1 | asasguuuccCfAfGfgcacagggcuL96 | 6971 | asdGsccdCudGugccdTgGfgaaacuuscsa | 7627 | UGAAGUUUCCCAGGCACAGGGCA | 8342 |
| AD-1707239.1 | gsusuucccaGfGfCfacagggcauuL96 | 6972 | asdAsugdCcdCugugdCcUfgggaaacsusu | 7628 | AAGUUUCCCAGGCACAGGGCAUC | 8343 |
| AD-1707240.1 | ususucccagGfCfAfcagggcaucuL96 | 6973 | asdGsaudGcdCcugudGcCfugggaaascsu | 7629 | AGUUUCCCAGGCACAGGGCAUCU | 8344 |
| AD-1707241.1 | ususcccaggCfAfCfagggcaucuuL96 | 6974 | asdAsgadTgdCccugdTgCfcugggaasasc | 7630 | GUUUCCCAGGCACAGGGCAUCUG | 8345 |
| AD-1707242.1 | uscsccaggcAfCfAfgggcaucuguL96 | 6975 | asdCsagdAudGcccudGuGfccugggasasa | 7631 | UUUCCCAGGCACAGGGCAUCUGU | 8346 |
| AD-1707275.1 | csasacccaaCfAfAfccaccuggcuL96 | 6976 | asdGsccdAgdGuggudTgUfuggguugsgsg | 7632 | CCCAACCCAACAACCACCUGGCA | 8347 |
| AD-1707276.1 | asascccaacAfAfCfcaccuggcauL96 | 6977 | asdTsgcdCadGguggdTuGfuuggguusgsg | 7633 | CCAACCCAACAACCACCUGGCAA | 8348 |
| AD-1707277.1 | ascsccaacaAfCfCfaccuggcaauL96 | 6978 | asdTsugdCcdAggugdGuUfguugggususg | 7634 | CAACCCAACAACCACCUGGCAAU | 8349 |
| AD-1707278.1 | cscscaacaaCfCfAfccuggcaauuL96 | 6979 | asdAsuudGcdCaggudGgUfuguugggsusu | 7635 | AACCCAACAACCACCUGGCAAUA | 8350 |
| AD-1707279.1 | cscsaacaacCfAfCfcuggcaauauL96 | 6980 | asdTsaudTgdCcaggdTgGfuuguuggsgsu | 7636 | ACCCAACAACCACCUGGCAAUAU | 8351 |
| AD-1707280.1 | csasacaaccAfCfCfuggcaauauuL96 | 6981 | asdAsuadTudGccagdGuGfguuguugsgsg | 7637 | CCCAACAACCACCUGGCAAUAUG | 8352 |
| AD-1707281.1 | asascaaccaCfCfUfggcaauauguL96 | 6982 | asdCsaudAudTgccadGgUfgguuguusgsg | 7638 | CCAACAACCACCUGGCAAUAUGA | 8353 |
| AD-1707282.1 | ascsaaccacCfUfGfgcaauaugauL96 | 6983 | asdTscadTadTugccdAgGfugguugususg | 7639 | CAACAACCACCUGGCAAUAUGAC | 8354 |
| AD-1707283.1 | csasaccaccUfGfGfcaauaugacuL96 | 6984 | asdGsucdAudAuugcdCaGfgugguugsusu | 7640 | AACAACCACCUGGCAAUAUGACU | 8355 |
| AD-1707284.1 | asasccaccuGfGfCfaauaugacuuL96 | 6985 | asdAsgudCadTauugdCcAfggugguusgsu | 7641 | ACAACCACCUGGCAAUAUGACUC | 8356 |
| AD-1707285.1 | ascscaccugGfCfAfauaugacucuL96 | 6986 | asdGsagdTcdAuauudGcCfagguggususg | 7642 | CAACCACCUGGCAAUAUGACUCA | 8357 |
| AD-1707286.1 | cscsaccuggCfAfAfuaugacucauL96 | 6987 | asdTsgadGudCauaudTgCfcagguggsusu | 7643 | AACCACCUGGCAAUAUGACUCAC | 8358 |
| AD-1707287.1 | csasccuggcAfAfUfaugacucacuL96 | 6988 | asdGsugdAgdTcauadTuGfccaggugsgsu | 7644 | ACCACCUGGCAAUAUGACUCACU | 8359 |
| AD-1707288.1 | ascscuggcaAfUfAfugacucacuuL96 | 6989 | asdAsgudGadGucaudAuUfgccaggusgsg | 7645 | CCACCUGGCAAUAUGACUCACUU | 8360 |
| AD-1707289.1 | cscsuggcaaUfAfUfgacucacuuuL96 | 6990 | asdAsagdTgdAgucadTaUfugccaggsusg | 7646 | CACCUGGCAAUAUGACUCACUUG | 8361 |
| AD-1707290.1 | csusggcaauAfUfGfacucacuuguL96 | 6991 | asdCsaadGudGagucdAuAfuugccagsgsu | 7647 | ACCUGGCAAUAUGACUCACUUGA | 8362 |
| AD-1707291.1 | usgsgcaauaUfGfAfcucacuugauL96 | 6992 | asdTscadAgdTgagudCaUfauugccasgsg | 7648 | CCUGGCAAUAUGACUCACUUGAC | 8363 |
| AD-1707292.1 | gsgscaauauGfAfCfucacuugacuL96 | 6993 | asdGsucdAadGugagdTcAfuauugccsasg | 7649 | CUGGCAAUAUGACUCACUUGACC | 8364 |
| AD-1707293.1 | gscsaauaugAfCfUfcacuugaccuL96 | 6994 | asdGsgudCadAgugadGuCfauauugcscsa | 7650 | UGGCAAUAUGACUCACUUGACCC | 8365 |
| AD-1707299.1 | gsgsacccaaAfUfGfggcacuuucuL96 | 6995 | asdGsaadAgdTgcccdAuUfuggguccscsa | 7651 | UGGGACCCAAAUGGGCACUUUCU | 8366 |
| AD-1707301.1 | ascsccaaauGfGfGfcacuuucuuuL96 | 6996 | asdAsagdAadAgugcdCcAfuuuggguscsc | 7652 | GGACCCAAAUGGGCACUUUCUUG | 8367 |
| AD-1707302.1 | cscscaaaugGfGfCfacuuucuuguL96 | 6997 | asdCsaadGadAagugdCcCfauuugggsusc | 7653 | GACCCAAAUGGGCACUUUCUUGU | 8368 |
| AD-1707303.1 | cscsaaauggGfCfAfcuuucuuguuL96 | 6998 | asdAscadAgdAaagudGcCfcauuuggsgsu | 7654 | ACCCAAAUGGGCACUUUCUUGUC | 8369 |
| AD-1707304.1 | csasaaugggCfAfCfuuucuugucuL96 | 6999 | asdGsacdAadGaaagdTgCfccauuugsgsg | 7655 | CCCAAAUGGGCACUUUCUUGUCU | 8370 |
| AD-1707305.1 | asasaugggcAfCfUfuucuugucuuL96 | 7000 | asdAsgadCadAgaaadGuGfcccauuusgsg | 7656 | CCAAAUGGGCACUUUCUUGUCUG | 8371 |
| AD-1707306.1 | asasugggcaCfUfUfucuugucuguL96 | 7001 | asdCsagdAcdAagaadAgUfgcccauususg | 86 | CAAAUGGGCACUUUCUUGUCUGA | 8372 |
| AD-1707307.1 | asusgggcacUfUfUfcuugucugauL96 | 7002 | asdTscadGadCaagadAaGfugcccaususu | 7657 | AAAUGGGCACUUUCUUGUCUGAG | 8373 |
| AD-1707308.1 | usgsggcacuUfUfCfuugucugaguL96 | 7003 | asdCsucdAgdAcaagdAaAfgugcccasusu | 7658 | AAUGGGCACUUUCUUGUCUGAGA | 8374 |
| AD-1707309.1 | gsgsgcacuuUfCfUfugucugagauL96 | 7004 | asdTscudCadGacaadGaAfagugcccsasu | 7659 | AUGGGCACUUUCUUGUCUGAGAC | 8375 |
| AD-1707310.1 | gsgscacuuuCfUfUfgucugagacuL96 | 7005 | asdGsucdTcdAgacadAgAfaagugccscsa | 7660 | UGGGCACUUUCUUGUCUGAGACU | 8376 |
| AD-1707311.1 | gscsacuuucUfUfGfucugagacuuL96 | 7006 | asdAsgudCudCagacdAaGfaaagugcscsc | 7661 | GGGCACUUUCUUGUCUGAGACUC | 8377 |
| AD-1707312.1 | csascuuucuUfGfUfcugagacucuL96 | 7007 | asdGsagdTcdTcagadCaAfgaaagugscsc | 7662 | GGCACUUUCUUGUCUGAGACUCU | 8378 |
| AD-1707313.1 | ascsuuucuuGfUfCfugagacucuuL96 | 7008 | asdAsgadGudCucagdAcAfagaaagusgsc | 7663 | GCACUUUCUUGUCUGAGACUCUG | 8379 |
| AD-1707314.1 | csusuucuugUfCfUfgagacucuguL96 | 7009 | asdCsagdAgdTcucadGaCfaagaaagsusg | 7664 | CACUUUCUUGUCUGAGACUCUGG | 8380 |
| AD-1707315.1 | ususucuuguCfUfGfagacucugguL96 | 7010 | asdCscadGadGucucdAgAfcaagaaasgsu | 7665 | ACUUUCUUGUCUGAGACUCUGGC | 8381 |
| AD-1707316.1 | ususcuugucUfGfAfgacucuggcuL96 | 7011 | asdGsccdAgdAgucudCaGfacaagaasasg | 7666 | CUUUCUUGUCUGAGACUCUGGCU | 8382 |
| AD-1707317.1 | uscsuugucuGfAfGfacucuggcuuL96 | 7012 | asdAsgcdCadGagucdTcAfgacaagasasa | 7667 | UUUCUUGUCUGAGACUCUGGCUU | 8383 |
| AD-1707318.1 | csusugucugAfGfAfcucuggcuuuL96 | 7013 | asdAsagdCcdAgagudCuCfagacaagsasa | 7668 | UUCUUGUCUGAGACUCUGGCUUA | 8384 |
| AD-1707337.1 | usasuuccagGfUfUfggcugauguuL96 | 7014 | asdAscadTcdAgccadAcCfuggaauasasg | 7669 | CUUAUUCCAGGUUGGCUGAUGUG | 8385 |
| AD-1707338.1 | asusuccaggUfUfGfgcugauguguL96 | 7015 | asdCsacdAudCagccdAaCfcuggaausasa | 7670 | UUAUUCCAGGUUGGCUGAUGUGU | 8386 |
| AD-1707339.1 | ususccagguUfGfGfcugauguguuL96 | 7016 | asdAscadCadTcagcdCaAfccuggaasusa | 7671 | UAUUCCAGGUUGGCUGAUGUGUU | 8387 |
| AD-1707340.1 | uscscagguuGfGfCfugauguguuuL96 | 7017 | asdAsacdAcdAucagdCcAfaccuggasasu | 7672 | AUUCCAGGUUGGCUGAUGUGUUG | 8388 |
| AD-1707341.1 | cscsagguugGfCfUfgauguguuguL96 | 7018 | asdCsaadCadCaucadGcCfaaccuggsasa | 7673 | UUCCAGGUUGGCUGAUGUGUUGG | 8389 |
| AD-1707342.1 | csasgguuggCfUfGfauguguugguL96 | 7019 | asdCscadAcdAcaucdAgCfcaaccugsgsa | 7674 | UCCAGGUUGGCUGAUGUGUUGGG | 8390 |
| AD-1707388.1 | gsasuuuccuGfCfCfcuaaguccuuL96 | 7020 | asdAsggdAcdTuaggdGcAfggaaaucsasu | 7675 | AUGAUUUCCUGCCCUAAGUCCUG | 8391 |
| AD-1707390.1 | ususuccugcCfCfUfaaguccuguuL96 | 7021 | asdAscadGgdAcuuadGgGfcaggaaasusc | 7676 | GAUUUCCUGCCCUAAGUCCUGUG | 8392 |
| AD-1707411.1 | asgsaagaugUfCfAfgggacuagguL96 | 7022 | asdCscudAgdTcccudGaCfaucuucuscsa | 7677 | UGAGAAGAUGUCAGGGACUAGGG | 8393 |
| AD-1707412.1 | gsasagauguCfAfGfggacuaggguL96 | 7023 | asdCsccdTadGucccdTgAfcaucuucsusc | 7678 | GAGAAGAUGUCAGGGACUAGGGA | 8394 |
| AD-1707415.1 | asasgaugucAfGfGfgacuagggauL96 | 7024 | asdTsccdCudAguccdCuGfacaucuuscsu | 7679 | AGAAGAUGUCAGGGACUAGGGAG | 8395 |
| AD-1707416.1 | asgsaugucaGfGfGfacuagggaguL96 | 7025 | asdCsucdCcdTagucdCcUfgacaucususc | 7680 | GAAGAUGUCAGGGACUAGGGAGG | 8396 |
| AD-1707417.1 | gsasugucagGfGfAfcuagggagguL96 | 7026 | asdCscudCcdCuagudCcCfugacaucsusu | 7681 | AAGAUGUCAGGGACUAGGGAGGG | 8397 |
| AD-1707418.1 | asusgucaggGfAfCfuagggaggguL96 | 7027 | asdCsccdTcdCcuagdTcCfcugacauscsu | 7682 | AGAUGUCAGGGACUAGGGAGGGA | 8398 |
| AD-1707466.1 | gsasggaggaAfGfCfagauagauguL96 | 7028 | asdCsaudCudAucugdCuUfccuccucscsc | 7683 | GGGAGGAGGAAGCAGAUAGAUGG | 8399 |
| AD-1707467.1 | asgsgaggaaGfCfAfgauagaugguL96 | 7029 | asdCscadTcdTaucudGcUfuccuccuscsc | 7684 | GGAGGAGGAAGCAGAUAGAUGGU | 8400 |
| AD-1707468.1 | gsgsaggaagCfAfGfauagaugguuL96 | 7030 | asdAsccdAudCuaucdTgCfuuccuccsusc | 7685 | GAGGAGGAAGCAGAUAGAUGGUC | 8401 |
| AD-1707469.1 | gsasggaagcAfGfAfuagauggucuL96 | 7031 | asdGsacdCadTcuaudCuGfcuuccucscsu | 7686 | AGGAGGAAGCAGAUAGAUGGUCC | 8402 |
| AD-1707470.1 | asgsgaagcaGfAfUfagaugguccuL96 | 7032 | asdGsgadCcdAucuadTcUfgcuuccuscsc | 7687 | GGAGGAAGCAGAUAGAUGGUCCA | 8403 |
| AD-1707471.1 | gsgsaagcagAfUfAfgaugguccauL96 | 7033 | asdTsggdAcdCaucudAuCfugcuuccsusc | 7688 | GAGGAAGCAGAUAGAUGGUCCAG | 8404 |
| AD-1707472.1 | gsasagcagaUfAfGfaugguccaguL96 | 7034 | asdCsugdGadCcaucdTaUfcugcuucscsu | 7689 | AGGAAGCAGAUAGAUGGUCCAGC | 8405 |
| AD-1707473.1 | asasgcagauAfGfAfugguccagcuL96 | 7035 | asdGscudGgdAccaudCuAfucugcuuscsc | 7690 | GGAAGCAGAUAGAUGGUCCAGCA | 8406 |
| AD-1707474.1 | asgscagauaGfAfUfgguccagcauL96 | 7036 | asdTsgcdTgdGaccadTcUfaucugcususc | 7691 | GAAGCAGAUAGAUGGUCCAGCAG | 8407 |
| AD-1707475.1 | gscsagauagAfUfGfguccagcaguL96 | 7037 | asdCsugdCudGgaccdAuCfuaucugcsusu | 7692 | AAGCAGAUAGAUGGUCCAGCAGG | 8408 |
| AD-1707476.1 | csasgauagaUfGfGfuccagcagguL96 | 7038 | asdCscudGcdTggacdCaUfcuaucugscsu | 7693 | AGCAGAUAGAUGGUCCAGCAGGC | 8409 |
| AD-1707477.1 | asgsauagauGfGfUfccagcaggcuL96 | 7039 | asdGsccdTgdCuggadCcAfucuaucusgsc | 7694 | GCAGAUAGAUGGUCCAGCAGGCU | 8410 |
| AD-1707478.1 | gsasuagaugGfUfCfcagcaggcuuL96 | 7040 | asdAsgcdCudGcuggdAcCfaucuaucsusg | 7695 | CAGAUAGAUGGUCCAGCAGGCUU | 8411 |
| AD-1707479.1 | asusagauggUfCfCfagcaggcuuuL96 | 7041 | asdAsagdCcdTgcugdGaCfcaucuauscsu | 7696 | AGAUAGAUGGUCCAGCAGGCUUG | 8412 |
| AD-1707480.1 | usasgaugguCfCfAfgcaggcuuguL96 | 7042 | asdCsaadGcdCugcudGgAfccaucuasusc | 7697 | GAUAGAUGGUCCAGCAGGCUUGA | 8413 |
| AD-1707481.1 | asgsauggucCfAfGfcaggcuugauL96 | 7043 | asdTscadAgdCcugcdTgGfaccaucusasu | 7698 | AUAGAUGGUCCAGCAGGCUUGAA | 8414 |
| AD-1707482.1 | gsasugguccAfGfCfaggcuugaauL96 | 7044 | asdTsucdAadGccugdCuGfgaccaucsusa | 7699 | UAGAUGGUCCAGCAGGCUUGAAG | 8415 |
| AD-1707483.1 | asusgguccaGfCfAfggcuugaaguL96 | 7045 | asdCsuudCadAgccudGcUfggaccauscsu | 7700 | AGAUGGUCCAGCAGGCUUGAAGC | 8416 |
| AD-1707484.1 | usgsguccagCfAfGfgcuugaagcuL96 | 7046 | asdGscudTcdAagccdTgCfuggaccasusc | 7701 | GAUGGUCCAGCAGGCUUGAAGCA | 8417 |
| AD-1707485.1 | gsgsuccagcAfGfGfcuugaagcauL96 | 7047 | asdTsgcdTudCaagcdCuGfcuggaccsasu | 7702 | AUGGUCCAGCAGGCUUGAAGCAG | 8418 |
| AD-1707486.1 | gsusccagcaGfGfCfuugaagcaguL96 | 7048 | asdCsugdCudTcaagdCcUfgcuggacscsa | 7703 | UGGUCCAGCAGGCUUGAAGCAGG | 8419 |
| AD-1707553.1 | asasggucaaGfAfGfggagauggguL96 | 7049 | asdCsccdAudCucccdTcUfugaccuuscsc | 7704 | GGAAGGUCAAGAGGGAGAUGGGC | 8420 |
| AD-1707554.1 | asgsgucaagAfGfGfgagaugggcuL96 | 7050 | asdGsccdCadTcuccdCuCfuugaccususc | 7705 | GAAGGUCAAGAGGGAGAUGGGCA | 8421 |
| AD-1707555.1 | gsgsucaagaGfGfGfagaugggcauL96 | 7051 | asdTsgcdCcdAucucdCcUfcuugaccsusu | 7706 | AAGGUCAAGAGGGAGAUGGGCAA | 8422 |
| AD-1707556.1 | gsuscaagagGfGfAfgaugggcaauL96 | 7052 | asdTsugdCcdCaucudCcCfucuugacscsu | 7707 | AGGUCAAGAGGGAGAUGGGCAAG | 8423 |
| AD-1707557.1 | uscsaagaggGfAfGfaugggcaaguL96 | 7053 | asdCsuudGcdCcaucdTcCfcucuugascsc | 7708 | GGUCAAGAGGGAGAUGGGCAAGG | 8424 |
| AD-1707577.1 | gscsgcugagGfGfAfggaugcuuauL96 | 7054 | asdTsaadGcdAuccudCcCfucagcgcscsu | 7709 | AGGCGCUGAGGGAGGAUGCUUAG | 8425 |
| AD-1707578.1 | csgscugaggGfAfGfgaugcuuaguL96 | 7055 | asdCsuadAgdCauccdTcCfcucagcgscsc | 7710 | GGCGCUGAGGGAGGAUGCUUAGG | 8426 |
| AD-1707605.1 | gscsacuaagCfCfUfaagaaguucuL96 | 7056 | asdGsaadCudTcuuadGgCfuuagugcscsu | 7711 | AGGCACUAAGCCUAAGAAGUUCC | 8427 |
| AD-1707606.1 | csascuaagcCfUfAfagaaguuccuL96 | 7057 | asdGsgadAcdTucuudAgGfcuuagugscsc | 7712 | GGCACUAAGCCUAAGAAGUUCCC | 8428 |
| AD-1707623.1 | ascsaggaccCfAfCfugggagacauL96 | 7058 | asdTsgudCudCccagdTgGfguccuguscsc | 7713 | GGACAGGACCCACUGGGAGACAA | 8429 |
| AD-1707624.1 | csasggacccAfCfUfgggagacaauL96 | 7059 | asdTsugdTcdTcccadGuGfgguccugsusc | 7714 | GACAGGACCCACUGGGAGACAAG | 8430 |
| AD-1707625.1 | asgsgacccaCfUfGfggagacaaguL96 | 7060 | asdCsuudGudCucccdAgUfggguccusgsu | 7715 | ACAGGACCCACUGGGAGACAAGC | 8431 |
| AD-1707626.1 | gsgsacccacUfGfGfgagacaagcuL96 | 7061 | asdGscudTgdTcuccdCaGfuggguccsusg | 7716 | CAGGACCCACUGGGAGACAAGCA | 8432 |
| AD-1707627.1 | gsascccacuGfGfGfagacaagcauL96 | 7062 | asdTsgcdTudGucucdCcAfgugggucscsu | 7717 | AGGACCCACUGGGAGACAAGCAU | 8433 |
| AD-1707628.1 | ascsccacugGfGfAfgacaagcauuL96 | 7063 | asdAsugdCudTgucudCcCfaguggguscsc | 7718 | GGACCCACUGGGAGACAAGCAUU | 8434 |
| AD-1707629.1 | cscscacuggGfAfGfacaagcauuuL96 | 7064 | asdAsaudGcdTugucdTcCfcagugggsusc | 7719 | GACCCACUGGGAGACAAGCAUUU | 8435 |
| AD-1707630.1 | cscsacugggAfGfAfcaagcauuuuL96 | 7065 | asdAsaadTgdCuugudCuCfccaguggsgsu | 7720 | ACCCACUGGGAGACAAGCAUUUA | 8436 |
| AD-1707631.1 | csascugggaGfAfCfaagcauuuauL96 | 7066 | asdTsaadAudGcuugdTcUfcccagugsgsg | 7721 | CCCACUGGGAGACAAGCAUUUAU | 8437 |
| AD-1707632.1 | ascsugggagAfCfAfagcauuuauuL96 | 7067 | asdAsuadAadTgcuudGuCfucccagusgsg | 7722 | CCACUGGGAGACAAGCAUUUAUA | 8438 |
| AD-1707633.1 | csusgggagaCfAfAfgcauuuauauL96 | 7068 | asdTsaudAadAugcudTgUfcucccagsusg | 7723 | CACUGGGAGACAAGCAUUUAUAC | 8439 |
| AD-1707634.1 | usgsggagacAfAfGfcauuuauacuL96 | 7069 | asdGsuadTadAaugcdTuGfucucccasgsu | 7724 | ACUGGGAGACAAGCAUUUAUACU | 8440 |
| AD-1707636.1 | gsgsagacaaGfCfAfuuuauacuuuL96 | 7070 | asdAsagdTadTaaaudGcUfugucuccscsa | 7725 | UGGGAGACAAGCAUUUAUACUUU | 8441 |
| AD-1707637.1 | gsasgacaagCfAfUfuuauacuuuuL96 | 7071 | asdAsaadGudAuaaadTgCfuugucucscsc | 7726 | GGGAGACAAGCAUUUAUACUUUC | 8442 |
| AD-1707638.1 | asgsacaagcAfUfUfuauacuuucuL96 | 7072 | asdGsaadAgdTauaadAuGfcuugucuscsc | 7727 | GGAGACAAGCAUUUAUACUUUCU | 8443 |
| AD-1707639.1 | gsascaagcaUfUfUfauacuuucuuL96 | 7073 | asdAsgadAadGuauadAaUfgcuugucsusc | 88 | GAGACAAGCAUUUAUACUUUCUU | 8444 |
| AD-1707640.1 | ascsaagcauUfUfAfuacuuucuuuL96 | 7074 | asdAsagdAadAguaudAaAfugcuuguscsu | 90 | AGACAAGCAUUUAUACUUUCUUU | 8445 |
| AD-1707641.1 | csasagcauuUfAfUfacuuucuuuuL96 | 7075 | asdAsaadGadAaguadTaAfaugcuugsusc | 7728 | GACAAGCAUUUAUACUUUCUUUC | 8446 |
| AD-1708118.1 | cscsagacAfuGfAfGfcugugaggguL96 | 7076 | asCfsccdTc(Agn)cagcucAfuGfucuggscsu | 7729 | AGCCAGACAUGAGCUGUGAGGGU | 7945 |
| AD-1708120.1 | asgsacauGfaGfCfUfgugagggucuL96 | 7077 | asGfsacdCc(Tgn)cacagcUfcAfugucusgsg | 7730 | CCAGACAUGAGCUGUGAGGGUCA | 7946 |
| AD-1708124.1 | asusgagcUfgUfGfAfgggucaagcuL96 | 7078 | asGfscudTg(Agn)cccucaCfaGfcucausgsu | 7731 | ACAUGAGCUGUGAGGGUCAAGCA | 7950 |
| AD-1708126.1 | gsasgcugUfgAfGfGfgucaagcacuL96 | 7079 | asGfsugdCu(Tgn)gacccuCfaCfagcucsasu | 7732 | AUGAGCUGUGAGGGUCAAGCACA | 7952 |
| AD-1708127.1 | asgscuguGfaGfGfGfucaagcacauL96 | 7080 | asUfsgudGc(Tgn)ugacccUfcAfcagcuscsa | 7733 | UGAGCUGUGAGGGUCAAGCACAG | 7953 |
| AD-1708130.1 | usgsugagGfgUfCfAfagcacagcuuL96 | 7081 | asAfsgcdTg(Tgn)gcuugaCfcCfucacasgsc | 7734 | GCUGUGAGGGUCAAGCACAGCUA | 7956 |
| AD-1708132.1 | usgsagggUfcAfAfGfcacagcuauuL96 | 7082 | asAfsuadGc(Tgn)gugcuuGfaCfccucascsa | 7735 | UGUGAGGGUCAAGCACAGCUAUC | 7958 |
| AD-1708135.1 | gsgsgucaAfgCfAfCfagcuauccauL96 | 7083 | asUfsggdAu(Agn)gcugugCfuUfgacccsusc | 7736 | GAGGGUCAAGCACAGCUAUCCAU | 7961 |
| AD-1708140.1 | asasgcacAfgCfUfAfuccaucagauL96 | 7084 | asUfscudGa(Tgn)ggauagCfuGfugcuusgsa | 7737 | UCAAGCACAGCUAUCCAUCAGAU | 7963 |
| AD-1708143.1 | csascagcUfaUfCfCfaucagaugauL96 | 7085 | asUfscadTc(Tgn)gauggaUfaGfcugugscsu | 7738 | AGCACAGCUAUCCAUCAGAUGAU | 7965 |
| AD-1708145.1 | csasgcuaUfcCfAfUfcagaugaucuL96 | 7086 | asGfsaudCa(Tgn)cugaugGfaUfagcugsusg | 7739 | CACAGCUAUCCAUCAGAUGAUCU | 7967 |
| AD-1708146.1 | asgscuauCfcAfUfCfagaugaucuuL96 | 7087 | asAfsgadTc(Agn)ucugauGfgAfuagcusgsu | 7740 | ACAGCUAUCCAUCAGAUGAUCUA | 7968 |
| AD-1708148.1 | csusauccAfuCfAfGfaugaucuacuL96 | 7088 | asGfsuadGa(Tgn)caucugAfuGfgauagscsu | 7741 | AGCUAUCCAUCAGAUGAUCUACU | 7970 |
| AD-1708149.1 | usasuccaUfcAfGfAfugaucuacuuL96 | 7089 | asAfsgudAg(Agn)ucaucuGfaUfggauasgsc | 7742 | GCUAUCCAUCAGAUGAUCUACUU | 7971 |
| AD-1708151.1 | uscscaucAfgAfUfGfaucuacuuuuL96 | 7090 | asAfsaadGu(Agn)gaucauCfuGfauggasusa | 7743 | UAUCCAUCAGAUGAUCUACUUUC | 7973 |
| AD-1708152.1 | cscsaucaGfaUfGfAfucuacuuucuL96 | 7091 | asGfsaadAg(Tgn)agaucaUfcUfgauggsasu | 7744 | AUCCAUCAGAUGAUCUACUUUCA | 7974 |
| AD-1708156.1 | csasgaugAfuCfUfAfcuuucagccuL96 | 7092 | asGfsgcdTg(Agn)aaguagAfuCfaucugsasu | 7745 | AUCAGAUGAUCUACUUUCAGCCU | 7978 |
| AD-1708158.1 | gsasugauCfuAfCfUfuucagccuuuL96 | 7093 | asAfsagdGc(Tgn)gaaaguAfgAfucaucsusg | 7746 | CAGAUGAUCUACUUUCAGCCUUC | 7980 |
| AD-1708163.1 | uscsuacuUfuCfAfGfccuuccugauL96 | 7094 | asUfscadGg(Agn)aggcugAfaAfguagasusc | 7747 | GAUCUACUUUCAGCCUUCCUGAG | 7985 |
| AD-1708166.1 | ascsuuucAfgCfCfUfuccugagucuL96 | 7095 | asGfsacdTc(Agn)ggaaggCfuGfaaagusasg | 7748 | CUACUUUCAGCCUUCCUGAGUCC | 7988 |
| AD-1708170.1 | uscsagccUfuCfCfUfgagucccaguL96 | 7096 | asCfsugdGg(Agn)cucaggAfaGfgcugasasa | 7749 | UUUCAGCCUUCCUGAGUCCCAGG | 8447 |
| AD-1708220.1 | gsusggcaGfuGfGfUfgucugcuguuL96 | 405 | asAfscadGc(Agn)gacaccAfcUfgccacsasc | 7750 | GUGUGGCAGUGGUGUCUGCUGUC | 7992 |
| AD-1708223.1 | gscsagugGfuGfUfCfugcugucacuL96 | 7097 | asGfsugdAc(Agn)gcagacAfcCfacugcscsa | 7751 | UGGCAGUGGUGUCUGCUGUCACU | 7995 |
| AD-1708225.1 | asgsugguGfuCfUfGfcugucacuguL96 | 7098 | asCfsagdTg(Agn)cagcagAfcAfccacusgsc | 7752 | GCAGUGGUGUCUGCUGUCACUGU | 7997 |
| AD-1708227.1 | usgsguguCfuGfCfUfgucacuguguL96 | 7099 | asCfsacdAg(Tgn)gacagcAfgAfcaccascsu | 7753 | AGUGGUGUCUGCUGUCACUGUGC | 7999 |
| AD-1708245.1 | gsascucaAfcAfGfAfcggagcaacuL96 | 7100 | asGfsuudGc(Tgn)ccgucuGfuUfgagucsusg | 7754 | CAGACUCAACAGACGGAGCAACU | 8003 |
| AD-1708248.1 | uscsaacaGfaCfGfGfagcaacugcuL96 | 7101 | asGfscadGu(Tgn)gcuccgUfcUfguugasgsu | 7755 | ACUCAACAGACGGAGCAACUGCC | 8006 |
| AD-1708249.1 | csasacagAfcGfGfAfgcaacugccuL96 | 7102 | asGfsgcdAg(Tgn)ugcuccGfuCfuguugsasg | 7756 | CUCAACAGACGGAGCAACUGCCA | 8007 |
| AD-1708251.1 | ascsagacGfgAfGfCfaacugccauuL96 | 7103 | asAfsugdGc(Agn)guugcuCfcGfucugususg | 7757 | CAACAGACGGAGCAACUGCCAUC | 8009 |
| AD-1708255.1 | ascsggagCfaAfCfUfgccauccgauL96 | 408 | asUfscgdGa(Tgn)ggcaguUfgCfuccguscsu | 7758 | AGACGGAGCAACUGCCAUCCGAG | 8013 |
| AD-1708260.1 | gscsaacuGfcCfAfUfccgaggcucuL96 | 7104 | asGfsagdCc(Tgn)cggaugGfcAfguugcsusc | 7759 | GAGCAACUGCCAUCCGAGGCUCC | 8017 |
| AD-1708342.1 | csasagcaGfaAfCfGfagcucugguuL96 | 415 | asAfsccdAg(Agn)gcucguUfcUfgcuugsgsg | 7760 | CCCAAGCAGAACGAGCUCUGGUG | 8019 |
| AD-1708344.1 | asgscagaAfcGfAfGfcucuggugcuL96 | 7105 | asGfscadCc(Agn)gagcucGfuUfcugcususg | 7761 | CAAGCAGAACGAGCUCUGGUGCU | 8021 |
| AD-1708347.1 | asgsaacgAfgCfUfCfuggugcugguL96 | 7106 | asCfscadGc(Agn)ccagagCfuCfguucusgsc | 7762 | GCAGAACGAGCUCUGGUGCUGGA | 8024 |
| AD-1708350.1 | ascsgagcUfcUfGfGfugcuggagcuL96 | 7107 | asGfscudCc(Agn)gcaccaGfaGfcucgususc | 7763 | GAACGAGCUCUGGUGCUGGAGCU | 8027 |
| AD-1708356.1 | uscsugguGfcUfGfGfagcuagccauL96 | 7108 | asUfsggdCu(Agn)gcuccaGfcAfccagasgsc | 7764 | GCUCUGGUGCUGGAGCUAGCCAA | 8031 |
| AD-1708357.1 | csusggugCfuGfGfAfgcuagccaauL96 | 416 | asUfsugdGc(Tgn)agcuccAfgCfaccagsasg | 7765 | CUCUGGUGCUGGAGCUAGCCAAG | 8032 |
| AD-1708361.1 | usgscuggAfgCfUfAfgccaagcaguL96 | 7109 | asCfsugdCu(Tgn)ggcuagCfuCfcagcascsc | 7766 | GGUGCUGGAGCUAGCCAAGCAGC | 8036 |
| AD-1708365.1 | gsgsagcuAfgCfCfAfagcagcaaauL96 | 7110 | asUfsuudGc(Tgn)gcuuggCfuAfgcuccsasg | 7767 | CUGGAGCUAGCCAAGCAGCAAAU | 8037 |
| AD-1708368.1 | gscsuagcCfaAfGfCfagcaaauccuL96 | 7111 | asGfsgadTu(Tgn)gcugcuUfgGfcuagcsusc | 7768 | GAGCUAGCCAAGCAGCAAAUCCU | 8040 |
| AD-1708369.1 | csusagccAfaGfCfAfgcaaauccuuL96 | 417 | asAfsggdAu(Tgn)ugcugcUfuGfgcuagscsu | 7769 | AGCUAGCCAAGCAGCAAAUCCUG | 8041 |
| AD-1708397.1 | usgsaccaGfuCfGfUfcccagaauauL96 | 7112 | asUfsaudTc(Tgn)gggacgAfcUfggucasgsg | 7770 | UCUGACCAGUCGUCCCAGAAUAA | 8448 |
| AD-1708399.1 | ascscaguCfgUfCfCfcagaauaacuL96 | 7113 | asGfsuudAu(Tgn)cugggaCfgAfcugguscsa | 7771 | UGACCAGUCGUCCCAGAAUAACU | 8050 |
| AD-1708401.1 | csasgucgUfcCfCfAfgaauaacucuL96 | 7114 | asGfsagdTu(Agn)uucuggGfaCfgacugsgsu | 7772 | ACCAGUCGUCCCAGAAUAACUCA | 8052 |
| AD-1708402.1 | asgsucguCfcCfAfGfaauaacucauL96 | 7115 | asUfsgadGu(Tgn)auucugGfgAfcgacusgsg | 7773 | CCAGUCGUCCCAGAAUAACUCAU | 8053 |
| AD-1708403.1 | gsuscgucCfcAfGfAfauaacucauuL96 | 7116 | asAfsugdAg(Tgn)uauucuGfgGfacgacsusg | 7774 | CAGUCGUCCCAGAAUAACUCAUC | 8054 |
| AD-1708405.1 | csgsucccAfgAfAfUfaacucauccuL96 | 7117 | asGfsgadTg(Agn)guuauuCfuGfggacgsasc | 7775 | GUCGUCCCAGAAUAACUCAUCCU | 8056 |
| AD-1708407.1 | uscsccagAfaUfAfAfcucauccucuL96 | 7118 | asGfsagdGa(Tgn)gaguuaUfuCfugggascsg | 7776 | CGUCCCAGAAUAACUCAUCCUCC | 8058 |
| AD-1708408.1 | cscscagaAfuAfAfCfucauccuccuL96 | 7119 | asGfsgadGg(Agn)ugaguuAfuUfcugggsasc | 7777 | GUCCCAGAAUAACUCAUCCUCCA | 8059 |
| AD-1708447.1 | gsgsgaguGfuGfGfCfuccagggaauL96 | 7120 | asUfsucdCc(Tgn)ggagccAfcAfcucccsusg | 7778 | CAGGGAGUGUGGCUCCAGGGAAU | 8062 |
| AD-1708454.1 | gsasggucAfuCfAfGfcuuugcuacuL96 | 7121 | asGfsuadGc(Agn)aagcugAfuGfaccucscsu | 7779 | AGGAGGUCAUCAGCUUUGCUACU | 8069 |
| AD-1708457.1 | gsuscaucAfgCfUfUfugcuacuguuL96 | 7122 | asAfscadGu(Agn)gcaaagCfuGfaugacscsu | 7780 | AGGUCAUCAGCUUUGCUACUGUC | 8072 |
| AD-1708458.1 | uscsaucaGfcUfUfUfgcuacugucuL96 | 7123 | asGfsacdAg(Tgn)agcaaaGfcUfgaugascsc | 7781 | GGUCAUCAGCUUUGCUACUGUCA | 8073 |
| AD-1708462.1 | csasgcuuUfgCfUfAfcugucacaguL96 | 7124 | asCfsugdTg(Agn)caguagCfaAfagcugsasu | 7782 | AUCAGCUUUGCUACUGUCACAGA | 8075 |
| AD-1708464.1 | gscsuuugCfuAfCfUfgucacagacuL96 | 7125 | asGfsucdTg(Tgn)gacaguAfgCfaaagcsusg | 7783 | CAGCUUUGCUACUGUCACAGACU | 8077 |
| AD-1708466.1 | ususugcuAfcUfGfUfcacagacucuL96 | 7126 | asGfsagdTc(Tgn)gugacaGfuAfgcaaasgsc | 7784 | GCUUUGCUACUGUCACAGACUCC | 8079 |
| AD-1708468.1 | usgscuacUfgUfCfAfcagacuccauL96 | 7127 | asUfsggdAg(Tgn)cugugaCfaGfuagcasasa | 7785 | UUUGCUACUGUCACAGACUCCAC | 8081 |
| AD-1708473.1 | csusgucaCfaGfAfCfuccacuucauL96 | 425 | asUfsgadAg(Tgn)ggagucUfgUfgacagsusa | 80 | UACUGUCACAGACUCCACUUCAG | 8083 |
| AD-1708476.1 | uscsacagAfcUfCfCfacuucagccuL96 | 7128 | asGfsgcdTg(Agn)aguggaGfuCfugugascsa | 7786 | UGUCACAGACUCCACUUCAGCCU | 8085 |
| AD-1708478.1 | ascsagacUfcCfAfCfuucagccuauL96 | 7129 | asUfsagdGc(Tgn)gaagugGfaGfucugusgsa | 7787 | UCACAGACUCCACUUCAGCCUAC | 8087 |
| AD-1708482.1 | ascsuccaCfuUfCfAfgccuacagcuL96 | 7130 | asGfscudGu(Agn)ggcugaAfgUfggaguscsu | 7788 | AGACUCCACUUCAGCCUACAGCU | 8091 |
| AD-1708483.1 | csusccacUfuCfAfGfccuacagcuuL96 | 7131 | asAfsgcdTg(Tgn)aggcugAfaGfuggagsusc | 7789 | GACUCCACUUCAGCCUACAGCUC | 8092 |
| AD-1708485.1 | cscsacuuCfaGfCfCfuacagcuccuL96 | 7132 | asGfsgadGc(Tgn)guaggcUfgAfaguggsasg | 7790 | CUCCACUUCAGCCUACAGCUCCC | 8094 |
| AD-1708559.1 | usgsgcacUfcUfUfUfgcuugaggauL96 | 7133 | asUfsccdTc(Agn)agcaaaGfaGfugccasgsg | 7791 | CCUGGCACUCUUUGCUUGAGGAU | 8111 |
| AD-1708561.1 | gscsacucUfuUfGfCfuugaggaucuL96 | 7134 | asGfsaudCc(Tgn)caagcaAfaGfagugcscsa | 7792 | UGGCACUCUUUGCUUGAGGAUCU | 8113 |
| AD-1708564.1 | csuscuuuGfcUfUfGfaggaucuucuL96 | 432 | asGfsaadGa(Tgn)ccucaaGfcAfaagagsusg | 7793 | CACUCUUUGCUUGAGGAUCUUCC | 8115 |
| AD-1708565.1 | uscsuuugCfuUfGfAfggaucuuccuL96 | 7135 | asGfsgadAg(Agn)uccucaAfgCfaaagasgsu | 7794 | ACUCUUUGCUUGAGGAUCUUCCG | 8116 |
| AD-1708567.1 | ususugcuUfgAfGfGfaucuuccgauL96 | 7136 | asUfscgdGa(Agn)gauccuCfaAfgcaaasgsa | 7795 | UCUUUGCUUGAGGAUCUUCCGAU | 8118 |
| AD-1708647.1 | usgsgcugAfgCfAfCfcacaucaccuL96 | 7137 | asGfsgudGa(Tgn)guggugCfuCfagccasgsg | 7796 | UUUGGCUGAGCACCACAUCACCA | 8449 |
| AD-1708648.1 | gsgscugaGfcAfCfCfacaucaccauL96 | 7138 | asUfsggdTg(Agn)ugugguGfcUfcagccsasg | 7797 | UUGGCUGAGCACCACAUCACCAA | 8450 |
| AD-1708650.1 | csusgagcAfcCfAfCfaucaccaacuL96 | 7139 | asGfsuudGg(Tgn)gaugugGfuGfcucagscsc | 7798 | GGCUGAGCACCACAUCACCAACC | 8126 |
| AD-1708657.1 | cscsacauCfaCfCfAfaccugggcuuL96 | 7140 | asAfsgcdCc(Agn)gguuggUfgAfuguggsusg | 7799 | CACCACAUCACCAACCUGGGCUG | 8131 |
| AD-1708662.1 | uscsaccaAfcCfUfGfggcuggcauuL96 | 7141 | asAfsugdCc(Agn)gcccagGfuUfggugasusg | 7800 | CAUCACCAACCUGGGCUGGCAUG | 8451 |
| AD-1708680.1 | cscsuuaaCfuCfUfGfcccucuaguuL96 | 7142 | asAfscudAg(Agn)gggcagAfgUfuaaggsusa | 7801 | UACCUUAACUCUGCCCUCUAGUG | 8138 |
| AD-1708683.1 | usasacucUfgCfCfCfucuaguggcuL96 | 7143 | asGfsccdAc(Tgn)agagggCfaGfaguuasasg | 7802 | CUUAACUCUGCCCUCUAGUGGCU | 8141 |
| AD-1708697.1 | gsuscuggUfgUfCfCfugaaacugcuL96 | 7144 | asGfscadGu(Tgn)ucaggaCfaCfcagacsusu | 7803 | AAGUCUGGUGUCCUGAAACUGCA | 8144 |
| AD-1708698.1 | uscsugguGfuCfCfUfgaaacugcauL96 | 7145 | asUfsgcdAg(Tgn)uucaggAfcAfccagascsu | 7804 | AGUCUGGUGUCCUGAAACUGCAA | 8145 |
| AD-1708700.1 | usgsguguCfcUfGfAfaacugcaacuL96 | 7146 | asGfsuudGc(Agn)guuucaGfgAfcaccasgsa | 7805 | UCUGGUGUCCUGAAACUGCAACU | 8147 |
| AD-1708704.1 | gsusccugAfaAfCfUfgcaacuagauL96 | 439 | asUfscudAg(Tgn)ugcaguUfuCfaggacsasc | 7806 | GUGUCCUGAAACUGCAACUAGAC | 8151 |
| AD-1708706.1 | cscsugaaAfcUfGfCfaacuagacuuL96 | 7147 | asAfsgudCu(Agn)guugcaGfuUfucaggsasc | 7807 | GUCCUGAAACUGCAACUAGACUG | 8153 |
| AD-1708707.1 | csusgaaaCfuGfCfAfacuagacuguL96 | 7148 | asCfsagdTc(Tgn)aguugcAfgUfuucagsgsa | 7808 | UCCUGAAACUGCAACUAGACUGC | 8154 |
| AD-1708709.1 | gsasaacuGfcAfAfCfuagacugcauL96 | 7149 | asUfsgcdAg(Tgn)cuaguuGfcAfguuucsasg | 7809 | CUGAAACUGCAACUAGACUGCAG | 8156 |
| AD-1708711.1 | asascugcAfaCfUfAfgacugcagauL96 | 7150 | asUfscudGc(Agn)gucuagUfuGfcaguususc | 7810 | GAAACUGCAACUAGACUGCAGAC | 8158 |
| AD-1708719.1 | gscsaacaGfcAfCfAfguuacuggauL96 | 7151 | asUfsccdAg(Tgn)aacuguGfcUfguugcscsu | 7811 | AGGCAACAGCACAGUUACUGGAC | 8161 |
| AD-1708721.1 | asascagcAfcAfGfUfuacuggacauL96 | 7152 | asUfsgudCc(Agn)guaacuGfuGfcuguusgsc | 7812 | ACAACAGCACAGUUACUGGACAA | 8452 |
| AD-1708724.1 | asgscacaGfuUfAfCfuggacaaccuL96 | 7153 | asGfsgudTg(Tgn)ccaguaAfcUfgugcusgsu | 7813 | ACAGCACAGUUACUGGACAACCG | 8166 |
| AD-1708746.1 | ususggacAfcAfGfCfaggacaccauL96 | 7154 | asUfsggdTg(Tgn)ccugcuGfuGfuccaasgsa | 7814 | UCUUGGACACAGCAGGACACCAG | 8168 |
| AD-1708748.1 | gsgsacacAfgCfAfGfgacaccagcuL96 | 7155 | asGfscudGg(Tgn)guccugCfuGfuguccsasa | 7815 | CUGGACACAGCAGGACACCAGCA | 8453 |
| AD-1708751.1 | csascagcAfgGfAfCfaccagcagcuL96 | 7156 | asGfscudGc(Tgn)ggugucCfuGfcugugsusc | 7816 | GACACAGCAGGACACCAGCAGCC | 8173 |
| AD-1708759.1 | gsascaccAfgCfAfGfcccuuccuauL96 | 443 | asUfsagdGa(Agn)gggcugCfuGfgugucscsu | 7817 | AGGACACCAGCAGCCCUUCCUAG | 8176 |
| AD-1708763.1 | cscsagcaGfcCfCfUfuccuagagcuL96 | 7157 | asGfscudCu(Agn)ggaaggGfcUfgcuggsusg | 7818 | CACCAGCAGCCCUUCCUAGAGCU | 8179 |
| AD-1708764.1 | csasgcagCfcCfUfUfccuagagcuuL96 | 7158 | asAfsgcdTc(Tgn)aggaagGfgCfugcugsgsu | 7819 | ACCAGCAGCCCUUCCUAGAGCUU | 8180 |
| AD-1708766.1 | gscsagccCfuUfCfCfuagagcuuauL96 | 7159 | asUfsaadGc(Tgn)cuaggaAfgGfgcugcsusg | 7820 | CAGCAGCCCUUCCUAGAGCUUAA | 8181 |
| AD-1708771.1 | cscsuuccUfaGfAfGfcuuaagaucuL96 | 444 | asGfsaudCu(Tgn)aagcucUfaGfgaaggsgsc | 7821 | GCCCUUCCUAGAGCUUAAGAUCC | 8186 |
| AD-1708813.1 | ususacguAfgAfCfUfuccaggaacuL96 | 7160 | asGfsuudCc(Tgn)ggaaguCfuAfcguaasusg | 7822 | CAUUACGUAGACUUCCAGGAACU | 8187 |
| AD-1708819.1 | asgsacuuCfcAfGfGfaacugggauuL96 | 7161 | asAfsucdCc(Agn)guuccuGfgAfagucusasc | 7823 | GUAGACUUCCAGGAACUGGGAUG | 8192 |
| AD-1708842.1 | gsusaccaGfcUfGfAfauuacugcauL96 | 7162 | asUfsgcdAg(Tgn)aauucaGfcUfgguacscsc | 7824 | GGGUACCAGCUGAAUUACUGCAG | 8199 |
| AD-1708844.1 | ascscagcUfgAfAfUfuacugcaguuL96 | 7163 | asAfscudGc(Agn)guaauuCfaGfcuggusasc | 7825 | GUACCAGCUGAAUUACUGCAGUG | 8201 |
| AD-1708849.1 | csusgaauUfaCfUfGfcagugggcauL96 | 7164 | asUfsgcdCc(Agn)cugcagUfaAfuucagscsu | 7826 | AGCUGAAUUACUGCAGUGGGCAG | 8206 |
| AD-1708856.1 | ascsugcaGfuGfGfGfcagugcccuuL96 | 452 | asAfsggdGc(Agn)cugcccAfcUfgcagusasa | 7827 | UUACUGCAGUGGGCAGUGCCCUC | 8209 |
| AD-1708872.1 | csasggcaUfuGfCfUfgccucuuucuL96 | 453 | asGfsaadAg(Agn)ggcagcAfaUfgccugsgsg | 7828 | CCCAGGCAUUGCUGCCUCUUUCC | 8210 |
| AD-1708875.1 | csasuugcUfgCfCfUfcuuuccauuuL96 | 7165 | asAfsaudGg(Agn)aagaggCfaGfcaaugscsc | 7829 | GGCAUUGCUGCCUCUUUCCAUUC | 8214 |
| AD-1708882.1 | gscscucuUfuCfCfAfuucugccguuL96 | 7166 | asAfscgdGc(Agn)gaauggAfaAfgaggcsasg | 7830 | CUGCCUCUUUCCAUUCUGCCGUC | 8221 |
| AD-1708887.1 | ususuccaUfuCfUfGfccgucuucauL96 | 454 | asUfsgadAg(Agn)cggcagAfaUfggaaasgsa | 7831 | UCUUUCCAUUCUGCCGUCUUCAG | 8226 |
| AD-1708889.1 | uscscauuCfuGfCfCfgucuucagcuL96 | 7167 | asGfscudGa(Agn)gacggcAfgAfauggasasa | 7832 | UUUCCAUUCUGCCGUCUUCAGCC | 8228 |
| AD-1708890.1 | cscsauucUfgCfCfGfucuucagccuL96 | 7168 | asGfsgcdTg(Agn)agacggCfaGfaauggsasa | 7833 | UUCCAUUCUGCCGUCUUCAGCCU | 8229 |
| AD-1708899.1 | csgsucuuCfaGfCfCfuccucaaaguL96 | 455 | asCfsuudTg(Agn)ggaggcUfgAfagacgsgsc | 7834 | GCCGUCUUCAGCCUCCUCAAAGC | 8233 |
| AD-1708901.1 | uscsuucaGfcCfUfCfcucaaagccuL96 | 7169 | asGfsgcdTu(Tgn)gaggagGfcUfgaagascsg | 7835 | CGUCUUCAGCCUCCUCAAAGCCA | 8235 |
| AD-1708902.1 | csusucagCfcUfCfCfucaaagccauL96 | 7170 | asUfsggdCu(Tgn)ugaggaGfgCfugaagsasc | 7836 | GUCUUCAGCCUCCUCAAAGCCAA | 8236 |
| AD-1708907.1 | gscscuccUfcAfAfAfgccaacaauuL96 | 7171 | asAfsuudGu(Tgn)ggcuuuGfaGfgaggcsusg | 7837 | CAGCCUCCUCAAAGCCAACAAUC | 8240 |
| AD-1708908.1 | cscsuccuCfaAfAfGfccaacaaucuL96 | 7172 | asGfsaudTg(Tgn)uggcuuUfgAfggaggscsu | 7838 | AGCCUCCUCAAAGCCAACAAUCC | 8241 |
| AD-1708911.1 | cscsucaaAfgCfCfAfacaauccuuuL96 | 456 | asAfsagdGa(Tgn)uguuggCfuUfugaggsasg | 7839 | CUCCUCAAAGCCAACAAUCCUUG | 8244 |
| AD-1708921.1 | asascaauCfcUfUfGfgccugccaguL96 | 7173 | asCfsugdGc(Agn)ggccaaGfgAfuuguusgsg | 7840 | CCAACAAUCCUUGGCCUGCCAGU | 8250 |
| AD-1708956.1 | uscsuccuCfuAfCfCfuggaucauauL96 | 7174 | asUfsaudGa(Tgn)ccagguAfgAfggagasgsa | 7841 | UCUCUCCUCUACCUGGAUCAUAA | 8262 |
| AD-1708957.1 | csusccucUfaCfCfUfggaucauaauL96 | 7175 | asUfsuadTg(Agn)uccaggUfaGfaggagsasg | 7842 | CUCUCCUCUACCUGGAUCAUAAU | 8263 |
| AD-1708962.1 | csusaccuGfgAfUfCfauaauggcauL96 | 7176 | asUfsgcdCa(Tgn)uaugauCfcAfgguagsasg | 7843 | CUCUACCUGGAUCAUAAUGGCAA | 8268 |
| AD-1708963.1 | usasccugGfaUfCfAfuaauggcaauL96 | 461 | asUfsugdCc(Agn)uuaugaUfcCfagguasgsa | 7844 | UCUACCUGGAUCAUAAUGGCAAU | 8269 |
| AD-1708971.1 | uscsauaaUfgGfCfAfauguggucauL96 | 7177 | asUfsgadCc(Agn)cauugcCfaUfuaugasusc | 7845 | GAUCAUAAUGGCAAUGUGGUCAA | 8277 |
| AD-1708974.1 | usasauggCfaAfUfGfuggucaagauL96 | 7178 | asUfscudTg(Agn)ccacauUfgCfcauuasusg | 7846 | CAUAAUGGCAAUGUGGUCAAGAC | 8280 |
| AD-1708976.1 | asusggcaAfuGfUfGfgucaagacguL96 | 7179 | asCfsgudCu(Tgn)gaccacAfuUfgccaususa | 7847 | UAAUGGCAAUGUGGUCAAGACGG | 8282 |
| AD-1708977.1 | usgsgcaaUfgUfGfGfucaagacgguL96 | 7180 | asCfscgdTc(Tgn)ugaccaCfaUfugccasusu | 7848 | AAUGGCAAUGUGGUCAAGACGGA | 8283 |
| AD-1708984.1 | gsusggucAfaGfAfCfggaugugccuL96 | 7181 | asGfsgcdAc(Agn)uccgucUfuGfaccacsasu | 7849 | AUGUGGUCAAGACGGAUGUGCCA | 8290 |
| AD-1708986.1 | gsgsucaaGfaCfGfGfaugugccaguL96 | 7182 | asCfsugdGc(Agn)cauccgUfcUfugaccsasc | 7850 | GUGGUCAAGACGGAUGUGCCAGA | 8292 |
| AD-1708990.1 | asasgacgGfaUfGfUfgccagauauuL96 | 463 | asAfsuadTc(Tgn)ggcacaUfcCfgucuusgsa | 7851 | UCAAGACGGAUGUGCCAGAUAUG | 8296 |
| AD-1709009.1 | usgsguggUfgGfAfGfgccuguggcuL96 | 7183 | asGfsccdAc(Agn)ggccucCfaCfcaccasusa | 7852 | UAUGGUGGUGGAGGCCUGUGGCU | 8307 |
| AD-1709021.1 | cscsugugGfcUfGfCfagcuagcaauL96 | 7184 | asUfsugdCu(Agn)gcugcaGfcCfacaggscsc | 7853 | GGCCUGUGGCUGCAGCUAGCAAG | 8311 |
| AD-1709022.1 | csusguggCfuGfCfAfgcuagcaaguL96 | 7185 | asCfsuudGc(Tgn)agcugcAfgCfcacagsgsc | 7854 | GCCUGUGGCUGCAGCUAGCAAGA | 8312 |
| AD-1709026.1 | gsgscugcAfgCfUfAfgcaagaggauL96 | 7186 | asUfsccdTc(Tgn)ugcuagCfuGfcagccsasc | 7855 | GUGGCUGCAGCUAGCAAGAGGAC | 8316 |
| AD-1709028.1 | csusgcagCfuAfGfCfaagaggaccuL96 | 7187 | asGfsgudCc(Tgn)cuugcuAfgCfugcagscsc | 7856 | GGCUGCAGCUAGCAAGAGGACCU | 8318 |
| AD-1709031.1 | csasgcuaGfcAfAfGfaggaccugguL96 | 7188 | asCfscadGg(Tgn)ccucuuGfcUfagcugscsa | 7857 | UGCAGCUAGCAAGAGGACCUGGG | 8321 |
| AD-1709032.1 | gscsuuugGfaGfUfGfaagagaccauL96 | 7189 | asUfsggdTc(Tgn)cuucacUfcCfaaagcscsc | 7858 | GGGCUUUGGAGUGAAGAGACCAA | 8322 |
| AD-1709034.1 | ususuggaGfuGfAfAfgagaccaaguL96 | 7190 | asCfsuudGg(Tgn)cucuucAfcUfccaaasgsc | 7859 | GCUUUGGAGUGAAGAGACCAAGA | 8324 |
| AD-1709038.1 | gsasgugaAfgAfGfAfccaagaugauL96 | 7191 | asUfscadTc(Tgn)uggucuCfuUfcacucscsa | 7860 | UGGAGUGAAGAGACCAAGAUGAA | 8327 |
| AD-1709041.1 | usgsaagaGfaCfCfAfagaugaaguuL96 | 7192 | asAfscudTc(Agn)ucuuggUfcUfcuucascsu | 7861 | AGUGAAGAGACCAAGAUGAAGUU | 8328 |
| AD-1709044.1 | asgsagacCfaAfGfAfugaaguuucuL96 | 468 | asGfsaadAc(Tgn)ucaucuUfgGfucucususc | 7862 | GAAGAGACCAAGAUGAAGUUUCC | 8330 |
| AD-1709052.1 | asgsaugaAfgUfUfUfcccaggcacuL96 | 7193 | asGfsugdCc(Tgn)gggaaaCfuUfcaucususg | 7863 | CAAGAUGAAGUUUCCCAGGCACA | 8338 |
| AD-1709056.1 | gsasaguuUfcCfCfAfggcacaggguL96 | 7194 | asCfsccdTg(Tgn)gccuggGfaAfacuucsasu | 7864 | AUGAAGUUUCCCAGGCACAGGGC | 8341 |
| AD-1709090.1 | ascsccaaCfaAfCfCfaccuggcaauL96 | 471 | asUfsugdCc(Agn)ggugguUfgUfugggususg | 7865 | CAACCCAACAACCACCUGGCAAU | 8349 |
| AD-1709097.1 | asasccacCfuGfGfCfaauaugacuuL96 | 7195 | asAfsgudCa(Tgn)auugccAfgGfugguusgsu | 7866 | ACAACCACCUGGCAAUAUGACUC | 8356 |
| AD-1709098.1 | ascscaccUfgGfCfAfauaugacucuL96 | 7196 | asGfsagdTc(Agn)uauugcCfaGfguggususg | 7867 | CAACCACCUGGCAAUAUGACUCA | 8357 |
| AD-1709100.1 | csasccugGfcAfAfUfaugacucacuL96 | 7197 | asGfsugdAg(Tgn)cauauuGfcCfaggugsgsu | 7868 | ACCACCUGGCAAUAUGACUCACU | 8359 |
| AD-1709102.1 | cscsuggcAfaUfAfUfgacucacuuuL96 | 7198 | asAfsagdTg(Agn)gucauaUfuGfccaggsusg | 7869 | CACCUGGCAAUAUGACUCACUUG | 8361 |
| AD-1709104.1 | usgsgcaaUfaUfGfAfcucacuugauL96 | 7199 | asUfscadAg(Tgn)gagucaUfaUfugccasgsg | 7870 | CCUGGCAAUAUGACUCACUUGAC | 8363 |
| AD-1709106.1 | gscsaauaUfgAfCfUfcacuugaccuL96 | 7200 | asGfsgudCa(Agn)gugaguCfaUfauugcscsa | 7871 | UGGCAAUAUGACUCACUUGACCC | 8365 |
| AD-1709111.1 | gsgsacccAfaAfUfGfggcacuuucuL96 | 7201 | asGfsaadAg(Tgn)gcccauUfuGfgguccscsa | 7872 | UGGGACCCAAAUGGGCACUUUCU | 8366 |
| AD-1709120.1 | usgsggcaCfuUfUfCfuugucugaguL96 | 7202 | asCfsucdAg(Agn)caagaaAfgUfgcccasusu | 7873 | AAUGGGCACUUUCUUGUCUGAGA | 8374 |
| AD-1709122.1 | gsgscacuUfuCfUfUfgucugagacuL96 | 7203 | asGfsucdTc(Agn)gacaagAfaAfgugccscsa | 7874 | UGGGCACUUUCUUGUCUGAGACU | 8376 |
| AD-1709124.1 | csascuuuCfuUfGfUfcugagacucuL96 | 7204 | asGfsagdTc(Tgn)cagacaAfgAfaagugscsc | 7875 | GGCACUUUCUUGUCUGAGACUCU | 8378 |
| AD-1709126.1 | csusuucuUfgUfCfUfgagacucuguL96 | 7205 | asCfsagdAg(Tgn)cucagaCfaAfgaaagsusg | 7876 | CACUUUCUUGUCUGAGACUCUGG | 8380 |
| AD-1709128.1 | ususcuugUfcUfGfAfgacucuggcuL96 | 7206 | asGfsccdAg(Agn)gucucaGfaCfaagaasasg | 7877 | CUUUCUUGUCUGAGACUCUGGCU | 8382 |
| AD-1709130.1 | csusugucUfgAfGfAfcucuggcuuuL96 | 7207 | asAfsagdCc(Agn)gagucuCfaGfacaagsasa | 7878 | UUCUUGUCUGAGACUCUGGCUUG | 8454 |
| AD-1709148.1 | usasuuccAfgGfUfUfggcugauguuL96 | 7208 | asAfscadTc(Agn)gccaacCfuGfgaauasasg | 7879 | CUUAUUCCAGGUUGGCUGAUGUG | 8385 |
| AD-1709151.1 | uscscaggUfuGfGfCfugauguguuuL96 | 476 | asAfsacdAc(Agn)ucagccAfaCfcuggasasu | 7880 | AUUCCAGGUUGGCUGAUGUGUUG | 8388 |
| AD-1709201.1 | csuscucuCfcUfCfUfaccuggaucuL96 | 7209 | asGfsaudCc(Agn)gguagaGfgAfgagagsasg | 7881 | CUCUCUCUCCUCUACCUGGAUCA | 8259 |
| AD-1709237.1 | gsasuuucCfuGfCfCfcuaaguccuuL96 | 480 | asAfsggdAc(Tgn)uagggcAfgGfaaaucsasu | 7882 | AUGAUUUCCUGCCCUAAGUCCUG | 8391 |
| AD-1709239.1 | ususuccuGfcCfCfUfaaguccuguuL96 | 7210 | asAfscadGg(Agn)cuuaggGfcAfggaaasusc | 7883 | GAUUUCCUGCCCUAAGUCCUGUG | 8392 |
| AD-1709253.1 | asgsaagaUfgUfCfAfgggacuagguL96 | 7211 | asCfscudAg(Tgn)cccugaCfaUfcuucuscsa | 7884 | UGAGAAGAUGUCAGGGACUAGGG | 8393 |
| AD-1709254.1 | asasgaugUfcAfGfGfgacuagggauL96 | 7212 | asUfsccdCu(Agn)gucccuGfaCfaucuuscsu | 7885 | AGAAGAUGUCAGGGACUAGGGAG | 8395 |
| AD-1709298.1 | asgsgaggAfaGfCfAfgauagaugguL96 | 7213 | asCfscadTc(Tgn)aucugcUfuCfcuccuscsc | 7886 | GGAGGAGGAAGCAGAUAGAUGGU | 8400 |
| AD-1709300.1 | gsasggaaGfcAfGfAfuagauggucuL96 | 7214 | asGfsacdCa(Tgn)cuaucuGfcUfuccucscsu | 7887 | AGGAGGAAGCAGAUAGAUGGUCC | 8402 |
| AD-1709301.1 | asgsgaagCfaGfAfUfagaugguccuL96 | 7215 | asGfsgadCc(Agn)ucuaucUfgCfuuccuscsc | 7888 | GGAGGAAGCAGAUAGAUGGUCCA | 8403 |
| AD-1709304.1 | asasgcagAfuAfGfAfugguccagcuL96 | 7216 | asGfscudGg(Agn)ccaucuAfuCfugcuuscsc | 7889 | GGAAGCAGAUAGAUGGUCCAGCA | 8406 |
| AD-1709307.1 | csasgauaGfaUfGfGfuccagcagguL96 | 7217 | asCfscudGc(Tgn)ggaccaUfcUfaucugscsu | 7890 | AGCAGAUAGAUGGUCCAGCAGGC | 8409 |
| AD-1709310.1 | asusagauGfgUfCfCfagcaggcuuuL96 | 7218 | asAfsagdCc(Tgn)gcuggaCfcAfucuauscsu | 7891 | AGAUAGAUGGUCCAGCAGGCUUG | 8412 |
| AD-1709314.1 | asusggucCfaGfCfAfggcuugaaguL96 | 7219 | asCfsuudCa(Agn)gccugcUfgGfaccauscsu | 7892 | AGAUGGUCCAGCAGGCUUGAAGC | 8416 |
| AD-1709315.1 | usgsguccAfgCfAfGfgcuugaagcuL96 | 7220 | asGfscudTc(Agn)agccugCfuGfgaccasusc | 7893 | GAUGGUCCAGCAGGCUUGAAGCA | 8417 |
| AD-1709317.1 | gsusccagCfaGfGfCfuugaagcaguL96 | 7221 | asCfsugdCu(Tgn)caagccUfgCfuggacscsa | 7894 | UGGUCCAGCAGGCUUGAAGCAGG | 8419 |
| AD-1709372.1 | gsgsucaaGfaGfGfGfagaugggcauL96 | 7222 | asUfsgcdCc(Agn)ucucccUfcUfugaccsusu | 7895 | AGGGUCAAGAGGGAGAUGGGCAA | 8455 |
| AD-1709390.1 | gscsgcugAfgGfGfAfggaugcuuauL96 | 7223 | asUfsaadGc(Agn)uccuccCfuCfagcgcscsu | 7896 | AGGCGCUGAGGGAGGAUGCUUAG | 8425 |
| AD-1709410.1 | gscsacuaAfgCfCfUfaagaaguucuL96 | 7224 | asGfsaadCu(Tgn)cuuaggCfuUfagugcscsu | 7897 | AGGCACUAAGCCUAAGAAGUUCC | 8427 |
| AD-1709411.1 | csascuaaGfcCfUfAfagaaguuccuL96 | 7225 | asGfsgadAc(Tgn)ucuuagGfcUfuagugscsc | 7898 | GGCACUAAGCCUAAGAAGUUCCC | 8428 |
| AD-1709429.1 | csasggacCfcAfCfUfgggagacaauL96 | 7226 | asUfsugdTc(Tgn)cccaguGfgGfuccugsusc | 7899 | GACAGGACCCACUGGGAGACAAG | 8430 |
| AD-1709431.1 | gsgsacccAfcUfGfGfgagacaagcuL96 | 7227 | asGfscudTg(Tgn)cucccaGfuGfgguccsusg | 7900 | CAGGACCCACUGGGAGACAAGCA | 8432 |
| AD-1709433.1 | ascsccacUfgGfGfAfgacaagcauuL96 | 7228 | asAfsugdCu(Tgn)gucuccCfaGfuggguscsc | 7901 | GGACCCACUGGGAGACAAGCAUU | 8434 |
| AD-1709434.1 | cscscacuGfgGfAfGfacaagcauuuL96 | 7229 | asAfsaudGc(Tgn)ugucucCfcAfgugggsusc | 7902 | GACCCACUGGGAGACAAGCAUUU | 8435 |
| AD-1709442.1 | gsasgacaAfgCfAfUfuuauacuuuuL96 | 7230 | asAfsaadGu(Agn)uaaaugCfuUfgucucscsc | 7903 | GGGAGACAAGCAUUUAUACUUUC | 8442 |
| AD-1709443.1 | asgsacaaGfcAfUfUfuauacuuucuL96 | 7231 | asGfsaadAg(Tgn)auaaauGfcUfugucuscsc | 7904 | GGAGACAAGCAUUUAUACUUUCU | 8443 |
| AD-1709502.1 | asgsgucaAfgAfGfGfgagaugggcuL96 | 7232 | asGfsccdCa(Tgn)cucccuCfuUfgaccususc | 7905 | GAAGGUCAAGAGGGAGAUGGGCA | 8421 |
| AD-1711741.1 | csasagcacaGfCfUfauccaucaguL96 | 6591 | asdCsugdAudGgauadGcUfgugcuugscsu | 7906 | GUCAAGCACAGCUAUCCAUCAGA | 7962 |
| AD-1711742.1 | asuscuacuuUfCfAfgccuuccuguL96 | 6613 | asdCsagdGadAggcudGaAfaguagauscsu | 7907 | UGAUCUACUUUCAGCCUUCCUGA | 7984 |
| AD-1711743.1 | asgsccaagcAfGfCfaaauccugguL96 | 6672 | asdCscadGgdAuuugdCuGfcuuggcuscsu | 7908 | CUAGCCAAGCAGCAAAUCCUGGA | 8043 |
| AD-1711744.1 | ascscagucgUfCfCfcagaauaacuL96 | 6679 | asdGsuudAudTcuggdGaCfgacugguscsu | 76 | UGACCAGUCGUCCCAGAAUAACU | 8050 |
| AD-1711745.1 | cscsuggcacUfCfUfuugcuugaguL96 | 6738 | asdCsucdAadGcaaadGaGfugccaggscsu | 7909 | UUCCUGGCACUCUUUGCUUGAGG | 8109 |
| AD-1711746.1 | csusggcacuCfUfUfugcuugagguL96 | 6739 | asdCscudCadAgcaadAgAfgugccagscsu | 7910 | UCCUGGCACUCUUUGCUUGAGGA | 8110 |
| AD-1711747.1 | csusuugcuuGfAfGfgaucuuccguL96 | 6746 | asdCsggdAadGauccdTcAfagcaaagscsu | 7911 | CUCUUUGCUUGAGGAUCUUCCGA | 8117 |
| AD-1711748.1 | ususugcuugAfGfGfaucuuccgauL96 | 6747 | asdTscgdGadAgaucdCuCfaagcaaascsu | 7912 | UCUUUGCUUGAGGAUCUUCCGAU | 8118 |
| AD-1711749.1 | ususgcuugaGfGfAfucuuccgauuL96 | 6748 | asdAsucdGgdAagaudCcUfcaagcaascsu | 7913 | CUUUGCUUGAGGAUCUUCCGAUG | 8119 |
| AD-1711750.1 | usgscuugagGfAfUfcuuccgauguL96 | 6749 | asdCsaudCgdGaagadTcCfucaagcascsu | 7914 | UUUGCUUGAGGAUCUUCCGAUGG | 8120 |
| AD-1711751.1 | gscsuugaggAfUfCfuuccgaugguL96 | 6750 | asdCscadTcdGgaagdAuCfcucaagcscsu | 7915 | UUGCUUGAGGAUCUUCCGAUGGG | 8121 |
| AD-1711752.1 | asgscaccacAfUfCfaccaaccuguL96 | 6758 | asdCsagdGudTggugdAuGfuggugcuscsu | 7916 | UGAGCACCACAUCACCAACCUGG | 8129 |
| AD-1711753.1 | ascsguagacUfUfCfcaggaacuguL96 | 6818 | asdCsagdTudCcuggdAaGfucuacguscsu | 7917 | UUACGUAGACUUCCAGGAACUGG | 8189 |
| AD-1711754.1 | csgsuagacuUfCfCfaggaacugguL96 | 6819 | asdCscadGudTccugdGaAfgucuacgscsu | 7918 | UACGUAGACUUCCAGGAACUGGG | 8190 |
| AD-1711755.1 | gsascuuccaGfGfAfacugggauguL96 | 6822 | asdCsaudCcdCaguudCcUfggaagucscsu | 7919 | UAGACUUCCAGGAACUGGGAUGG | 8193 |
| AD-1711756.1 | usgscugccuCfUfUfuccauucuguL96 | 6846 | asdCsagdAadTggaadAgAfggcagcascsu | 7920 | AUUGCUGCCUCUUUCCAUUCUGC | 8217 |
| AD-1711757.1 | gscsugccucUfUfUfccauucugcuL96 | 6847 | asdGscadGadAuggadAaGfaggcagcscsu | 7921 | UUGCUGCCUCUUUCCAUUCUGCC | 8218 |
| AD-1711758.1 | csusgccucuUfUfCfcauucugccuL96 | 6848 | asdGsgcdAgdAauggdAaAfgaggcagscsu | 7922 | UGCUGCCUCUUUCCAUUCUGCCG | 8219 |
| AD-1711759.1 | ususccauucUfGfCfcgucuucaguL96 | 6856 | asdCsugdAadGacggdCaGfaauggaascsu | 7923 | CUUUCCAUUCUGCCGUCUUCAGC | 8227 |
| AD-1711760.1 | cscsucaaagCfCfAfacaauccuuuL96 | 6873 | asdAsagdGadTuguudGgCfuuugaggscsu | 7924 | CUCCUCAAAGCCAACAAUCCUUG | 8244 |
| AD-1711761.1 | csuscaaagcCfAfAfcaauccuuguL96 | 6874 | asdCsaadGgdAuugudTgGfcuuugagscsu | 7925 | UCCUCAAAGCCAACAAUCCUUGG | 8245 |
| AD-1711762.1 | usgsugucccUfAfCfugcccgaaguL96 | 6884 | asdCsuudCgdGgcagdTaGfggacacascsu | 7926 | GUUGUGUCCCUACUGCCCGAAGG | 8255 |
| AD-1711763.1 | gsusgucccuAfCfUfgcccgaagguL96 | 6885 | asdCscudTcdGggcadGuAfgggacacscsu | 7927 | UUGUGUCCCUACUGCCCGAAGGC | 8256 |
| AD-1711764.1 | cscsucuaccUfGfGfaucauaauguL96 | 6894 | asdCsaudTadTgaucdCaGfguagaggscsu | 7928 | CUCCUCUACCUGGAUCAUAAUGG | 8265 |
| AD-1711765.1 | csuscuaccuGfGfAfucauaaugguL96 | 6895 | asdCscadTudAugaudCcAfgguagagscsu | 7929 | UCCUCUACCUGGAUCAUAAUGGC | 8266 |
| AD-1711766.1 | gsgsaucauaAfUfGfgcaaugugguL96 | 6903 | asdCscadCadTugccdAuUfaugauccscsu | 7930 | CUGGAUCAUAAUGGCAAUGUGGU | 8274 |
| AD-1711767.1 | gsasucauaaUfGfGfcaaugugguuL96 | 6904 | asdAsccdAcdAuugcdCaUfuaugaucscsu | 7931 | UGGAUCAUAAUGGCAAUGUGGUC | 8275 |
| AD-1711768.1 | asusggcaauGfUfGfgucaagacguL96 | 6911 | asdCsgudCudTgaccdAcAfuugccauscsu | 7932 | UAAUGGCAAUGUGGUCAAGACGG | 8282 |
| AD-1711769.1 | gsgscaauguGfGfUfcaagacggauL96 | 6913 | asdTsccdGudCuugadCcAfcauugccscsu | 7933 | AUGGCAAUGUGGUCAAGACGGAU | 8284 |
| AD-1711770.1 | gscsaaugugGfUfCfaagacggauuL96 | 6914 | asdAsucdCgdTcuugdAcCfacauugcscsu | 7934 | UGGCAAUGUGGUCAAGACGGAUG | 8285 |
| AD-1711771.1 | usgsccagauAfUfGfgugguggaguL96 | 6934 | asdCsucdCadCcaccdAuAfucuggcascsu | 7935 | UGUGCCAGAUAUGGUGGUGGAGG | 8305 |
| AD-1711772.1 | usgsgcugcaGfCfUfagcaagagguL96 | 6944 | asdCscudCudTgcuadGcUfgcagccascsu | 7936 | UGUGGCUGCAGCUAGCAAGAGGA | 8315 |
| AD-1711773.1 | gsgsagugaaGfAfGfaccaagauguL96 | 6955 | asdCsaudCudTggucdTcUfucacuccscsu | 7937 | UUGGAGUGAAGAGACCAAGAUGA | 8326 |
| AD-1711774.1 | asasgagaccAfAfGfaugaaguuuuL96 | 6958 | asdAsaadCudTcaucdTuGfgucucuuscsu | 7938 | UGAAGAGACCAAGAUGAAGUUUC | 8329 |
| AD-1711775.1 | ususccagguUfGfGfcugauguguuL96 | 7016 | asdAscadCadTcagcdCaAfccuggaascsu | 7939 | UAUUCCAGGUUGGCUGAUGUGUU | 8387 |
| AD-1711776.1 | cscsagguugGfCfUfgauguguuguL96 | 7018 | asdCsaadCadCaucadGcCfaaccuggscsu | 7940 | UUCCAGGUUGGCUGAUGUGUUGG | 8389 |
| AD-1711777.1 | csasgguuggCfUfGfauguguugguL96 | 7019 | asdCscadAcdAcaucdAgCfcaaccugscsu | 7941 | UCCAGGUUGGCUGAUGUGUUGGG | 8390 |
| AD-1711778.1 | gsusccagcaGfGfCfuugaagcaguL96 | 7048 | asdCsugdCudTcaagdCcUfgcuggacscsu | 7942 | UGGUCCAGCAGGCUUGAAGCAGG | 8419 |
| AD-1711779.1 | gsgsagacaaGfCfAfuuuauacuuuL96 | 7070 | asdAsagdTadTaaaudGcUfugucuccscsu | 7943 | UGGGAGACAAGCAUUUAUACUUU | 8441 |

TABLE 21A
Single dose screen for dsRNA agents targeting INHBE in Hep3b cells

| | 10 nM | | 1 nM | | 0.1 nM | |
|---|---|---|---|---|---|---|
| | % Avg | | % Avg | | % Avg | |
| Duplex | message | | message | | message | |
| Name | remaining | STDEV | remaining | STDEV | remaining | STDEV |
| AD-1708158.1 | 34.54 | 8.05 | 71.33 | 9.23 | 107.64 | 15.41 |
| AD-1706305.1 | 35.48 | 5.41 | 73.21 | 3.56 | 104.59 | 20.16 |
| AD-1706299.1 | 36.87 | 8.53 | 79.64 | 15.65 | 114.93 | 19.80 |
| AD-1706300.1 | 37.80 | 4.13 | 73.84 | 6.08 | 114.88 | 21.29 |
| AD-1706297.1 | 39.37 | 5.42 | 70.23 | 10.61 | 86.59 | 21.82 |
| AD-1706306.1 | 39.71 | 4.79 | 72.04 | 14.92 | 130.55 | 3.74 |
| AD-1706410.1 | 40.85 | 1.71 | 62.77 | 3.66 | 109.95 | 30.95 |
| AD-1706298.1 | 40.98 | 10.04 | 64.11 | 16.28 | 101.43 | 28.55 |
| AD-1706304.1 | 44.69 | 8.85 | 92.06 | 13.52 | 109.73 | 9.34 |
| AD-1706302.1 | 50.26 | 9.48 | 84.61 | 11.73 | 122.60 | 29.73 |
| AD-1706292.1 | 52.60 | 17.55 | 75.07 | 12.50 | 124.87 | 12.45 |
| AD-1706296.1 | 52.71 | 5.68 | 75.22 | 5.52 | 131.62 | 16.26 |
| AD-1708152.1 | 53.50 | 0.47 | 87.86 | 10.25 | 136.07 | 12.18 |
| AD-1706307.1 | 54.31 | 26.05 | 89.68 | 30.45 | 110.24 | 8.38 |
| AD-1706301.1 | 54.75 | 12.47 | 84.13 | 5.13 | 124.19 | 16.94 |
| AD-1706287.1 | 55.23 | 11.82 | 83.57 | 17.26 | 115.00 | 21.38 |
| AD-1706411.1 | 55.84 | 10.32 | 89.82 | 7.68 | 103.89 | 21.25 |
| AD-1706295.1 | 56.58 | 15.21 | 71.06 | 10.26 | 113.27 | 21.71 |
| AD-1706294.1 | 56.72 | 15.26 | 76.70 | 11.02 | 129.67 | 23.61 |
| AD-1706409.1 | 56.75 | 9.70 | 86.44 | 11.10 | 119.28 | 17.80 |
| AD-1706293.1 | 61.24 | 25.25 | 76.63 | 12.52 | 130.80 | 28.10 |
| AD-1706290.1 | 62.56 | 11.16 | 95.20 | 16.61 | 116.52 | 11.90 |
| AD-1706383.1 | 64.06 | 16.13 | 86.94 | 9.74 | 112.75 | 11.83 |
| AD-1706291.1 | 64.59 | 12.17 | 108.70 | 24.87 | 106.57 | 31.50 |
| AD-1706280.1 | 65.32 | 6.57 | 91.46 | 16.24 | 108.01 | 13.13 |
| AD-1708140.1 | 65.34 | 2.95 | 87.20 | 9.24 | 106.96 | 6.65 |
| AD-1708146.1 | 65.43 | 11.72 | 84.84 | 10.88 | 112.01 | 18.37 |
| AD-1706313.1 | 66.71 | 16.10 | 94.16 | 19.83 | 100.38 | 27.90 |
| AD-1706408.1 | 67.80 | 19.49 | 71.97 | 16.90 | 125.25 | 16.19 |
| AD-1708120.1 | 68.00 | 23.76 | 81.05 | 8.12 | 121.03 | 26.25 |
| AD-1711741.1 | 68.04 | 23.87 | 87.67 | 14.56 | 132.56 | 17.04 |
| AD-1708151.1 | 69.02 | 16.00 | 89.83 | 4.84 | 118.89 | 22.05 |
| AD-1706309.1 | 69.77 | 8.67 | 84.02 | 11.60 | 138.93 | 37.04 |
| AD-1706318.1 | 70.20 | 18.67 | 91.66 | 23.35 | 114.12 | 16.35 |
| AD-1706273.1 | 70.34 | 15.43 | 134.72 | 59.02 | 106.63 | 19.73 |
| AD-1708156.1 | 70.85 | 5.13 | 94.15 | 10.42 | 122.14 | 12.71 |
| AD-1706310.1 | 70.85 | 8.64 | 92.35 | 8.01 | 109.09 | 13.66 |
| AD-1708143.1 | 72.22 | 46.65 | 74.07 | 2.75 | 99.36 | 33.10 |
| AD-1706270.1 | 73.33 | 11.55 | 107.41 | 33.72 | 104.81 | 18.07 |
| AD-1708245.1 | 74.06 | 11.02 | 91.64 | 18.81 | 115.07 | 18.23 |
| AD-1708148.1 | 75.43 | 10.51 | 110.24 | 42.78 | 127.20 | 18.92 |
| AD-1706288.1 | 78.50 | 9.54 | 106.30 | 33.79 | 112.08 | 17.34 |
| AD-1706269.1 | 78.75 | 9.19 | 97.34 | 9.54 | 94.15 | 26.99 |
| AD-1706387.1 | 79.56 | 16.72 | 90.68 | 20.17 | 99.57 | 33.24 |
| AD-1708126.1 | 81.86 | 10.41 | 89.72 | 13.80 | 110.36 | 19.57 |
| AD-1706268.1 | 82.69 | 6.38 | 87.59 | 10.70 | 91.80 | 35.13 |
| AD-1708149.1 | 83.56 | 16.19 | 87.38 | 11.09 | 116.42 | 10.39 |
| AD-1706283.1 | 83.95 | 15.44 | 114.55 | 19.46 | 110.69 | 12.30 |
| AD-1708118.1 | 83.97 | 11.32 | 78.18 | 3.60 | 92.20 | 9.25 |
| AD-1708166.1 | 84.10 | 9.90 | 120.20 | 18.18 | 104.28 | 12.44 |
| AD-1711742.1 | 84.46 | 23.20 | 96.26 | 12.03 | 105.58 | 8.27 |
| AD-1708145.1 | 84.74 | 24.20 | 97.39 | 17.29 | 113.55 | 20.45 |
| AD-1706282.1 | 85.07 | 19.02 | 95.14 | 23.04 | 120.96 | 13.71 |
| AD-1708135.1 | 87.22 | 17.87 | 100.41 | 17.38 | 108.11 | 12.87 |
| AD-1706314.1 | 87.98 | 27.86 | 94.95 | 10.60 | 118.63 | 19.08 |
| AD-1706381.1 | 90.73 | 25.96 | 112.16 | 35.12 | 117.51 | 25.58 |
| AD-1706311.1 | 92.14 | 18.67 | 116.08 | 9.92 | 129.88 | 24.01 |
| AD-1706384.1 | 93.18 | 20.64 | 101.34 | 25.11 | 104.37 | 25.79 |
| AD-1706385.1 | 93.50 | 27.94 | 105.31 | 39.58 | 104.75 | 6.41 |
| AD-1706308.1 | 94.84 | 25.04 | 103.73 | 23.79 | 113.80 | 17.87 |
| AD-1706338.1 | 95.49 | 12.86 | 98.18 | 6.39 | 136.37 | 13.09 |
| AD-1708132.1 | 96.59 | 16.59 | 110.68 | 23.93 | 127.48 | 24.20 |
| AD-1706380.1 | 96.60 | 21.61 | 90.75 | 13.70 | 111.95 | 26.19 |
| AD-1706407.1 | 97.98 | 15.10 | 117.50 | 33.82 | 125.93 | 8.66 |
| AD-1708170.1 | 98.46 | 11.64 | 116.36 | 41.97 | 132.15 | 17.12 |
| AD-1706337.1 | 98.84 | 10.33 | 101.92 | 12.86 | 124.77 | 20.13 |
| AD-1706272.1 | 99.84 | 23.62 | 102.80 | 15.05 | 118.13 | 8.50 |
| AD-1706386.1 | 100.40 | 14.63 | 96.49 | 11.10 | 119.90 | 15.42 |
| AD-1706271.1 | 101.04 | 6.69 | 99.68 | 8.67 | 133.49 | 59.61 |
| AD-1708223.1 | 101.44 | 30.82 | 98.53 | 16.39 | 117.67 | 7.67 |
| AD-1706276.1 | 101.53 | 28.71 | 96.11 | 25.46 | 115.66 | 33.58 |
| AD-1708124.1 | 102.72 | 19.13 | 102.79 | 8.17 | 120.68 | 21.81 |
| AD-1706277.1 | 103.69 | 22.61 | 112.76 | 19.13 | 90.36 | 25.09 |
| AD-1706303.1 | 103.98 | 5.20 | 97.67 | 13.09 | 113.42 | 28.98 |
| AD-1706279.1 | 104.53 | 24.13 | 99.52 | 8.70 | 122.09 | 25.99 |
| AD-1708225.1 | 104.78 | 20.86 | 105.12 | 19.62 | 108.70 | 16.14 |
| AD-1708127.1 | 106.25 | 18.25 | 114.08 | 21.32 | 118.31 | 11.91 |
| AD-1708227.1 | 106.53 | 19.55 | 107.67 | 15.93 | 120.02 | 29.17 |
| AD-1706388.1 | 106.60 | 11.81 | 110.39 | 11.58 | 121.56 | 34.41 |
| AD-1706281.1 | 107.68 | 6.05 | 98.05 | 9.70 | 127.45 | 22.05 |
| AD-1706266.1 | 107.82 | 19.26 | 98.57 | 12.19 | 110.48 | 5.27 |
| AD-1706312.1 | 108.02 | 20.50 | 107.33 | 27.61 | 118.30 | 21.42 |
| AD-1708163.1 | 109.49 | 8.50 | 95.21 | 3.04 | 100.00 | 28.35 |
| AD-1708130.1 | 112.07 | 20.84 | 114.29 | 5.99 | 135.90 | 28.66 |
| AD-1708220.1 | 114.56 | 17.32 | 93.03 | 8.40 | 127.48 | 21.09 |
| AD-1706274.1 | 117.23 | 47.42 | 95.56 | 7.23 | 95.48 | 3.56 |
| AD-1706275.1 | 117.99 | 17.97 | 122.96 | 24.59 | 102.24 | 29.51 |
| AD-1706265.1 | 119.46 | 15.25 | 106.15 | 16.69 | 130.11 | 27.52 |
| AD-1706278.1 | 122.93 | 41.94 | 93.47 | 14.43 | 116.53 | 8.92 |
| AD-1706382.1 | 130.38 | 29.68 | 115.88 | 31.75 | 114.07 | 27.35 |
| AD-1706642.1 | 9.07 | 1.33 | 33.95 | 3.33 | 73.03 | 9.20 |
| AD-1706584.1 | 11.10 | 1.36 | 39.89 | 8.90 | 62.11 | 12.60 |
| AD-1711744.1 | 14.39 | 2.21 | 50.24 | 8.89 | 79.57 | 19.84 |
| AD-1706588.1 | 14.86 | 1.91 | 40.60 | 4.38 | 72.24 | 12.92 |
| AD-1706583.1 | 16.40 | 0.91 | 54.91 | 8.04 | 90.07 | 11.50 |
| AD-1706591.1 | 16.85 | 2.64 | 45.21 | 8.78 | 75.32 | 9.41 |
| AD-1706593.1 | 16.97 | 1.82 | 62.83 | 22.14 | 82.42 | 26.66 |
| AD-1706587.1 | 17.58 | 1.56 | 58.63 | 25.19 | 80.99 | 11.23 |
| AD-1706547.1 | 17.83 | 3.49 | 53.09 | 6.40 | 81.19 | 10.29 |
| AD-1708399.1 | 17.89 | 2.66 | 59.18 | 20.24 | 81.63 | 18.75 |
| AD-1706548.1 | 17.90 | 0.67 | 52.53 | 5.0 | 96.83 | 14.58 |
| AD-1708368.1 | 21.79 | 3.78 | 74.77 | 6.39 | 117.69 | 7.52 |
| AD-1706640.1 | 23.16 | 2.61 | 60.43 | 5.36 | 91.90 | 28.74 |
| AD-1706641.1 | 23.47 | 7.60 | 61.82 | 8.03 | 86.84 | 9.06 |
| AD-1708357.1 | 24.90 | 5.49 | 64.54 | 8.39 | 99.70 | 20.16 |
| AD-1706524.1 | 25.32 | 5.84 | 71.07 | 11.04 | 105.11 | 25.09 |
| AD-1706585.1 | 26.06 | 3.02 | 64.13 | 14.21 | 104.94 | 17.17 |
| AD-1706590.1 | 27.08 | 6.74 | 90.13 | 35.33 | 97.84 | 35.28 |
| AD-1708407.1 | 27.22 | 9.42 | 61.08 | 8.83 | 82.76 | 13.93 |
| AD-1706594.1 | 28.01 | 3.55 | 68.81 | 7.80 | 93.18 | 9.04 |
| AD-1706414.1 | 28.37 | 4.53 | 58.04 | 13.63 | 87.06 | 19.77 |
| AD-1706538.1 | 28.83 | 3.95 | 87.81 | 10.78 | 103.20 | 18.94 |
| AD-1708251.1 | 29.62 | 3.42 | 61.88 | 15.03 | 91.39 | 20.22 |
| AD-1706546.1 | 30.40 | 3.43 | 74.52 | 6.92 | 108.55 | 16.73 |
| AD-1706543.1 | 32.12 | 2.74 | 73.00 | 8.20 | 108.30 | 25.23 |
| AD-1706536.1 | 32.84 | 7.47 | 64.01 | 14.33 | 92.38 | 12.26 |
| AD-1706545.1 | 34.25 | 3.85 | 62.46 | 5.73 | 98.45 | 9.25 |
| AD-1706520.1 | 35.55 | 5.51 | 81.69 | 15.12 | 110.53 | 13.75 |
| AD-1706582.1 | 35.83 | 6.13 | 61.53 | 16.96 | 94.95 | 16.97 |
| AD-1706525.1 | 36.55 | 4.29 | 94.16 | 23.25 | 91.09 | 12.66 |
| AD-1708369.1 | 38.82 | 21.75 | 70.72 | 3.62 | 97.58 | 17.63 |
| AD-1708255.1 | 39.07 | 5.04 | 67.52 | 11.96 | 90.89 | 8.17 |
| AD-1706535.1 | 39.19 | 8.70 | 104.28 | 31.11 | 97.46 | 6.66 |
| AD-1706415.1 | 39.83 | 5.22 | 55.55 | 6.77 | 80.55 | 9.38 |
| AD-1706544.1 | 39.98 | 3.88 | 60.76 | 7.29 | 80.11 | 18.18 |
| AD-1706639.1 | 42.73 | 3.36 | 79.43 | 15.67 | 101.15 | 20.49 |
| AD-1706550.1 | 42.82 | 15.97 | 94.02 | 43.73 | 107.95 | 26.18 |
| AD-1708248.1 | 43.04 | 3.60 | 68.74 | 8.58 | 93.13 | 19.62 |
| AD-1708365.1 | 43.52 | 8.08 | 106.40 | 35.35 | 101.61 | 17.99 |
| AD-1706589.1 | 43.66 | 11.75 | 73.57 | 3.09 | 103.81 | 11.11 |
| AD-1706523.1 | 43.71 | 6.67 | 91.11 | 14.54 | 116.01 | 5.91 |
| AD-1706586.1 | 44.05 | 8.35 | 99.17 | 34.89 | 102.65 | 24.81 |
| AD-1706412.1 | 44.67 | 9.33 | 82.62 | 12.75 | 95.04 | 15.60 |
| AD-1706420.1 | 45.19 | 4.57 | 71.65 | 14.31 | 101.49 | 40.85 |
| AD-1708401.1 | 46.32 | 4.32 | 109.46 | 36.49 | 137.97 | 46.10 |
| AD-1706537.1 | 47.21 | 3.01 | 83.85 | 7.81 | 113.39 | 14.02 |
| AD-1708397.1 | 47.56 | 4.70 | 82.21 | 16.77 | 103.46 | 14.37 |
| AD-1706592.1 | 49.61 | 12.76 | 74.80 | 17.42 | 103.97 | 30.99 |
| AD-1706539.1 | 50.47 | 7.14 | 64.47 | 6.46 | 81.84 | 2.50 |
| AD-1706532.1 | 51.25 | 5.15 | 79.01 | 18.04 | 96.02 | 7.54 |
| AD-1706580.1 | 51.56 | 13.09 | 58.56 | 10.84 | 100.76 | 23.90 |
| AD-1706413.1 | 51.63 | 5.56 | 67.89 | 6.33 | 81.80 | 12.55 |
| AD-1706419.1 | 54.23 | 19.04 | 93.19 | 30.98 | 121.41 | 34.52 |
| AD-1706581.1 | 54.84 | 7.00 | 71.33 | 14.93 | 84.09 | 14.17 |
| AD-1708447.1 | 54.87 | 13.52 | 104.94 | 21.63 | 118.08 | 18.05 |
| AD-1706579.1 | 54.95 | 7.90 | 70.62 | 4.25 | 104.36 | 27.78 |
| AD-1708408.1 | 56.12 | 12.89 | 90.61 | 8.36 | 99.13 | 20.61 |
| AD-1706549.1 | 56.65 | 9.42 | 81.71 | 9.47 | 97.16 | 9.63 |
| AD-1708342.1 | 56.93 | 7.61 | 80.26 | 12.73 | 106.80 | 25.07 |
| AD-1706636.1 | 57.82 | 5.41 | 85.94 | 12.63 | 99.00 | 13.47 |
| AD-1706425.1 | 58.29 | 2.96 | 76.30 | 14.61 | 95.32 | 14.22 |
| AD-1706578.1 | 60.60 | 13.60 | 87.09 | 12.39 | 109.98 | 28.08 |
| AD-1706418.1 | 63.28 | 10.61 | 96.91 | 13.82 | 111.41 | 24.53 |
| AD-1708356.1 | 64.77 | 12.61 | 78.57 | 18.09 | 99.15 | 15.61 |
| AD-1708347.1 | 65.00 | 17.57 | 82.04 | 19.82 | 95.21 | 15.90 |
| AD-1706424.1 | 65.38 | 7.09 | 85.09 | 16.40 | 105.96 | 30.35 |
| AD-1706417.1 | 66.98 | 12.66 | 85.33 | 20.21 | 111.43 | 27.23 |
| AD-1706521.1 | 68.72 | 12.27 | 90.93 | 12.68 | 119.35 | 25.53 |
| AD-1706530.1 | 70.98 | 12.28 | 86.64 | 9.70 | 94.88 | 14.24 |
| AD-1706522.1 | 71.46 | 9.68 | 106.53 | 20.33 | 92.61 | 7.37 |
| AD-1706527.1 | 71.63 | 5.56 | 97.88 | 24.77 | 112.26 | 31.32 |
| AD-1706416.1 | 72.34 | 8.83 | 80.67 | 4.08 | 98.15 | 20.87 |
| AD-1706534.1 | 76.28 | 8.47 | 81.77 | 15.66 | 99.83 | 24.74 |
| AD-1706421.1 | 79.32 | 6.14 | 93.79 | 19.12 | 122.72 | 30.72 |
| AD-1711743.1 | 80.13 | 9.62 | 88.65 | 8.30 | 93.61 | 12.47 |
| AD-1706635.1 | 80.53 | 12.44 | 85.68 | 19.07 | 105.70 | 21.04 |
| AD-1706528.1 | 81.09 | 5.66 | 73.66 | 5.18 | 122.46 | 19.28 |
| AD-1706637.1 | 82.19 | 27.49 | 90.88 | 12.79 | 111.05 | 20.25 |
| AD-1708403.1 | 83.00 | 19.04 | 92.02 | 7.56 | 116.05 | 23.70 |
| AD-1708405.1 | 85.44 | 23.49 | 103.54 | 43.41 | 116.29 | 44.00 |
| AD-1706533.1 | 85.51 | 14.92 | 115.23 | 27.84 | 101.95 | 17.97 |
| AD-1708344.1 | 85.73 | 11.66 | 97.48 | 5.76 | 110.94 | 21.22 |
| AD-1708361.1 | 86.28 | 9.76 | 88.85 | 15.65 | 109.24 | 31.96 |
| AD-1706423.1 | 88.17 | 11.15 | 84.06 | 8.73 | 122.58 | 38.31 |
| AD-1708260.1 | 88.99 | 5.12 | 94.37 | 17.05 | 114.30 | 29.22 |
| AD-1708350.1 | 90.61 | 12.13 | 85.27 | 9.24 | 100.73 | 9.67 |
| AD-1706638.1 | 95.90 | 12.95 | 85.50 | 18.85 | 110.68 | 17.30 |
| AD-1708402.1 | 99.66 | 13.44 | 91.37 | 13.19 | 111.56 | 29.33 |
| AD-1706526.1 | 101.27 | 3.70 | 93.41 | 11.90 | 113.66 | 19.87 |
| AD-1708249.1 | 102.18 | 16.36 | 97.35 | 19.73 | 116.55 | 34.10 |
| AD-1706661.1 | 6.60 | 0.84 | 74.72 | 4.36 | 110.66 | 17.49 |
| AD-1708473.1 | 6.62 | 1.40 | 69.52 | 3.82 | 108.89 | 15.87 |
| AD-1706665.1 | 6.77 | 0.79 | 67.01 | 13.10 | 103.64 | 16.11 |
| AD-1706650.1 | 7.00 | 1.13 | 70.73 | 11.82 | 108.62 | 8.15 |
| AD-1706645.1 | 7.25 | 3.64 | 74.87 | 8.06 | 107.77 | 11.83 |
| AD-1706653.1 | 7.74 | 1.35 | 76.42 | 7.69 | 113.74 | 17.40 |
| AD-1711749.1 | 8.54 | 1.25 | 68.74 | 2.15 | 106.66 | 11.71 |
| AD-1706763.1 | 8.70 | 2.21 | 72.90 | 15.62 | 107.52 | 10.92 |
| AD-1708478.1 | 9.57 | 1.33 | 78.24 | 7.40 | 107.29 | 10.61 |
| AD-1706749.1 | 10.07 | 1.20 | 74.95 | 9.09 | 99.46 | 4.18 |
| AD-1706643.1 | 10.53 | 1.64 | 73.09 | 9.66 | 90.78 | 10.00 |
| AD-1706666.1 | 13.18 | 2.44 | 80.01 | 9.39 | 106.83 | 5.84 |
| AD-1706796.1 | 15.63 | 3.43 | 89.88 | 10.35 | 103.93 | 11.87 |
| AD-1706667.1 | 17.36 | 4.27 | 101.51 | 16.36 | 111.65 | 19.15 |
| AD-1706671.1 | 17.42 | 2.37 | 90.42 | 16.21 | 103.59 | 6.63 |
| AD-1706662.1 | 18.09 | 2.45 | 95.05 | 11.73 | 105.69 | 13.23 |
| AD-1706660.1 | 18.70 | 4.24 | 91.56 | 4.98 | 105.45 | 10.46 |
| AD-1706668.1 | 19.20 | 2.47 | 80.70 | 4.94 | 104.90 | 16.86 |
| AD-1706678.1 | 19.89 | 4.19 | 95.24 | 9.95 | 106.34 | 7.14 |
| AD-1706761.1 | 20.09 | 5.94 | 103.36 | 8.72 | 110.93 | 4.49 |
| AD-1706729.1 | 20.69 | 1.20 | 82.71 | 9.83 | 98.57 | 7.22 |
| AD-1706758.1 | 20.84 | 2.84 | 97.40 | 12.07 | 111.12 | 8.71 |
| AD-1706802.1 | 21.81 | 2.61 | 87.99 | 12.58 | 104.85 | 6.50 |
| AD-1706762.1 | 21.86 | 1.22 | 87.78 | 3.24 | 106.95 | 10.71 |
| AD-1706673.1 | 22.52 | 4.61 | 95.13 | 17.07 | 106.48 | 11.75 |
| AD-1706656.1 | 24.59 | 2.05 | 83.54 | 7.22 | 100.64 | 2.81 |
| AD-1706654.1 | 24.83 | 1.15 | 109.60 | 22.66 | 105.15 | 8.80 |
| AD-1706651.1 | 25.30 | 2.94 | 93.94 | 14.27 | 112.44 | 11.34 |
| AD-1708561.1 | 25.60 | 3.99 | 104.77 | 12.81 | 102.89 | 6.87 |
| AD-1706644.1 | 26.90 | 0.85 | 84.09 | 3.99 | 101.42 | 5.45 |
| AD-1706674.1 | 28.45 | 3.09 | 88.45 | 9.49 | 104.73 | 2.90 |
| AD-1706759.1 | 29.16 | 20.00 | 85.18 | 8.32 | 110.91 | 17.22 |
| AD-1711747.1 | 29.23 | 3.34 | 92.97 | 13.24 | 109.77 | 11.44 |
| AD-1706655.1 | 29.64 | 16.36 | 94.04 | 14.12 | 106.67 | 15.84 |
| AD-1706755.1 | 29.74 | 4.96 | 90.27 | 13.45 | 89.74 | 8.63 |
| AD-1706750.1 | 29.94 | 9.26 | 87.13 | 8.39 | 109.44 | 12.06 |
| AD-1706756.1 | 29.99 | 0.59 | 92.61 | 17.60 | 106.44 | 15.86 |
| AD-1706799.1 | 30.02 | 5.93 | 97.59 | 14.48 | 111.47 | 11.09 |
| AD-1708485.1 | 30.12 | 11.59 | 89.97 | 7.46 | 105.61 | 12.03 |
| AD-1706652.1 | 31.17 | 4.31 | 94.61 | 4.74 | 105.02 | 6.14 |
| AD-1706649.1 | 32.31 | 8.03 | 95.79 | 12.11 | 97.70 | 9.45 |
| AD-1706764.1 | 32.90 | 0.57 | 96.72 | 28.52 | 109.38 | 11.25 |
| AD-1706760.1 | 33.00 | 4.03 | 89.53 | 11.65 | 101.22 | 11.01 |
| AD-1706748.1 | 35.18 | 4.35 | 96.77 | 10.82 | 110.03 | 9.91 |
| AD-1711750.1 | 37.69 | 7.93 | 98.35 | 9.29 | 106.27 | 9.06 |
| AD-1708457.1 | 38.56 | 5.40 | 93.19 | 5.67 | 107.79 | 12.22 |
| AD-1706751.1 | 39.44 | 19.99 | 94.73 | 9.40 | 109.19 | 8.46 |
| AD-1708454.1 | 40.71 | 3.27 | 89.75 | 12.18 | 107.44 | 15.74 |
| AD-1706753.1 | 40.99 | 9.16 | 100.89 | 28.03 | 110.69 | 15.45 |
| AD-1708564.1 | 41.34 | 4.73 | 88.93 | 5.25 | 95.35 | 1.26 |
| AD-1706746.1 | 42.57 | 6.65 | 88.82 | 8.77 | 107.73 | 13.47 |
| AD-1708464.1 | 42.62 | 3.80 | 95.60 | 4.87 | 104.61 | 11.22 |
| AD-1706672.1 | 43.78 | 10.25 | 95.27 | 10.60 | 98.19 | 9.52 |
| AD-1711746.1 | 45.65 | 2.07 | 112.78 | 25.92 | 102.47 | 13.57 |
| AD-1708483.1 | 48.04 | 7.38 | 101.48 | 24.43 | 102.75 | 7.74 |
| AD-1708565.1 | 48.61 | 10.48 | 99.08 | 14.13 | 99.70 | 5.83 |
| AD-1706797.1 | 48.74 | 5.96 | 90.55 | 14.02 | 100.91 | 9.04 |
| AD-1711748.1 | 50.55 | 10.58 | 104.32 | 12.32 | 105.92 | 11.82 |
| AD-1706646.1 | 50.78 | 11.75 | 105.91 | 14.08 | 101.10 | 6.21 |
| AD-1708468.1 | 50.98 | 6.40 | 99.67 | 13.25 | 111.96 | 9.91 |
| AD-1706664.1 | 51.96 | 13.92 | 90.04 | 8.66 | 108.53 | 15.23 |
| AD-1706747.1 | 52.03 | 8.41 | 103.06 | 21.38 | 114.38 | 11.30 |
| AD-1706765.1 | 53.56 | 7.63 | 93.88 | 18.00 | 95.27 | 4.65 |
| AD-1706800.1 | 53.95 | 8.49 | 95.50 | 8.96 | 107.45 | 9.95 |
| AD-1708462.1 | 54.04 | 6.29 | 92.64 | 7.40 | 118.65 | 14.56 |
| AD-1706752.1 | 55.51 | 8.14 | 88.82 | 6.13 | 97.91 | 7.54 |
| AD-1706745.1 | 57.43 | 9.49 | 93.02 | 5.38 | 97.74 | 7.60 |
| AD-1706669.1 | 63.72 | 7.32 | 90.06 | 8.80 | 102.31 | 8.84 |
| AD-1708466.1 | 64.64 | 14.05 | 95.96 | 16.75 | 100.99 | 12.25 |
| AD-1706675.1 | 64.77 | 2.67 | 100.96 | 6.87 | 108.17 | 9.63 |
| AD-1711751.1 | 65.52 | 14.01 | 99.40 | 20.89 | 95.72 | 19.18 |
| AD-1711745.1 | 68.13 | 7.56 | 101.21 | 11.15 | 100.69 | 4.58 |
| AD-1706803.1 | 73.64 | 8.01 | 92.32 | 11.60 | 104.35 | 10.44 |
| AD-1706754.1 | 73.79 | 5.20 | 88.05 | 10.42 | 101.75 | 12.74 |
| AD-1708482.1 | 75.95 | 14.79 | 99.22 | 6.65 | 99.58 | 19.78 |
| AD-1706801.1 | 78.50 | 13.33 | 93.60 | 9.95 | 100.32 | 4.13 |
| AD-1708458.1 | 78.70 | 7.33 | 87.84 | 4.93 | 103.98 | 9.93 |
| AD-1711752.1 | 79.38 | 12.59 | 82.60 | 8.23 | 97.25 | 4.37 |
| AD-1708567.1 | 80.84 | 18.53 | 93.23 | 9.30 | 100.82 | 7.56 |
| AD-1706804.1 | 81.90 | 4.96 | 97.61 | 18.31 | 104.98 | 5.27 |
| AD-1706670.1 | 83.22 | 11.36 | 101.97 | 12.99 | 99.92 | 6.96 |
| AD-1706732.1 | 85.31 | 21.66 | 96.44 | 10.50 | 104.05 | 12.80 |
| AD-1708647.1 | 85.35 | 15.28 | 119.04 | 41.38 | 108.04 | 20.54 |
| AD-1706798.1 | 85.62 | 7.06 | 103.36 | 13.05 | 100.71 | 15.44 |
| AD-1708476.1 | 88.09 | 5.36 | 99.39 | 9.61 | 107.56 | 11.68 |
| AD-1708650.1 | 89.03 | 12.02 | 113.51 | 14.13 | 106.25 | 8.75 |
| AD-1706735.1 | 92.62 | 7.77 | 111.07 | 11.08 | 108.42 | 10.58 |
| AD-1706731.1 | 94.79 | 6.67 | 97.21 | 9.56 | 99.62 | 3.81 |
| AD-1708559.1 | 95.00 | 7.62 | 100.14 | 12.07 | 102.77 | 7.98 |
| AD-1708648.1 | 108.92 | 28.51 | 99.75 | 9.85 | 106.66 | 6.01 |
| AD-1706854.1 | 25.37 | 3.01 | 103.72 | 47.41 | 103.23 | 9.61 |
| AD-1708766.1 | 26.83 | 6.17 | 96.07 | 18.36 | 102.24 | 7.86 |
| AD-1706929.1 | 27.18 | 8.06 | 75.76 | 7.80 | 97.46 | 18.20 |
| AD-1706934.1 | 27.89 | 6.08 | 92.28 | 12.84 | 98.05 | 12.81 |
| AD-1706879.1 | 35.05 | 3.81 | 88.34 | 13.15 | 104.53 | 21.27 |
| AD-1706833.1 | 35.80 | 6.70 | 95.10 | 10.15 | 105.49 | 8.37 |
| AD-1706856.1 | 36.63 | 4.23 | 110.20 | 26.30 | 107.65 | 12.80 |
| AD-1706858.1 | 37.72 | 6.21 | 81.87 | 12.77 | 92.77 | 14.43 |
| AD-1706930.1 | 40.50 | 1.61 | 108.05 | 35.35 | 86.82 | 30.20 |
| AD-1706875.1 | 40.60 | 4.27 | 118.37 | 25.42 | 98.68 | 15.75 |
| AD-1706855.1 | 41.18 | 11.54 | 131.44 | 55.87 | 98.30 | 19.73 |
| AD-1706863.1 | 43.26 | 4.15 | 100.28 | 15.63 | 92.69 | 21.34 |
| AD-1706933.1 | 43.61 | 9.36 | 102.54 | 30.69 | 104.09 | 5.81 |
| AD-1706849.1 | 47.30 | 6.81 | 102.81 | 19.95 | 84.13 | 29.87 |
| AD-1708707.1 | 50.03 | 11.97 | 108.24 | 34.23 | 104.48 | 11.54 |
| AD-1706831.1 | 52.48 | 7.54 | 115.05 | 20.86 | 102.75 | 17.63 |
| AD-1706861.1 | 52.54 | 16.14 | 101.45 | 26.45 | 108.92 | 30.66 |
| AD-1706878.1 | 53.45 | 9.24 | 104.31 | 24.53 | 108.89 | 11.75 |
| AD-1706860.1 | 54.13 | 8.56 | 93.86 | 12.56 | 107.75 | 22.52 |
| AD-1706876.1 | 54.16 | 11.40 | 102.97 | 37.17 | 100.98 | 9.73 |
| AD-1706922.1 | 54.52 | 11.46 | 116.79 | 22.40 | 97.89 | 10.04 |
| AD-1706877.1 | 54.71 | 8.75 | 124.94 | 31.32 | 111.27 | 15.98 |
| AD-1706910.1 | 56.13 | 5.44 | 100.89 | 10.10 | 99.37 | 24.39 |
| AD-1708724.1 | 56.38 | 11.75 | 113.47 | 33.12 | 96.26 | 14.65 |
| AD-1706851.1 | 56.88 | 8.13 | 99.19 | 16.09 | 100.04 | 9.14 |
| AD-1706848.1 | 57.59 | 19.63 | 88.30 | 19.11 | 108.41 | 23.17 |
| AD-1706862.1 | 57.90 | 17.76 | 100.76 | 21.18 | 98.92 | 19.89 |
| AD-1706873.1 | 60.54 | 4.01 | 77.98 | 11.86 | 83.33 | 21.11 |
| AD-1706925.1 | 61.27 | 5.41 | 141.22 | 45.16 | 112.13 | 14.93 |
| AD-1706807.1 | 63.36 | 6.27 | 119.59 | 35.44 | 106.38 | 16.29 |
| AD-1706808.1 | 63.79 | 6.32 | 81.18 | 2.15 | 83.79 | 14.66 |
| AD-1706913.1 | 64.51 | 5.44 | 86.83 | 10.13 | 102.68 | 11.81 |
| AD-1708771.1 | 65.72 | 13.62 | 73.79 | 9.06 | 99.46 | 12.36 |
| AD-1708657.1 | 66.55 | 5.60 | 90.80 | 25.74 | 100.19 | 11.20 |
| AD-1706852.1 | 66.74 | 13.45 | 110.13 | 42.60 | 109.17 | 10.74 |
| AD-1706908.1 | 68.07 | 13.31 | 114.93 | 23.24 | 97.36 | 4.38 |
| AD-1706927.1 | 69.35 | 9.74 | 96.16 | 18.41 | 110.08 | 10.62 |
| AD-1706932.1 | 69.69 | 5.02 | 104.45 | 21.71 | 97.67 | 11.10 |
| AD-1706834.1 | 70.38 | 6.62 | 84.04 | 8.43 | 99.35 | 17.43 |
| AD-1706918.1 | 71.54 | 17.49 | 113.13 | 10.29 | 114.70 | 17.65 |
| AD-1706866.1 | 71.83 | 14.46 | 88.92 | 33.22 | 106.35 | 14.58 |
| AD-1706983.1 | 73.76 | 8.01 | 112.98 | 24.54 | 86.85 | 26.78 |
| AD-1706859.1 | 74.92 | 24.74 | 90.87 | 21.71 | 100.06 | 13.80 |
| AD-1706982.1 | 76.10 | 19.78 | 106.63 | 36.38 | 98.22 | 13.19 |
| AD-1706835.1 | 77.42 | 15.50 | 104.09 | 23.87 | 101.43 | 22.46 |
| AD-1706921.1 | 77.52 | 19.03 | 100.22 | 19.85 | 98.95 | 16.37 |
| AD-1706989.1 | 78.00 | 22.52 | 93.63 | 12.00 | 92.94 | 19.53 |
| AD-1708746.1 | 79.02 | 19.60 | 114.66 | 35.50 | 100.74 | 15.01 |
| AD-1706850.1 | 79.32 | 13.85 | 91.59 | 5.45 | 94.78 | 15.55 |
| AD-1706985.1 | 80.89 | 13.10 | 88.36 | 16.54 | 108.60 | 10.83 |
| AD-1706923.1 | 81.37 | 21.19 | 106.79 | 11.31 | 103.06 | 13.83 |
| AD-1706909.1 | 81.73 | 14.01 | 116.11 | 47.50 | 105.49 | 14.70 |
| AD-1706811.1 | 81.88 | 17.25 | 92.52 | 16.10 | 101.66 | 13.54 |
| AD-1708813.1 | 85.76 | 27.33 | 115.49 | 21.38 | 109.30 | 9.84 |
| AD-1708748.1 | 87.90 | 14.15 | 86.02 | 8.62 | 100.81 | 2.57 |
| AD-1706984.1 | 88.94 | 16.25 | 113.85 | 25.66 | 108.56 | 14.03 |
| AD-1708697.1 | 89.52 | 10.09 | 120.53 | 38.28 | 113.90 | 9.54 |
| AD-1706911.1 | 89.91 | 17.73 | 101.81 | 15.95 | 95.76 | 15.10 |
| AD-1708709.1 | 90.74 | 14.16 | 100.10 | 17.53 | 107.72 | 14.67 |
| AD-1706853.1 | 91.75 | 13.32 | 113.59 | 26.59 | 113.95 | 29.85 |
| AD-1706926.1 | 96.63 | 6.03 | 95.17 | 15.95 | 103.87 | 30.98 |
| AD-1706832.1 | 97.54 | 16.47 | 104.10 | 33.68 | 107.00 | 11.63 |
| AD-1706987.1 | 98.29 | 12.34 | 95.69 | 20.12 | 98.30 | 10.47 |
| AD-1706809.1 | 98.67 | 26.38 | 99.13 | 15.24 | 82.43 | 14.61 |
| AD-1708700.1 | 99.27 | 21.13 | 106.72 | 9.99 | 96.03 | 19.58 |
| AD-1706988.1 | 101.65 | 24.29 | 106.78 | 29.53 | 106.48 | 20.25 |
| AD-1706914.1 | 101.79 | 11.21 | 90.48 | 4.14 | 100.55 | 13.62 |
| AD-1706931.1 | 103.40 | 66.16 | 107.78 | 26.76 | 101.02 | 24.37 |
| AD-1708683.1 | 104.06 | 8.55 | 125.73 | 42.10 | 107.19 | 5.34 |
| AD-1711754.1 | 104.34 | 15.76 | 114.12 | 40.53 | 105.06 | 9.88 |
| AD-1706836.1 | 106.36 | 12.55 | 100.96 | 22.23 | 103.19 | 32.20 |
| AD-1708662.1 | 107.32 | 8.18 | 88.67 | 10.59 | 96.58 | 9.88 |
| AD-1708759.1 | 107.49 | 28.12 | 89.51 | 14.33 | 101.64 | 19.99 |
| AD-1708680.1 | 108.20 | 15.23 | 97.77 | 24.39 | 102.61 | 12.78 |
| AD-1706874.1 | 109.21 | 20.84 | 100.69 | 38.85 | 100.93 | 14.52 |
| AD-1706864.1 | 110.63 | 16.57 | 101.39 | 23.00 | 101.73 | 22.95 |
| AD-1711753.1 | 111.19 | 14.58 | 93.59 | 17.39 | 110.58 | 13.90 |
| AD-1706912.1 | 111.75 | 15.92 | 105.01 | 18.67 | 108.43 | 10.78 |
| AD-1708751.1 | 112.97 | 12.72 | 116.26 | 23.93 | 104.25 | 11.26 |
| AD-1708721.1 | 114.27 | 20.90 | 100.77 | 14.87 | 104.56 | 12.44 |
| AD-1708819.1 | 116.07 | 29.98 | 91.50 | 9.56 | 112.22 | 10.56 |
| AD-1708698.1 | 117.55 | 77.59 | 94.05 | 14.37 | 72.00 | 40.57 |
| AD-1706857.1 | 118.83 | 19.85 | 117.65 | 40.36 | 108.84 | 4.65 |
| AD-1708704.1 | 119.12 | 34.40 | 128.50 | 32.16 | 109.76 | 22.57 |
| AD-1706812.1 | 119.69 | 43.53 | 122.34 | 33.51 | 87.62 | 24.43 |
| AD-1708719.1 | 122.89 | 21.25 | 107.22 | 23.83 | 99.76 | 9.98 |
| AD-1708706.1 | 127.72 | 37.05 | 95.70 | 14.61 | 99.73 | 16.92 |
| AD-1708764.1 | 131.45 | 28.75 | 107.92 | 18.70 | 105.12 | 19.46 |
| AD-1708763.1 | 137.95 | 34.65 | 119.14 | 40.49 | 113.97 | 7.55 |
| AD-1708711.1 | 175.32 | 14.43 | 126.75 | 39.55 | 116.98 | 7.84 |
| AD-1707061.1 | 8.33 | 1.86 | 88.81 | 10.65 | 90.67 | 24.02 |
| AD-1707058.1 | 9.98 | 1.11 | 94.75 | 9.86 | 101.20 | 14.48 |
| AD-1707063.1 | 12.85 | 3.24 | 99.95 | 14.44 | 104.17 | 16.47 |
| AD-1707050.1 | 13.92 | 2.38 | 93.91 | 11.33 | 98.57 | 8.81 |
| AD-1707060.1 | 13.97 | 2.53 | 92.54 | 10.48 | 120.97 | 7.47 |
| AD-1707075.1 | 16.10 | 2.42 | 99.13 | 4.47 | 111.23 | 16.36 |
| AD-1707017.1 | 17.50 | 2.11 | 99.33 | 5.23 | 109.99 | 17.00 |
| AD-1708882.1 | 18.85 | 3.63 | 101.54 | 16.25 | 108.57 | 19.96 |
| AD-1707086.1 | 19.02 | 2.90 | 101.81 | 13.51 | 110.60 | 8.16 |
| AD-1707088.1 | 19.02 | 1.40 | 105.64 | 12.93 | 111.73 | 30.08 |
| AD-1707087.1 | 19.19 | 2.03 | 105.11 | 7.90 | 115.78 | 14.42 |
| AD-1707053.1 | 19.50 | 3.76 | 94.83 | 13.66 | 109.87 | 21.89 |
| AD-1711760.1 | 20.00 | 1.81 | 88.73 | 4.33 | 110.48 | 5.26 |
| AD-1711761.1 | 21.94 | 3.63 | 97.37 | 7.10 | 120.53 | 32.80 |
| AD-1707051.1 | 22.12 | 1.59 | 105.96 | 10.05 | 112.06 | 12.44 |
| AD-1707084.1 | 22.54 | 7.73 | 105.12 | 14.83 | 112.28 | 15.31 |
| AD-1707085.1 | 22.65 | 1.28 | 97.83 | 9.25 | 123.86 | 10.32 |
| AD-1707054.1 | 23.29 | 2.06 | 99.81 | 8.18 | 109.43 | 12.98 |
| AD-1707052.1 | 23.59 | 2.74 | 94.34 | 13.80 | 111.93 | 13.23 |
| AD-1707095.1 | 25.27 | 3.63 | 104.94 | 27.94 | 110.90 | 14.62 |
| AD-1707092.1 | 25.31 | 6.58 | 92.76 | 19.70 | 101.56 | 14.57 |
| AD-1711756.1 | 25.49 | 5.39 | 96.10 | 8.16 | 104.56 | 9.24 |
| AD-1707062.1 | 25.58 | 5.66 | 92.16 | 4.07 | 117.28 | 15.75 |
| AD-1707047.1 | 25.77 | 8.14 | 99.31 | 12.88 | 114.18 | 9.49 |
| AD-1707070.1 | 27.17 | 2.34 | 94.16 | 12.13 | 119.42 | 12.78 |
| AD-1708899.1 | 27.37 | 5.49 | 100.65 | 3.32 | 111.69 | 14.24 |
| AD-1708902.1 | 27.66 | 3.25 | 92.63 | 7.26 | 106.35 | 19.13 |
| AD-1707098.1 | 28.90 | 9.71 | 92.87 | 12.33 | 96.92 | 27.94 |
| AD-1707066.1 | 32.02 | 8.19 | 94.37 | 9.02 | 107.58 | 12.73 |
| AD-1707083.1 | 34.19 | 13.45 | 97.84 | 13.54 | 126.24 | 32.35 |
| AD-1707057.1 | 34.23 | 5.87 | 100.62 | 7.09 | 121.36 | 13.17 |
| AD-1707059.1 | 34.79 | 4.28 | 108.93 | 6.94 | 125.08 | 3.39 |
| AD-1707018.1 | 36.61 | 3.49 | 112.84 | 18.20 | 103.78 | 12.48 |
| AD-1707067.1 | 37.21 | 9.85 | 101.33 | 2.41 | 109.01 | 6.56 |
| AD-1711758.1 | 37.55 | 1.79 | 95.70 | 13.53 | 101.50 | 11.23 |
| AD-1707082.1 | 39.65 | 9.15 | 98.31 | 8.81 | 107.83 | 11.35 |
| AD-1707076.1 | 40.68 | 4.39 | 100.27 | 1.83 | 120.22 | 15.13 |
| AD-1707048.1 | 41.96 | 8.19 | 104.43 | 20.77 | 100.43 | 17.11 |
| AD-1707019.1 | 42.99 | 5.23 | 99.22 | 6.55 | 107.64 | 17.16 |
| AD-1708890.1 | 43.91 | 18.14 | 100.48 | 14.09 | 98.26 | 19.93 |
| AD-1707093.1 | 44.02 | 1.40 | 105.14 | 8.37 | 117.58 | 5.28 |
| AD-1708911.1 | 44.15 | 7.91 | 95.63 | 15.64 | 108.40 | 21.86 |
| AD-1707105.1 | 44.17 | 8.08 | 110.35 | 11.53 | 115.89 | 15.69 |
| AD-1707064.1 | 44.50 | 3.66 | 102.70 | 9.58 | 110.63 | 13.42 |
| AD-1707074.1 | 44.84 | 9.51 | 101.54 | 7.85 | 104.90 | 13.69 |
| AD-1707056.1 | 46.78 | 10.10 | 102.19 | 11.68 | 113.06 | 22.60 |
| AD-1711762.1 | 49.02 | 6.03 | 97.20 | 2.29 | 107.59 | 3.47 |
| AD-1707078.1 | 52.73 | 5.48 | 107.20 | 15.35 | 115.13 | 11.87 |
| AD-1707030.1 | 53.66 | 6.53 | 111.11 | 14.02 | 113.90 | 15.90 |
| AD-1707077.1 | 53.70 | 8.63 | 101.57 | 13.11 | 111.56 | 8.32 |
| AD-1707065.1 | 53.74 | 1.99 | 108.29 | 8.35 | 122.33 | 12.73 |
| AD-1707127.1 | 54.77 | 8.44 | 105.15 | 8.40 | 108.70 | 12.81 |
| AD-1707094.1 | 57.47 | 8.53 | 108.23 | 12.77 | 105.37 | 10.86 |
| AD-1707020.1 | 58.01 | 13.48 | 101.09 | 15.13 | 110.62 | 22.22 |
| AD-1707021.1 | 58.79 | 18.20 | 124.68 | 43.20 | 100.48 | 22.35 |
| AD-1707080.1 | 58.94 | 7.31 | 104.10 | 9.25 | 116.61 | 6.61 |
| AD-1707126.1 | 59.59 | 9.32 | 96.42 | 13.31 | 109.61 | 12.60 |
| AD-1708908.1 | 59.96 | 11.47 | 105.79 | 7.21 | 205.27 | 163.17 |
| AD-1707125.1 | 60.35 | 4.53 | 103.79 | 11.65 | 116.67 | 11.23 |
| AD-1708901.1 | 60.42 | 16.23 | 92.03 | 15.94 | 119.73 | 19.06 |
| AD-1711755.1 | 60.73 | 5.54 | 97.60 | 4.64 | 113.80 | 6.04 |
| AD-1707055.1 | 61.12 | 9.30 | 96.50 | 10.89 | 102.20 | 22.76 |
| AD-1707014.1 | 61.49 | 4.18 | 99.29 | 8.04 | 109.12 | 13.68 |
| AD-1707023.1 | 62.68 | 15.83 | 97.52 | 15.74 | 104.31 | 8.10 |
| AD-1706991.1 | 64.23 | 11.46 | 88.71 | 9.37 | 95.92 | 12.46 |
| AD-1707081.1 | 64.73 | 13.16 | 107.14 | 11.08 | 112.73 | 29.65 |
| AD-1708872.1 | 66.53 | 19.46 | 88.90 | 9.68 | 112.87 | 12.88 |
| AD-1707097.1 | 67.80 | 12.95 | 105.41 | 12.10 | 108.88 | 12.85 |
| AD-1708907.1 | 69.34 | 5.34 | 111.02 | 6.94 | 103.77 | 12.88 |
| AD-1707013.1 | 70.83 | 20.94 | 107.47 | 7.74 | 94.44 | 11.05 |
| AD-1707015.1 | 71.33 | 23.32 | 105.50 | 8.59 | 106.57 | 16.42 |
| AD-1708887.1 | 71.55 | 15.47 | 106.33 | 10.29 | 110.30 | 17.14 |
| AD-1707129.1 | 71.65 | 20.96 | 103.58 | 6.43 | 91.33 | 26.27 |
| AD-1708844.1 | 72.88 | 12.10 | 116.14 | 37.29 | 110.62 | 3.95 |
| AD-1708856.1 | 73.95 | 18.67 | 103.53 | 5.03 | 80.24 | 39.02 |
| AD-1708875.1 | 76.60 | 11.35 | 99.59 | 15.59 | 135.66 | 18.88 |
| AD-1708889.1 | 79.17 | 11.66 | 110.70 | 17.57 | 120.98 | 7.68 |
| AD-1707049.1 | 80.31 | 5.85 | 108.76 | 7.19 | 119.03 | 5.82 |
| AD-1711763.1 | 84.78 | 21.20 | 99.75 | 14.69 | 113.14 | 14.33 |
| AD-1707024.1 | 87.28 | 6.38 | 93.68 | 12.29 | 108.98 | 14.26 |
| AD-1707022.1 | 87.29 | 14.92 | 98.16 | 14.55 | 102.07 | 11.52 |
| AD-1707128.1 | 87.44 | 2.93 | 94.65 | 5.66 | 109.94 | 20.88 |
| AD-1711759.1 | 88.12 | 18.24 | 106.57 | 14.25 | 111.09 | 6.10 |
| AD-1707016.1 | 88.23 | 17.94 | 94.55 | 2.56 | 104.53 | 16.40 |
| AD-1711757.1 | 88.63 | 12.42 | 95.80 | 12.28 | 122.43 | 7.14 |
| AD-1708842.1 | 89.93 | 21.36 | 125.99 | 41.26 | 125.37 | 9.77 |
| AD-1708849.1 | 91.50 | 19.06 | 116.08 | 31.45 | 79.83 | 13.17 |
| AD-1706990.1 | 91.94 | 11.09 | 125.77 | 47.09 | 109.78 | 6.85 |
| AD-1708921.1 | 112.06 | 22.19 | 112.08 | 21.18 | 113.33 | 20.65 |
| AD-1707025.1 | 122.67 | 6.40 | 108.76 | 12.64 | 120.07 | 12.98 |
| AD-1707152.1 | 13.98 | 2.96 | 115.15 | 23.84 | 101.84 | 9.78 |
| AD-1708956.1 | 16.83 | 1.85 | 87.80 | 11.44 | 100.21 | 20.00 |
| AD-1707143.1 | 17.33 | 4.80 | 104.40 | 35.77 | 110.39 | 5.62 |
| AD-1707136.1 | 17.36 | 2.50 | 98.63 | 18.72 | 82.73 | 17.99 |
| AD-1707146.1 | 20.98 | 3.84 | 108.41 | 18.98 | 107.36 | 8.80 |
| AD-1707132.1 | 22.58 | 2.33 | 97.25 | 9.13 | 105.94 | 17.38 |
| AD-1707161.1 | 22.68 | 5.03 | 89.57 | 15.63 | 96.67 | 20.00 |
| AD-1707170.1 | 23.62 | 2.34 | 95.73 | 12.86 | 95.31 | 5.70 |
| AD-1707154.1 | 25.29 | 4.40 | 86.51 | 3.91 | 105.27 | 17.71 |
| AD-1707144.1 | 26.58 | 6.16 | 94.66 | 17.37 | 101.45 | 9.43 |
| AD-1707134.1 | 28.54 | 6.01 | 99.26 | 11.19 | 89.22 | 17.73 |
| AD-1707159.1 | 28.79 | 5.65 | 107.12 | 15.73 | 105.46 | 10.57 |
| AD-1707149.1 | 29.32 | 2.79 | 155.91 | 29.51 | 94.83 | 22.67 |
| AD-1707137.1 | 29.64 | 2.96 | 105.39 | 14.31 | 104.18 | 20.24 |
| AD-1708957.1 | 30.15 | 5.52 | 88.33 | 6.86 | 98.55 | 13.20 |
| AD-1707160.1 | 32.76 | 3.02 | 88.95 | 7.30 | 116.76 | 17.01 |
| AD-1711769.1 | 32.88 | 5.54 | 83.54 | 10.19 | 93.62 | 9.98 |
| AD-1711767.1 | 33.68 | 3.93 | 92.83 | 21.12 | 106.68 | 6.50 |
| AD-1711770.1 | 34.57 | 6.07 | 99.82 | 17.88 | 93.32 | 18.62 |
| AD-1707169.1 | 36.98 | 4.18 | 110.99 | 33.26 | 105.09 | 14.13 |
| AD-1707210.1 | 37.13 | 8.07 | 95.18 | 12.01 | 100.39 | 16.02 |
| AD-1711765.1 | 37.53 | 15.27 | 100.34 | 14.43 | 100.63 | 30.48 |
| AD-1707173.1 | 37.95 | 3.50 | 96.79 | 15.17 | 101.14 | 6.92 |
| AD-1707162.1 | 38.24 | 3.82 | 116.22 | 44.16 | 107.92 | 20.94 |
| AD-1708974.1 | 38.68 | 2.37 | 109.51 | 33.43 | 100.84 | 3.83 |
| AD-1707140.1 | 38.77 | 6.98 | 87.96 | 19.28 | 102.71 | 19.68 |
| AD-1707145.1 | 38.82 | 7.25 | 82.00 | 14.95 | 112.74 | 34.49 |
| AD-1708971.1 | 38.93 | 6.26 | 104.04 | 20.22 | 94.40 | 15.26 |
| AD-1707166.1 | 39.32 | 7.06 | 101.96 | 7.66 | 98.75 | 7.43 |
| AD-1707151.1 | 40.38 | 6.23 | 97.29 | 17.49 | 106.17 | 15.07 |
| AD-1708963.1 | 40.88 | 2.50 | 118.93 | 18.80 | 108.47 | 11.31 |
| AD-1707153.1 | 40.91 | 6.24 | 92.88 | 15.02 | 97.58 | 7.63 |
| AD-1707157.1 | 44.06 | 14.33 | 97.51 | 12.37 | 98.71 | 6.68 |
| AD-1707158.1 | 44.79 | 7.72 | 99.01 | 16.41 | 111.74 | 9.29 |
| AD-1708990.1 | 46.04 | 5.68 | 96.56 | 15.31 | 110.10 | 7.50 |
| AD-1707197.1 | 46.35 | 4.78 | 99.28 | 9.06 | 103.29 | 2.99 |
| AD-1707168.1 | 46.52 | 7.25 | 114.85 | 40.01 | 121.67 | 21.33 |
| AD-1707164.1 | 46.52 | 4.87 | 107.61 | 4.25 | 105.06 | 9.80 |
| AD-1707142.1 | 48.03 | 9.69 | 88.73 | 20.26 | 97.14 | 19.70 |
| AD-1707147.1 | 48.39 | 9.65 | 102.36 | 10.85 | 106.88 | 15.92 |
| AD-1707133.1 | 48.55 | 7.85 | 90.89 | 12.15 | 94.27 | 15.48 |
| AD-1707156.1 | 50.21 | 9.50 | 87.48 | 10.24 | 100.76 | 13.47 |
| AD-1707150.1 | 50.56 | 5.47 | 128.77 | 29.09 | 106.27 | 11.80 |
| AD-1711768.1 | 51.31 | 6.81 | 94.55 | 5.18 | 86.83 | 16.67 |
| AD-1707177.1 | 52.17 | 7.40 | 97.31 | 19.25 | 93.24 | 6.70 |
| AD-1707176.1 | 52.38 | 5.97 | 103.31 | 15.62 | 123.43 | 31.50 |
| AD-1707209.1 | 54.24 | 10.92 | 90.52 | 15.49 | 93.77 | 7.34 |
| AD-1707135.1 | 55.06 | 6.19 | 97.90 | 12.98 | 95.86 | 18.67 |
| AD-1707201.1 | 56.43 | 9.50 | 141.33 | 27.95 | 111.61 | 7.09 |
| AD-1707141.1 | 56.83 | 21.84 | 106.75 | 16.22 | 96.91 | 17.42 |
| AD-1707139.1 | 56.98 | 2.61 | 108.61 | 19.57 | 96.36 | 9.51 |
| AD-1707163.1 | 57.43 | 9.97 | 102.98 | 6.88 | 110.92 | 8.77 |
| AD-1707211.1 | 58.08 | 16.77 | 100.46 | 12.93 | 89.06 | 15.85 |
| AD-1707171.1 | 59.68 | 7.29 | 88.87 | 10.18 | 96.17 | 14.09 |
| AD-1711764.1 | 61.91 | 4.80 | 88.61 | 13.52 | 94.06 | 7.03 |
| AD-1709201.1 | 62.48 | 5.31 | 83.62 | 13.75 | 89.35 | 9.59 |
| AD-1707167.1 | 64.49 | 6.21 | 88.47 | 6.99 | 93.88 | 9.17 |
| AD-1707155.1 | 64.64 | 13.86 | 107.37 | 28.96 | 106.86 | 12.33 |
| AD-1707202.1 | 65.35 | 7.10 | 95.62 | 18.04 | 98.52 | 13.35 |
| AD-1707203.1 | 66.47 | 8.06 | 105.42 | 26.74 | 102.48 | 8.85 |
| AD-1708977.1 | 67.97 | 6.89 | 111.17 | 12.98 | 112.14 | 9.94 |
| AD-1707178.1 | 68.77 | 23.43 | 115.97 | 35.56 | 85.13 | 14.23 |
| AD-1707200.1 | 69.32 | 10.45 | 105.72 | 23.83 | 104.89 | 7.43 |
| AD-1707138.1 | 74.31 | 12.00 | 107.37 | 12.17 | 108.82 | 8.30 |
| AD-1707207.1 | 76.91 | 13.93 | 119.04 | 36.69 | 105.00 | 9.19 |
| AD-1707190.1 | 77.90 | 11.71 | 92.83 | 14.82 | 93.57 | 9.45 |
| AD-1708984.1 | 78.01 | 8.72 | 95.54 | 14.71 | 103.87 | 15.45 |
| AD-1707148.1 | 78.60 | 9.21 | 105.45 | 9.27 | 106.10 | 20.83 |
| AD-1707172.1 | 79.74 | 8.47 | 106.69 | 11.16 | 99.53 | 16.18 |
| AD-1708986.1 | 80.65 | 10.97 | 121.14 | 24.43 | 108.29 | 8.71 |
| AD-1707165.1 | 82.20 | 12.26 | 128.70 | 34.94 | 101.82 | 15.99 |
| AD-1708962.1 | 84.11 | 7.41 | 91.81 | 13.52 | 81.71 | 30.08 |
| AD-1707204.1 | 84.21 | 9.53 | 104.10 | 25.70 | 98.83 | 16.90 |
| AD-1711772.1 | 84.59 | 8.95 | 91.65 | 21.63 | 102.48 | 22.65 |
| AD-1711766.1 | 87.33 | 12.72 | 93.37 | 15.24 | 109.16 | 2.18 |
| AD-1709022.1 | 87.35 | 12.09 | 89.48 | 15.28 | 102.93 | 16.68 |
| AD-1709028.1 | 88.42 | 9.93 | 93.89 | 24.08 | 104.19 | 7.73 |
| AD-1707179.1 | 89.17 | 13.08 | 100.09 | 8.41 | 105.13 | 8.34 |
| AD-1707205.1 | 92.52 | 12.36 | 108.95 | 4.96 | 112.68 | 11.95 |
| AD-1707180.1 | 93.48 | 21.70 | 98.26 | 9.31 | 105.78 | 14.35 |
| AD-1707174.1 | 93.87 | 10.14 | 95.00 | 16.23 | 109.95 | 15.51 |
| AD-1707208.1 | 94.27 | 14.12 | 117.41 | 38.11 | 110.38 | 9.20 |
| AD-1708976.1 | 94.71 | 18.83 | 101.36 | 7.68 | 107.96 | 12.07 |
| AD-1709021.1 | 97.52 | 17.75 | 92.57 | 13.43 | 99.20 | 6.38 |
| AD-1707189.1 | 99.48 | 6.62 | 96.95 | 9.64 | 97.68 | 11.39 |
| AD-1707206.1 | 100.82 | 16.60 | 96.42 | 11.21 | 106.77 | 24.93 |
| AD-1711771.1 | 104.52 | 3.03 | 88.98 | 15.82 | 102.81 | 12.47 |
| AD-1709026.1 | 116.40 | 6.19 | 101.82 | 20.63 | 112.17 | 12.49 |
| AD-1707182.1 | 118.95 | 22.62 | 116.54 | 37.28 | 114.08 | 5.65 |
| AD-1709009.1 | 119.75 | 15.80 | 122.88 | 22.76 | 108.96 | 16.73 |
| AD-1709032.1 | 10.65 | 1.46 | 72.91 | 9.78 | 87.30 | 6.27 |
| AD-1709044.1 | 10.97 | 0.72 | 93.48 | 14.31 | 112.97 | 13.33 |
| AD-1707224.1 | 12.74 | 2.75 | 71.54 | 13.48 | 91.74 | 19.65 |
| AD-1707306.1 | 13.25 | 1.84 | 78.47 | 12.33 | 103.70 | 13.65 |
| AD-1707225.1 | 13.42 | 2.08 | 75.80 | 6.57 | 107.46 | 18.05 |
| AD-1707223.1 | 13.58 | 4.79 | 79.36 | 12.93 | 108.17 | 24.63 |
| AD-1707305.1 | 13.79 | 0.84 | 97.69 | 13.40 | 103.89 | 16.61 |
| AD-1711773.1 | 13.84 | 1.32 | 90.16 | 16.57 | 134.96 | 30.18 |
| AD-1707214.1 | 14.01 | 4.99 | 80.78 | 9.25 | 102.66 | 21.99 |
| AD-1709038.1 | 14.03 | 1.38 | 100.99 | 17.22 | 138.67 | 38.28 |
| AD-1707317.1 | 14.12 | 1.62 | 84.03 | 15.86 | 107.44 | 6.76 |
| AD-1707216.1 | 14.52 | 2.86 | 86.31 | 10.19 | 85.93 | 0.00 |
| AD-1707318.1 | 14.74 | 1.94 | 69.40 | 5.08 | 127.81 | 35.42 |
| AD-1707304.1 | 15.23 | 2.90 | 97.01 | 7.85 | 152.32 | 32.19 |
| AD-1707313.1 | 15.77 | 3.15 | 80.19 | 14.57 | 98.62 | 21.63 |
| AD-1707221.1 | 16.00 | 2.73 | 83.56 | 12.11 | 104.63 | 25.69 |
| AD-1707213.1 | 17.50 | 1.12 | 91.79 | 13.61 | 110.12 | 14.97 |
| AD-1707218.1 | 18.01 | 2.72 | 95.39 | 8.58 | 137.53 | 31.38 |
| AD-1709130.1 | 18.28 | 2.33 | 73.33 | 9.92 | 95.68 | 6.54 |
| AD-1711774.1 | 18.77 | 16.50 | 98.28 | 26.33 | 146.32 | 49.75 |
| AD-1707303.1 | 18.77 | 2.61 | 86.31 | 8.27 | 118.33 | 22.15 |
| AD-1707290.1 | 19.51 | 2.26 | 97.82 | 7.63 | 114.46 | 14.53 |
| AD-1709034.1 | 19.87 | 8.67 | 95.49 | 13.97 | 134.79 | 30.19 |
| AD-1707289.1 | 21.00 | 5.23 | 94.06 | 5.36 | 111.31 | 11.21 |
| AD-1707280.1 | 21.21 | 2.95 | 86.67 | 9.47 | 96.46 | 8.51 |
| AD-1707212.1 | 22.71 | 3.39 | 94.41 | 5.67 | 120.86 | 31.47 |
| AD-1707288.1 | 22.72 | 4.43 | 93.00 | 14.56 | 113.10 | 14.44 |
| AD-1707291.1 | 22.84 | 3.29 | 105.07 | 22.57 | 105.16 | 16.77 |
| AD-1707314.1 | 23.13 | 3.99 | 98.59 | 23.48 | 106.37 | 23.07 |
| AD-1707308.1 | 23.74 | 4.68 | 95.43 | 13.97 | 113.65 | 28.74 |
| AD-1707217.1 | 25.94 | 18.18 | 80.34 | 11.48 | 105.73 | 13.57 |
| AD-1707287.1 | 25.99 | 6.84 | 92.78 | 9.70 | 108.94 | 18.00 |
| AD-1707299.1 | 26.27 | 3.08 | 97.87 | 5.04 | 123.11 | 10.32 |
| AD-1707292.1 | 27.32 | 2.25 | 99.62 | 13.65 | 103.35 | 36.19 |
| AD-1709124.1 | 27.62 | 2.53 | 93.80 | 21.22 | 117.31 | 37.59 |
| AD-1707312.1 | 28.79 | 3.24 | 101.19 | 13.56 | 125.78 | 26.36 |
| AD-1707311.1 | 29.58 | 5.31 | 102.79 | 19.49 | 108.80 | 18.25 |
| AD-1707231.1 | 29.70 | 3.41 | 110.87 | 12.10 | 122.78 | 6.80 |
| AD-1707315.1 | 29.82 | 4.37 | 94.22 | 15.09 | 117.40 | 27.65 |
| AD-1709041.1 | 30.64 | 5.89 | 112.79 | 34.30 | 123.67 | 39.64 |
| AD-1709090.1 | 30.91 | 4.76 | 96.67 | 16.65 | 106.46 | 17.17 |
| AD-1707337.1 | 31.57 | 5.82 | 93.58 | 16.80 | 108.70 | 17.59 |
| AD-1707281.1 | 33.35 | 3.66 | 101.45 | 3.78 | 107.40 | 22.02 |
| AD-1707284.1 | 33.41 | 3.61 | 98.04 | 21.19 | 117.03 | 25.08 |
| AD-1707310.1 | 35.62 | 1.48 | 118.56 | 40.26 | 107.58 | 17.75 |
| AD-1709102.1 | 35.85 | 4.29 | 107.66 | 21.90 | 124.11 | 45.38 |
| AD-1707307.1 | 35.88 | 8.73 | 96.17 | 12.20 | 109.75 | 10.94 |
| AD-1707226.1 | 36.27 | 4.27 | 107.71 | 10.16 | 111.11 | 11.64 |
| AD-1707302.1 | 36.97 | 7.05 | 91.71 | 19.52 | 113.79 | 16.00 |
| AD-1709126.1 | 37.18 | 7.60 | 101.43 | 19.25 | 124.72 | 16.78 |
| AD-1707228.1 | 38.56 | 18.34 | 98.73 | 17.99 | 112.83 | 33.73 |
| AD-1707278.1 | 41.71 | 3.76 | 106.79 | 12.12 | 120.88 | 13.90 |
| AD-1709104.1 | 42.57 | 6.08 | 98.63 | 15.39 | 107.51 | 18.98 |
| AD-1707227.1 | 43.56 | 5.85 | 105.34 | 7.24 | 106.96 | 21.11 |
| AD-1707279.1 | 43.64 | 6.62 | 95.09 | 24.45 | 98.32 | 22.69 |
| AD-1709122.1 | 45.93 | 9.47 | 121.35 | 21.87 | 110.30 | 15.15 |
| AD-1709052.1 | 48.00 | 6.56 | 104.18 | 17.40 | 141.43 | 55.52 |
| AD-1707286.1 | 49.25 | 9.69 | 96.94 | 11.77 | 107.88 | 8.01 |
| AD-1707232.1 | 49.71 | 4.79 | 103.13 | 6.35 | 101.42 | 20.85 |
| AD-1707239.1 | 51.17 | 9.25 | 94.08 | 19.53 | 111.03 | 12.43 |
| AD-1709100.1 | 51.61 | 16.14 | 106.55 | 9.21 | 138.74 | 28.67 |
| AD-1707293.1 | 52.59 | 13.82 | 118.95 | 30.71 | 102.52 | 20.23 |
| AD-1707338.1 | 52.76 | 8.61 | 101.81 | 10.45 | 115.79 | 26.48 |
| AD-1707283.1 | 53.75 | 5.20 | 120.04 | 14.87 | 136.81 | 54.63 |
| AD-1707285.1 | 54.11 | 6.28 | 108.86 | 7.48 | 113.13 | 12.98 |
| AD-1707301.1 | 55.03 | 8.84 | 90.63 | 17.10 | 107.24 | 27.55 |
| AD-1707309.1 | 56.19 | 6.30 | 97.08 | 9.15 | 105.76 | 21.42 |
| AD-1707240.1 | 58.92 | 8.28 | 96.05 | 10.01 | 93.42 | 16.45 |
| AD-1707316.1 | 59.31 | 17.56 | 109.46 | 32.98 | 157.17 | 69.02 |
| AD-1707277.1 | 60.63 | 17.08 | 100.69 | 11.68 | 115.49 | 9.64 |
| AD-1709106.1 | 61.42 | 6.05 | 98.37 | 14.84 | 129.70 | 28.96 |
| AD-1709120.1 | 62.12 | 11.73 | 96.87 | 22.29 | 120.52 | 32.78 |
| AD-1707276.1 | 62.36 | 7.14 | 101.51 | 20.17 | 100.78 | 19.23 |
| AD-1709148.1 | 62.57 | 15.47 | 94.00 | 3.55 | 95.21 | 2.66 |
| AD-1707275.1 | 62.62 | 6.51 | 93.58 | 14.35 | 99.46 | 19.67 |
| AD-1709111.1 | 63.90 | 15.14 | 95.56 | 9.44 | 120.37 | 39.53 |
| AD-1709097.1 | 69.40 | 7.55 | 103.39 | 27.37 | 128.13 | 10.58 |
| AD-1707282.1 | 69.63 | 7.45 | 99.24 | 17.79 | 124.74 | 38.28 |
| AD-1707234.1 | 70.71 | 9.87 | 114.33 | 37.40 | 110.04 | 19.59 |
| AD-1707230.1 | 74.46 | 12.47 | 95.56 | 8.67 | 115.51 | 17.32 |
| AD-1709098.1 | 79.18 | 4.31 | 104.27 | 10.48 | 116.87 | 26.13 |
| AD-1707241.1 | 79.49 | 9.37 | 111.57 | 20.66 | 120.03 | 23.30 |
| AD-1707236.1 | 85.92 | 13.55 | 109.82 | 23.40 | 131.32 | 45.71 |
| AD-1709128.1 | 86.19 | 11.09 | 117.37 | 14.30 | 114.43 | 20.56 |
| AD-1707242.1 | 87.51 | 6.96 | 97.20 | 14.18 | 110.78 | 22.01 |
| AD-1707233.1 | 91.33 | 10.63 | 105.56 | 19.90 | 95.12 | 23.29 |
| AD-1707237.1 | 91.92 | 10.46 | 106.06 | 19.52 | 113.76 | 36.13 |
| AD-1707229.1 | 92.04 | 4.24 | 101.96 | 21.38 | 130.00 | 26.36 |
| AD-1709056.1 | 94.72 | 20.30 | 109.17 | 32.34 | 119.96 | 16.65 |
| AD-1709031.1 | 107.23 | 18.65 | 105.11 | 9.56 | 115.47 | 29.46 |
| AD-1707636.1 | 10.58 | 3.09 | 73.37 | 13.26 | 101.03 | 16.01 |
| AD-1711779.1 | 12.37 | 2.63 | 71.60 | 15.39 | 110.73 | 23.21 |
| AD-1707639.1 | 14.43 | 3.04 | 76.92 | 14.30 | 99.84 | 12.54 |
| AD-1707641.1 | 14.56 | 1.31 | 72.69 | 13.14 | 87.79 | 19.99 |
| AD-1707640.1 | 15.36 | 5.50 | 73.67 | 8.05 | 84.94 | 24.69 |
| AD-1707638.1 | 15.84 | 2.03 | 74.50 | 10.42 | 102.75 | 14.50 |
| AD-1707637.1 | 16.00 | 1.31 | 84.11 | 20.33 | 120.69 | 21.72 |
| AD-1707340.1 | 18.02 | 4.57 | 71.49 | 7.53 | 86.85 | 11.99 |
| AD-1707632.1 | 19.56 | 3.37 | 101.07 | 23.16 | 99.62 | 10.24 |
| AD-1711775.1 | 20.20 | 2.65 | 91.97 | 18.77 | 103.33 | 4.55 |
| AD-1707339.1 | 21.62 | 5.49 | 91.29 | 16.30 | 107.99 | 14.63 |
| AD-1707634.1 | 23.26 | 5.19 | 94.39 | 10.58 | 110.43 | 6.43 |
| AD-1709151.1 | 24.09 | 2.26 | 95.46 | 13.85 | 85.84 | 17.45 |
| AD-1709442.1 | 24.19 | 1.70 | 99.99 | 21.91 | 106.91 | 7.38 |
| AD-1707630.1 | 24.82 | 2.27 | 82.71 | 18.99 | 100.07 | 9.51 |
| AD-1709310.1 | 25.64 | 4.25 | 113.85 | 44.32 | 117.47 | 5.21 |
| AD-1707605.1 | 25.97 | 3.89 | 94.46 | 16.93 | 109.86 | 6.59 |
| AD-1709372.1 | 27.94 | 2.72 | 115.20 | 28.81 | 94.89 | 9.83 |
| AD-1707631.1 | 28.93 | 4.48 | 100.66 | 29.44 | 98.29 | 12.45 |
| AD-1711776.1 | 29.75 | 7.50 | 96.97 | 16.01 | 79.21 | 26.10 |
| AD-1707633.1 | 30.49 | 6.28 | 103.63 | 27.18 | 99.15 | 10.39 |
| AD-1709301.1 | 31.17 | 2.49 | 100.61 | 18.34 | 106.10 | 9.33 |
| AD-1707466.1 | 33.17 | 3.58 | 80.17 | 10.16 | 91.78 | 17.83 |
| AD-1709410.1 | 33.26 | 11.51 | 109.37 | 45.97 | 89.98 | 28.25 |
| AD-1707629.1 | 34.41 | 10.14 | 100.46 | 13.51 | 108.44 | 26.17 |
| AD-1707388.1 | 34.54 | 7.23 | 95.22 | 14.50 | 102.57 | 10.06 |
| AD-1707341.1 | 35.41 | 11.95 | 89.30 | 5.48 | 100.63 | 9.92 |
| AD-1707472.1 | 36.07 | 7.86 | 79.99 | 12.62 | 97.28 | 14.58 |
| AD-1707470.1 | 37.22 | 3.26 | 80.96 | 13.21 | 106.70 | 7.03 |
| AD-1709300.1 | 37.80 | 2.04 | 133.54 | 24.47 | 107.60 | 9.91 |
| AD-1707606.1 | 37.97 | 8.54 | 103.68 | 30.81 | 99.47 | 10.48 |
| AD-1709434.1 | 38.13 | 5.93 | 93.06 | 10.01 | 92.27 | 6.32 |
| AD-1707479.1 | 38.62 | 3.53 | 100.45 | 19.44 | 104.42 | 10.85 |
| AD-1707474.1 | 40.76 | 12.33 | 91.91 | 7.21 | 92.10 | 6.30 |
| AD-1707478.1 | 40.81 | 7.35 | 92.42 | 19.60 | 92.52 | 18.25 |
| AD-1709433.1 | 40.81 | 2.17 | 93.17 | 12.95 | 107.44 | 15.95 |
| AD-1707342.1 | 41.92 | 3.25 | 95.88 | 23.23 | 99.12 | 7.85 |
| AD-1707481.1 | 43.58 | 6.80 | 82.30 | 6.97 | 84.65 | 18.42 |
| AD-1707577.1 | 43.88 | 4.91 | 85.72 | 6.14 | 95.04 | 14.26 |
| AD-1707556.1 | 44.01 | 5.20 | 101.93 | 28.43 | 101.74 | 10.99 |
| AD-1711777.1 | 45.14 | 11.21 | 114.45 | 10.62 | 96.73 | 20.52 |
| AD-1709443.1 | 45.22 | 0.83 | 100.07 | 11.26 | 97.92 | 7.67 |
| AD-1707486.1 | 45.51 | 9.49 | 100.63 | 5.39 | 100.14 | 11.85 |
| AD-1707628.1 | 46.62 | 6.73 | 113.39 | 21.12 | 93.74 | 13.75 |
| AD-1707480.1 | 46.88 | 6.69 | 102.09 | 18.77 | 110.14 | 13.44 |
| AD-1709411.1 | 47.31 | 13.14 | 87.52 | 8.56 | 91.88 | 24.45 |
| AD-1711778.1 | 48.28 | 11.80 | 111.20 | 13.56 | 94.81 | 18.75 |
| AD-1709237.1 | 48.28 | 6.38 | 94.22 | 8.15 | 96.80 | 12.70 |
| AD-1707483.1 | 48.39 | 4.85 | 99.57 | 17.10 | 94.96 | 21.55 |
| AD-1709304.1 | 50.75 | 12.20 | 99.78 | 16.16 | 92.66 | 11.59 |
| AD-1707578.1 | 51.22 | 9.70 | 105.42 | 11.28 | 98.33 | 5.94 |
| AD-1707626.1 | 51.23 | 8.00 | 93.89 | 16.64 | 107.20 | 11.75 |
| AD-1707553.1 | 51.76 | 10.35 | 97.28 | 9.61 | 95.98 | 19.82 |
| AD-1709317.1 | 53.03 | 12.07 | 95.68 | 17.98 | 106.76 | 17.19 |
| AD-1707627.1 | 53.41 | 17.00 | 90.59 | 17.84 | 98.25 | 18.90 |
| AD-1709429.1 | 53.84 | 4.92 | 98.91 | 15.37 | 103.18 | 17.21 |
| AD-1707469.1 | 54.22 | 8.62 | 96.86 | 15.86 | 105.03 | 6.45 |
| AD-1707555.1 | 54.36 | 14.24 | 95.46 | 9.45 | 101.46 | 22.99 |
| AD-1709502.1 | 54.67 | 11.47 | 97.24 | 11.50 | 96.65 | 11.03 |
| AD-1707467.1 | 55.71 | 8.17 | 105.11 | 18.31 | 108.78 | 10.76 |
| AD-1707473.1 | 57.10 | 9.09 | 85.76 | 12.49 | 101.37 | 17.12 |
| AD-1707557.1 | 58.60 | 9.88 | 96.92 | 24.28 | 97.24 | 15.17 |
| AD-1707625.1 | 59.10 | 4.85 | 107.25 | 29.88 | 114.62 | 8.75 |
| AD-1707482.1 | 59.61 | 7.43 | 105.12 | 9.08 | 107.28 | 12.66 |
| AD-1707471.1 | 60.25 | 8.69 | 115.63 | 30.61 | 110.02 | 25.57 |
| AD-1707468.1 | 60.62 | 11.06 | 98.79 | 8.96 | 98.07 | 21.08 |
| AD-1709307.1 | 60.77 | 11.96 | 104.13 | 18.31 | 99.16 | 16.21 |
| AD-1707416.1 | 62.39 | 10.60 | 106.20 | 29.09 | 108.74 | 6.92 |
| AD-1707476.1 | 62.69 | 6.78 | 98.18 | 21.33 | 114.57 | 25.32 |
| AD-1707477.1 | 63.06 | 14.52 | 106.74 | 20.36 | 106.68 | 14.21 |
| AD-1707475.1 | 65.11 | 5.23 | 98.37 | 14.42 | 105.46 | 7.86 |
| AD-1709254.1 | 66.79 | 23.87 | 101.35 | 11.41 | 89.71 | 18.70 |
| AD-1707390.1 | 67.23 | 7.60 | 100.09 | 13.09 | 95.79 | 8.38 |
| AD-1709298.1 | 68.03 | 10.97 | 96.34 | 17.17 | 108.50 | 15.76 |
| AD-1709390.1 | 68.34 | 8.57 | 105.65 | 25.15 | 99.82 | 10.51 |
| AD-1707484.1 | 69.92 | 9.74 | 97.85 | 20.58 | 99.48 | 13.58 |
| AD-1709314.1 | 72.02 | 3.76 | 122.26 | 28.02 | 109.58 | 16.56 |
| AD-1709431.1 | 73.69 | 13.99 | 115.10 | 20.10 | 103.94 | 18.67 |
| AD-1707554.1 | 74.14 | 16.74 | 103.41 | 15.16 | 99.75 | 11.58 |
| AD-1707412.1 | 78.12 | 15.95 | 135.10 | 34.55 | 107.09 | 20.15 |
| AD-1707624.1 | 81.73 | 10.74 | 121.46 | 18.90 | 111.10 | 15.87 |
| AD-1707623.1 | 84.10 | 14.14 | 117.90 | 34.70 | 101.07 | 11.24 |
| AD-1707485.1 | 85.82 | 5.18 | 96.24 | 6.20 | 108.58 | 7.26 |
| AD-1707418.1 | 89.78 | 16.64 | 90.19 | 15.94 | 96.15 | 12.68 |
| AD-1709315.1 | 92.79 | 10.37 | 93.51 | 7.08 | 103.41 | 13.56 |
| AD-1707411.1 | 95.22 | 14.65 | 90.23 | 10.17 | 99.59 | 20.10 |
| AD-1709239.1 | 95.51 | 10.13 | 94.42 | 8.85 | 94.47 | 10.55 |
| AD-1707415.1 | 96.35 | 27.83 | 87.14 | 14.90 | 101.20 | 19.14 |
| AD-1709253.1 | 99.77 | 27.82 | 101.30 | 20.97 | 100.35 | 31.79 |
| AD-1707417.1 | 104.79 | 17.20 | 115.55 | 22.60 | 107.73 | 8.99 |

TABLE 21B
Single Dose Screen for dsRNA agents targeting INHBE in PHH cells (% average mRNA remaining).

| Duplex | Primary Human Hepatocytes Transfection | | | | | | Primary Human Hepatocytes Free Uptake | | | | | | | |
|---|---|---|---|---|---|---|---|---|---|---|---|---|---|---|
| Name | 10 nM | StDev | 1 nM | StDev | 0.1 nM | StDev | 250 nM | StDev | 100 nM | StDev | 10 nM | StDev | 1 nM | StDev |
| AD-1708473 | 3.84 | 1.35 | 4.83 | 0.78 | 11.90 | 5.80 | 9.05 | 2.26 | 7.91 | 2.05 | 20.30 | 4.14 | 26.88 | 9.48 |
| AD-1707061 | 4.14 | 0.80 | 7.73 | 1.54 | 10.01 | 4.27 | 5.05 | 2.70 | 9.15 | 1.74 | 19.29 | 6.44 | 22.54 | 5.46 |
| AD-1708478 | 4.21 | 0.86 | 8.74 | 1.95 | 12.12 | 2.57 | 15.32 | 3.35 | 15.49 | 4.78 | 32.44 | 12.86 | 47.21 | 3.08 |
| AD-1706584 | 6.01 | 1.00 | 12.11 | 2.32 | 20.47 | 1.86 | 15.62 | 6.96 | 12.92 | 3.51 | 31.81 | 9.56 | 39.52 | 13.24 |
| AD-1707306 | 5.41 | 0.99 | 8.64 | 1.68 | 15.40 | 3.91 | 14.67 | 4.08 | 12.03 | 5.26 | 31.22 | 4.85 | 29.94 | 12.32 |
| AD-1711744 | 7.34 | 0.93 | 22.17 | 1.93 | 24.84 | 6.82 | 16.09 | 6.18 | 18.31 | 7.16 | 46.93 | 10.77 | 21.15 | 6.60 |
| AD-1707639 | 7.39 | 0.40 | 15.74 | 1.72 | 25.11 | 1.15 | 20.36 | 7.67 | 22.33 | 6.58 | 33.27 | 5.33 | 35.71 | 13.43 |
| AD-1707641 | 6.30 | 1.05 | 11.48 | 0.98 | 13.72 | 2.64 | 14.35 | 5.72 | 16.48 | 6.07 | 27.41 | 4.58 | 37.17 | 12.82 |
| AD-1707640 | 14.25 | 5.27 | 9.89 | 2.61 | 11.62 | 2.53 | 19.98 | 9.23 | 9.86 | 1.84 | 29.19 | 8.23 | 46.42 | 16.24 |
| AD-1706583 | 9.59 | 2.03 | 11.01 | 2.55 | 33.23 | 7.79 | 32.08 | 9.27 | 34.18 | 1.07 | 44.93 | 7.59 | 47.65 | 14.84 |
| AD-1708956 | 8.29 | 1.74 | 7.69 | 1.78 | 20.17 | 2.12 | 27.77 | 10.81 | 21.34 | 8.65 | 51.13 | 12.95 | 62.63 | 10.70 |
| AD-1706591 | 17.87 | 2.33 | 21.38 | 2.89 | 33.74 | 2.09 | 35.01 | 8.34 | 43.04 | 5.73 | 55.08 | 8.42 | 49.40 | 1.88 |
| AD-1706593 | 16.39 | 2.72 | 21.56 | 5.13 | 38.39 | 4.68 | 38.38 | 2.01 | 40.78 | 12.66 | 67.80 | 3.57 | 57.75 | 2.38 |
| AD-1707136 | 9.73 | 2.61 | 12.76 | 1.74 | 18.58 | 4.48 | 21.70 | 6.52 | 26.72 | 8.13 | 49.51 | 9.16 | 62.04 | 21.31 |
| AD-1706587 | 19.27 | 2.95 | 29.03 | 3.31 | 42.92 | 2.35 | 37.95 | 9.76 | 48.29 | 7.11 | 63.48 | 11.56 | 91.09 | 9.80 |
| AD-1706547 | 9.05 | 1.63 | 19.91 | 2.05 | 26.11 | 6.44 | 44.96 | 7.86 | 39.42 | 6.77 | 60.57 | 6.79 | 51.76 | 15.33 |
| AD-1708399 | 16.90 | 6.46 | 26.04 | 3.67 | 32.84 | 8.56 | 27.69 | 8.64 | 31.00 | 7.18 | 40.88 | 11.44 | 65.34 | 24.97 |
| AD-1707340 | 12.13 | 0.79 | 18.29 | 2.31 | 35.44 | 5.97 | 51.01 | 14.05 | 57.39 | 11.96 | 66.47 | 11.16 | 81.96 | 6.06 |
| AD-1706662 | 10.58 | 2.12 | 14.50 | 1.46 | 21.49 | 2.39 | 38.97 | 3.56 | 46.03 | 9.20 | 51.78 | 16.38 | 75.97 | 5.93 |
| AD-1709130 | 20.00 | 2.26 | 22.86 | 3.41 | 35.13 | 5.88 | 33.52 | 8.58 | 31.04 | 5.07 | 48.54 | 15.67 | 85.19 | 20.45 |
| AD-1708882 | 14.97 | 1.54 | 17.39 | 3.37 | 41.21 | 1.66 | 33.36 | 6.74 | 51.38 | 5.73 | 43.23 | 14.27 | 93.31 | 10.28 |
| AD-1707087 | 10.79 | 2.18 | 20.93 | 4.44 | 27.23 | 4.01 | 33.09 | 7.91 | 45.27 | 4.15 | 61.83 | 8.84 | 92.73 | 15.04 |
| AD-1707632 | 14.96 | 3.95 | 27.48 | 2.83 | 34.46 | 5.77 | 60.90 | 17.76 | 45.59 | 14.85 | 62.59 | 2.82 | 83.12 | 21.68 |
| AD-1709034 | 14.35 | 3.38 | 23.39 | 2.66 | 32.18 | 8.41 | 42.08 | 9.32 | 44.37 | 7.57 | 72.83 | 4.37 | 92.28 | 2.99 |
| AD-1706761 | 9.18 | 3.40 | 17.68 | 4.49 | 23.93 | 4.88 | 34.19 | 6.86 | 41.28 | 7.96 | 54.90 | 3.62 | 86.71 | 21.91 |
| AD-1711775 | 29.82 | 4.53 | 38.15 | 3.94 | 51.68 | 4.29 | 76.87 | 14.21 | 89.53 | 9.82 | 94.63 | 6.00 | 124.76 | 12.67 |
| AD-1706758 | 29.57 | 6.34 | 33.96 | 2.09 | 53.10 | 9.12 | 59.66 | 3.42 | 65.91 | 9.15 | 65.69 | 12.66 | 105.66 | 22.32 |
| AD-1707339 | 28.32 | 2.83 | 31.07 | 1.55 | 52.58 | 4.24 | 59.15 | 8.31 | 73.87 | 2.72 | 86.02 | 5.27 | 100.65 | 6.19 |
| AD-1708368 | 24.61 | 5.44 | 37.31 | 3.95 | 60.77 | 6.60 | 79.25 | 15.90 | 67.90 | 12.41 | 90.06 | 6.70 | 131.88 | 7.90 |
| AD-1706762 | 11.26 | 2.98 | 25.09 | 2.72 | 35.72 | 3.49 | 46.85 | 13.20 | 50.92 | 17.34 | 84.37 | 11.82 | 94.03 | 4.93 |
| AD-1707291 | 8.89 | 0.54 | 16.30 | 2.83 | 28.25 | 7.47 | 42.60 | 7.79 | 37.31 | 5.08 | 68.87 | 7.93 | 72.32 | 15.94 |
| AD-1707314 | 20.85 | 2.68 | 25.87 | 2.99 | 42.31 | 12.16 | 56.47 | 12.93 | 42.72 | 5.67 | 66.58 | 13.04 | 88.09 | 1.99 |
| AD-1706640 | 16.91 | 3.11 | 36.66 | 3.88 | 40.86 | 10.18 | 28.39 | 6.96 | 46.43 | 6.76 | 78.03 | 17.64 | 133.63 | 32.82 |
| AD-1707054 | 14.13 | 2.53 | 22.61 | 2.39 | 34.17 | 3.97 | 55.10 | 7.84 | 59.59 | 7.96 | 87.74 | 3.87 | 119.92 | 16.53 |
| AD-1706641 | 24.33 | 3.32 | 32.23 | 5.92 | 45.48 | 8.35 | 61.06 | 5.81 | 66.77 | 17.98 | 83.39 | 19.40 | 107.19 | 7.61 |
| AD-1707308 | 15.25 | 2.92 | 27.67 | 2.72 | 36.27 | 7.33 | 51.25 | 8.34 | 43.23 | 11.57 | 88.07 | 18.70 | 103.21 | 9.29 |
| AD-1709151 | 32.08 | 6.47 | 44.97 | 9.45 | 50.34 | 12.76 | 90.75 | 8.27 | 82.92 | 14.60 | 115.33 | 3.62 | 122.19 | 13.92 |
| AD-1706656 | 8.91 | 1.04 | 21.35 | 4.03 | 31.89 | 3.90 | 43.20 | 8.76 | 58.20 | 16.02 | 89.89 | 23.74 | 118.47 | 20.90 |
| AD-1706651 | 17.38 | 2.79 | 24.64 | 1.52 | 39.31 | 3.47 | 37.87 | 6.88 | 49.12 | 7.91 | 96.91 | 9.76 | 93.62 | 13.63 |
| AD-1711756 | 20.57 | 4.05 | 23.96 | 2.75 | 36.33 | 11.33 | 72.94 | 13.08 | 54.99 | 8.99 | 85.20 | 23.87 | 99.26 | 9.01 |
| AD-1707605 | 35.03 | 2.49 | 46.37 | 9.61 | 55.57 | 13.31 | 83.69 | 7.72 | 96.68 | 15.17 | 95.74 | 27.12 | 110.00 | 19.41 |
| AD-1707287 | 27.61 | 1.70 | 32.48 | 1.14 | 47.24 | 9.39 | 73.48 | 6.92 | 70.18 | 9.33 | 93.02 | 11.38 | 110.85 | 27.51 |
| AD-1708766 | 19.22 | 3.37 | 24.71 | 4.87 | 34.20 | 7.62 | 60.19 | 7.39 | 69.81 | 13.98 | 92.36 | 11.05 | 125.22 | 12.99 |
| AD-1706644 | 18.94 | 2.78 | 25.14 | 3.46 | 49.00 | 1.82 | 68.06 | 11.84 | 83.45 | 4.42 | 87.08 | 12.23 | 127.39 | 7.76 |
| AD-1706590 | 24.14 | 4.90 | 34.95 | 3.80 | 53.60 | 6.42 | 78.09 | 12.28 | 113.12 | 26.95 | 114.41 | 16.33 | 135.34 | 15.94 |
| AD-1708407 | 24.10 | 7.20 | 30.72 | 4.39 | 43.60 | 6.30 | 74.49 | 11.38 | 70.25 | 8.69 | 90.22 | 13.32 | 105.77 | 8.20 |
| AD-1707292 | 24.48 | 4.27 | 34.78 | 2.52 | 45.46 | 9.22 | 72.04 | 12.03 | 58.89 | 13.58 | 86.65 | 5.87 | 86.26 | 19.87 |
| AD-1708899 | 17.77 | 2.91 | 21.87 | 1.95 | 26.43 | 7.65 | 68.65 | 14.69 | 99.52 | 14.24 | 94.06 | 11.30 | 111.70 | 15.07 |
| AD-1706674 | 20.19 | 2.23 | 26.54 | 1.38 | 47.96 | 2.84 | 70.03 | 6.72 | 69.05 | 8.66 | 102.69 | 11.08 | 104.89 | 21.93 |
| AD-1707631 | 20.66 | 2.86 | 19.79 | 4.30 | 32.43 | 5.70 | 61.81 | 11.29 | 71.35 | 13.55 | 93.00 | 11.79 | 126.82 | 9.10 |
| AD-1706759 | 18.55 | 2.17 | 26.28 | 2.28 | 40.19 | 5.23 | 63.77 | 4.79 | 77.91 | 12.04 | 97.13 | 8.57 | 111.16 | 27.11 |
| AD-1711747 | 11.52 | 4.71 | 17.00 | 2.82 | 33.59 | 6.89 | 55.08 | 11.20 | 85.92 | 27.07 | 98.80 | 9.94 | 133.36 | 9.56 |
| AD-1707149 | 15.95 | 3.01 | 28.26 | 5.99 | 40.68 | 5.31 | 57.51 | 12.07 | 83.78 | 12.31 | 102.28 | 8.63 | 121.17 | 7.59 |
| AD-1708251 | 31.99 | 5.46 | 30.05 | 3.30 | 44.02 | 7.05 | 65.77 | 7.52 | 59.12 | 18.47 | 100.89 | 12.16 | 103.22 | 24.69 |
| AD-1711776 | 38.30 | 15.35 | 48.19 | 5.85 | 63.98 | 12.66 | 90.37 | 9.23 | 85.76 | 14.78 | 97.44 | 13.61 | 110.66 | 12.48 |
| AD-1707315 | 22.73 | 2.34 | 24.01 | 5.64 | 46.41 | 5.45 | 84.80 | 11.81 | 72.86 | 8.03 | 102.13 | 20.54 | 110.56 | 7.38 |
| AD-1706750 | 18.16 | 1.56 | 20.63 | 4.42 | 29.43 | 10.64 | 40.85 | 4.80 | 55.55 | 5.48 | 105.85 | 15.64 | 117.08 | 19.52 |
| AD-1706799 | 31.99 | 6.20 | 33.80 | 5.58 | 46.45 | 8.79 | 90.17 | 12.69 | 101.66 | 26.60 | 111.12 | 20.30 | 133.05 | 18.74 |
| AD-1708485 | 13.61 | 3.64 | 23.72 | 2.33 | 52.65 | 11.16 | 73.70 | 2.25 | 77.15 | 6.87 | 103.41 | 11.13 | 127.34 | 12.36 |
| AD-1707633 | 23.63 | 5.15 | 28.24 | 4.65 | 36.48 | 6.12 | 75.57 | 11.01 | 110.02 | 45.47 | 112.62 | 17.17 | 128.91 | 16.41 |
| AD-1709090 | 20.30 | 2.87 | 24.48 | 3.75 | 37.02 | 8.76 | 77.61 | 7.95 | 99.11 | 14.22 | 114.49 | 22.90 | 117.89 | 14.16 |
| AD-1707466 | 63.36 | 14.56 | 61.06 | 10.24 | 79.45 | 2.15 | 92.63 | 22.18 | 85.04 | 23.68 | 98.11 | 26.25 | 92.94 | 9.69 |
| AD-1711767 | 24.16 | 3.71 | 28.27 | 4.36 | 42.24 | 10.42 | 60.63 | 4.45 | 72.25 | 7.49 | 96.33 | 15.95 | 122.97 | 18.33 |
| AD-1707388 | 61.29 | 14.42 | 59.32 | 8.57 | 69.95 | 15.09 | 95.33 | 7.44 | 105.65 | 6.00 | 113.84 | 11.51 | 128.35 | 23.12 |
| AD-1711770 | 18.87 | 3.61 | 20.46 | 5.47 | 32.18 | 8.80 | 57.75 | 16.97 | 61.76 | 7.82 | 104.71 | 7.77 | 122.13 | 13.61 |
| AD-1706748 | 24.20 | 6.04 | 35.62 | 6.64 | 50.19 | 11.08 | 78.53 | 12.43 | 88.65 | 8.77 | 105.57 | 16.18 | 128.56 | 25.42 |
| AD-1707307 | 26.97 | 4.34 | 35.22 | 4.99 | 63.75 | 9.28 | 59.79 | 4.39 | 75.85 | 8.88 | 101.29 | 7.21 | 120.76 | 17.30 |
| AD-1707302 | 20.32 | 7.78 | 29.18 | 5.74 | 45.72 | 7.23 | 63.84 | 7.84 | 76.67 | 4.98 | 112.01 | 4.31 | 136.13 | 16.48 |
| AD-1709126 | 27.45 | 10.18 | 32.34 | 4.21 | 57.05 | 10.57 | 53.83 | 6.16 | 49.10 | 5.95 | 88.09 | 16.28 | 112.27 | 11.26 |
| AD-1711765 | 17.66 | 4.49 | 22.90 | 2.22 | 28.06 | 8.93 | 40.32 | 5.52 | 60.56 | 12.85 | 94.87 | 19.12 | 99.62 | 14.72 |
| AD-1707140 | 14.92 | 5.79 | 15.70 | 5.48 | 29.72 | 5.60 | 45.36 | 2.81 | 60.43 | 8.25 | 51.92 | 22.84 | 106.75 | 10.76 |
| AD-1706751 | 19.74 | 4.12 | 19.51 | 8.94 | 51.31 | 13.73 | 31.89 | 5.76 | 61.33 | 16.59 | 86.50 | 16.71 | 119.06 | 17.21 |
| AD-1706930 | 18.10 | 6.15 | 17.27 | 4.50 | 29.73 | 6.81 | 44.91 | 14.50 | 53.16 | 2.39 | 92.88 | 11.31 | 94.54 | 12.43 |
| AD-1708564 | 33.34 | 10.11 | 34.73 | 8.99 | 65.01 | 8.10 | 68.81 | 10.42 | 82.59 | 24.87 | 107.17 | 6.26 | 105.04 | 13.30 |
| AD-1706746 | 28.39 | 9.86 | 38.43 | 9.94 | 65.72 | 12.30 | 56.28 | 12.49 | 81.09 | 8.55 | 106.87 | 14.96 | 91.27 | 18.95 |
| AD-1706863 | 21.83 | 8.44 | 29.55 | 2.92 | 39.21 | 8.12 | 64.73 | 12.20 | 61.97 | 17.33 | 61.21 | 5.92 | 91.41 | 19.42 |
| AD-1706933 | 19.52 | 6.57 | 24.12 | 4.64 | 36.58 | 13.09 | 52.18 | 9.14 | 60.25 | 8.05 | 76.05 | 5.15 | 89.07 | 34.13 |
| AD-1706650 | 8.22 | 2.78 | 9.86 | 1.53 | 18.29 | 4.10 | 18.41 | 2.70 | 31.54 | 9.06 | 47.21 | 2.59 | 82.80 | 6.30 |
| AD-1706645 | 9.54 | 2.94 | 13.04 | 1.86 | 19.68 | 5.15 | 23.19 | 1.25 | 31.74 | 9.21 | 58.68 | 3.98 | 75.47 | 14.03 |
| AD-1706763 | 8.78 | 2.73 | 10.89 | 2.20 | 18.03 | 2.25 | 24.39 | 5.06 | 32.66 | 2.25 | 57.89 | 9.13 | 83.09 | 3.30 |
| AD-1706642 | 10.21 | 2.41 | 14.73 | 4.43 | 29.08 | 10.15 | 26.47 | 6.44 | 44.93 | 12.38 | 65.76 | 1.34 | 80.97 | 14.28 |
| AD-1706749 | 10.78 | 3.21 | 18.58 | 2.61 | 29.08 | 1.90 | 40.07 | 4.58 | 45.28 | 6.05 | 78.38 | 3.11 | 70.35 | 25.84 |
| AD-1709044 | 12.38 | 3.44 | 19.35 | 3.08 | 27.49 | 7.29 | 39.88 | 7.52 | 48.75 | 6.09 | 70.84 | 5.85 | 82.43 | 6.36 |
| AD-1707063 | 6.22 | 2.57 | 4.60 | 1.96 | 11.68 | 3.24 | 12.46 | 0.47 | 15.19 | 1.73 | 42.37 | 9.63 | 53.30 | 26.27 |
| AD-1706666 | 11.63 | 2.89 | 10.71 | 2.18 | 16.80 | 4.52 | 21.12 | 6.46 | 28.56 | 5.28 | 45.18 | 3.28 | 27.94 | 3.80 |
| AD-1707305 | 10.26 | 4.05 | 7.94 | 3.22 | 10.70 | 3.10 | 15.00 | 2.72 | 19.14 | 2.01 | 52.56 | 17.22 | 58.51 | 0.00 |
| AD-1707060 | 8.16 | 3.68 | 9.02 | 2.54 | 18.61 | 4.71 | 29.10 | 5.61 | 37.29 | 2.54 | 51.66 | 11.49 | 43.46 | 16.10 |
| AD-1707318 | 8.67 | 3.65 | 8.96 | 1.42 | 16.04 | 5.89 | 25.62 | 2.76 | 29.27 | 3.58 | 47.38 | 12.44 | 57.54 | 2.19 |
| AD-1707290 | 18.38 | 5.04 | 17.99 | 3.06 | 32.26 | 7.70 | 46.85 | 2.48 | 56.51 | 9.06 | 67.51 | 11.70 | 82.20 | 11.04 |
| AD-1711760 | 10.18 | 3.91 | 15.74 | 2.67 | 25.12 | 9.22 | 40.81 | 3.41 | 42.21 | 6.96 | 65.57 | 7.30 | 50.87 | 7.17 |

TABLE 21C
Single Dose Screen for dsRNA agents targeting INHBE in PCH cells (% average mRNA remaining).

| Duplex | Primary Cyno Hepatocytes Transfection | | | | | | Primary Cyno Hepatocytes Free Uptake | | | | | | | |
|---|---|---|---|---|---|---|---|---|---|---|---|---|---|---|
| Name | 10 nM | StDev | 1 nM | StDev | 0.1 nM | StDev | 250 nM | StDev | 100 nM | StDev | 10 nM | StDev | 1 nM | StDev |
| AD-1708473 | 7.47 | 2.74 | 32.98 | 4.49 | 38.46 | 5.22 | 5.83 | 1.24 | 7.90 | 0.68 | 13.73 | 3.81 | 36.44 | 9.10 |
| AD-1707061 | 5.91 | 1.59 | 25.97 | 2.80 | 37.95 | 4.74 | 4.93 | 1.33 | 6.19 | 1.17 | 12.75 | 1.19 | 24.67 | 3.29 |
| AD-1708478 | 10.87 | 1.82 | 34.31 | 4.82 | 44.21 | 8.99 | 8.33 | 1.99 | 9.75 | 1.98 | 12.20 | 3.03 | 22.11 | 6.43 |
| AD-1706584 | 13.05 | 2.93 | 32.59 | 4.71 | 35.84 | 5.03 | 8.45 | 2.09 | 11.65 | 2.82 | 17.02 | 1.74 | 33.73 | 6.39 |
| AD-1707306 | 9.51 | 0.94 | 34.07 | 4.86 | 43.92 | 7.44 | 11.65 | 1.92 | 8.48 | 1.71 | 14.04 | 3.13 | 39.14 | 5.62 |
| AD-1711744 | 18.10 | 4.00 | 42.42 | 4.03 | 53.93 | 8.59 | 8.55 | 2.85 | 10.68 | 2.12 | 13.50 | 4.06 | 38.67 | 0.25 |
| AD-1707639 | 18.01 | 2.14 | 45.23 | 3.14 | 57.21 | 6.84 | 16.87 | 2.63 | 13.75 | 2.87 | 20.90 | 6.68 | 37.20 | 1.37 |
| AD-1707641 | 14.45 | 1.14 | 36.97 | 4.67 | 53.00 | 3.54 | 11.06 | 1.98 | 12.53 | 1.52 | 24.21 | 4.94 | 41.21 | 5.67 |
| AD-1707640 | 20.53 | 3.28 | 37.16 | 9.19 | 62.35 | 9.81 | 15.05 | 3.30 | 20.19 | 1.59 | 24.58 | 4.89 | 25.42 | 2.79 |
| AD-1706583 | 14.48 | 3.67 | 47.86 | 4.86 | 61.48 | 8.01 | 10.32 | 3.93 | 15.82 | 6.07 | 18.61 | 4.66 | 48.58 | 11.62 |
| AD-1708956 | 11.09 | 2.08 | 35.23 | 5.58 | 50.07 | 7.79 | 9.32 | 0.27 | 11.90 | 2.85 | 24.94 | 5.33 | 45.15 | 8.24 |
| AD-1706591 | 19.64 | 2.79 | 56.40 | 7.78 | 62.31 | 6.78 | 9.18 | 1.92 | 15.12 | 0.82 | 25.21 | 7.00 | 62.16 | 9.52 |
| AD-1706593 | 18.22 | 3.15 | 50.39 | 3.94 | 50.47 | 8.38 | 9.42 | 2.42 | 11.27 | 2.59 | 23.69 | 6.94 | 50.88 | 10.01 |
| AD-1707136 | 10.23 | 2.58 | 27.34 | 6.99 | 46.91 | 8.54 | 9.04 | 1.81 | 8.49 | 1.70 | 21.51 | 2.16 | 42.87 | 4.46 |
| AD-1706587 | 23.87 | 3.81 | 46.95 | 8.49 | 62.57 | 11.27 | 14.48 | 2.31 | 15.69 | 2.72 | 25.82 | 4.63 | 47.27 | 5.35 |
| AD-1706547 | 29.86 | 3.63 | 53.87 | 10.28 | 66.80 | 3.64 | 23.99 | 4.15 | 26.80 | 8.35 | 46.70 | 7.85 | 64.97 | 16.25 |
| AD-1708399 | 24.39 | 4.14 | 56.93 | 4.99 | 62.91 | 13.62 | 12.07 | 3.35 | 13.83 | 4.69 | 26.04 | 4.79 | 66.91 | 13.04 |
| AD-1707340 | 39.28 | 4.82 | 64.21 | 4.81 | 79.59 | 4.44 | 29.23 | 6.08 | 32.92 | 12.21 | 38.14 | 5.42 | 71.22 | 22.52 |
| AD-1706662 | 14.59 | 0.79 | 39.23 | 10.93 | 58.74 | 14.45 | 16.76 | 3.53 | 14.74 | 1.00 | 30.41 | 4.29 | 60.37 | 3.75 |
| AD-1709130 | 16.24 | 2.78 | 52.70 | 10.74 | 65.15 | 10.76 | 17.57 | 3.03 | 18.14 | 2.88 | 27.68 | 4.76 | 65.67 | 7.63 |
| AD-1708882 | 16.97 | 1.09 | 45.63 | 12.78 | 77.02 | 4.42 | 11.89 | 0.90 | 12.60 | 2.44 | 27.58 | 2.96 | 58.25 | 5.90 |
| AD-1707087 | 18.19 | 1.93 | 38.32 | 10.98 | 74.09 | 4.20 | 17.93 | 3.41 | 18.11 | 2.79 | 37.96 | 5.53 | 69.05 | 2.24 |
| AD-1707632 | 25.08 | 3.09 | 40.42 | 13.55 | 58.16 | 4.73 | 18.92 | 0.75 | 17.82 | 6.37 | 27.71 | 7.00 | 53.11 | 5.97 |
| AD-1709034 | 26.18 | 2.74 | 62.45 | 7.84 | 69.43 | 9.15 | 14.25 | 1.45 | 13.43 | 4.36 | 22.01 | 7.95 | 42.74 | 7.41 |
| AD-1706761 | 14.04 | 2.46 | 48.49 | 12.33 | 57.31 | 7.84 | 11.03 | 0.09 | 9.71 | 1.51 | 22.26 | 3.89 | 83.78 | 32.45 |
| AD-1711775 | 43.13 | 4.73 | 79.00 | 6.98 | 88.54 | 8.11 | 44.74 | 6.00 | 49.54 | 8.66 | 54.24 | 14.15 | 104.57 | 8.08 |
| AD-1706758 | 32.06 | 5.59 | 68.22 | 14.20 | 82.73 | 11.67 | 22.92 | 5.17 | 22.67 | 2.26 | 40.00 | 0.42 | 73.16 | 9.75 |
| AD-1707339 | 39.24 | 2.12 | 74.96 | 0.78 | 68.46 | 12.48 | 33.30 | 3.28 | 34.74 | 9.08 | 54.47 | 10.26 | 74.36 | 15.15 |
| AD-1708368 | 40.73 | 3.67 | 67.92 | 16.66 | 91.79 | 9.70 | 23.02 | 3.99 | 26.31 | 3.29 | 39.13 | 4.09 | 76.42 | 15.36 |
| AD-1706762 | 28.37 | 6.96 | 62.89 | 6.26 | 77.63 | 9.41 | 14.52 | 1.86 | 14.28 | 1.73 | 35.29 | 4.03 | 60.12 | 9.31 |
| AD-1707291 | 23.69 | 2.29 | 43.10 | 5.34 | 63.68 | 14.11 | 20.65 | 2.71 | 15.40 | 3.39 | 31.37 | 3.02 | 62.75 | 15.07 |
| AD-1707314 | 29.79 | 6.31 | 65.15 | 5.49 | 83.38 | 12.47 | 21.26 | 5.85 | 25.31 | 2.95 | 28.72 | 3.30 | 80.36 | 4.21 |
| AD-1706640 | 35.22 | 5.23 | 62.17 | 10.30 | 72.73 | 4.13 | 12.56 | 2.49 | 13.90 | 2.35 | 31.22 | 3.54 | 67.25 | 0.70 |
| AD-1707054 | 19.36 | 3.19 | 54.28 | 2.70 | 68.42 | 3.25 | 15.34 | 2.10 | 19.26 | 3.32 | 36.61 | 5.50 | 73.41 | 6.83 |
| AD-1706641 | 38.81 | 2.77 | 83.23 | 5.90 | 81.54 | 10.41 | 26.69 | 3.72 | 24.16 | 7.74 | 49.31 | 6.53 | 98.76 | 9.65 |
| AD-1707308 | 31.18 | 3.14 | 67.03 | 11.46 | 72.91 | 13.64 | 17.47 | 5.59 | 25.13 | 0.65 | 29.27 | 3.23 | 81.25 | 8.44 |
| AD-1709151 | 58.99 | 7.07 | 99.08 | 24.13 | 82.51 | 23.90 | 49.15 | 8.11 | 35.96 | 12.08 | 52.50 | 11.94 | 106.94 | 11.16 |
| AD-1706656 | 22.28 | 2.36 | 52.59 | 5.56 | 69.36 | 9.76 | 11.40 | 2.25 | 12.08 | 3.81 | 29.92 | 2.75 | 46.55 | 4.66 |
| AD-1706651 | 31.17 | 5.34 | 55.09 | 7.98 | 50.19 | 9.10 | 12.74 | 1.10 | 12.86 | 2.14 | 28.96 | 2.78 | 58.95 | 12.54 |
| AD-1711756 | 22.78 | 4.88 | 51.83 | 14.00 | 73.32 | 15.55 | 18.21 | 2.09 | 20.58 | 2.82 | 35.07 | 2.15 | 65.70 | 19.08 |
| AD-1707605 | 51.27 | 4.38 | 77.10 | 19.46 | 83.78 | 3.65 | 48.36 | 10.82 | 47.85 | 10.00 | 49.56 | 7.16 | 93.66 | 26.70 |
| AD-1707287 | 17.93 | 2.05 | 48.59 | 9.40 | 63.94 | 7.11 | 19.30 | 2.43 | 21.57 | 2.40 | 32.78 | 6.36 | 57.70 | 4.49 |
| AD-1708766 | 18.81 | 3.17 | 55.43 | 5.57 | 70.17 | 4.47 | 15.34 | 2.89 | 17.95 | 2.34 | 25.44 | 3.89 | 64.23 | 13.01 |
| AD-1706644 | 28.89 | 6.40 | 51.39 | 16.56 | 79.04 | 6.62 | 26.48 | 2.52 | 32.64 | 2.30 | 49.95 | 1.49 | 81.75 | 8.97 |
| AD-1706590 | 38.15 | 1.61 | 80.31 | 6.44 | 92.30 | 6.41 | 26.35 | 3.32 | 25.15 | 5.92 | 40.61 | 6.35 | 78.62 | 8.57 |
| AD-1708407 | 35.96 | 4.47 | 67.88 | 12.42 | 94.43 | 8.89 | 17.03 | 2.89 | 19.27 | 4.04 | 42.22 | 5.00 | 64.72 | 15.64 |
| AD-1707292 | 39.27 | 5.95 | 72.26 | 26.50 | 73.87 | 16.12 | 21.97 | 3.63 | 28.47 | 3.81 | 42.02 | 6.40 | 83.02 | 16.74 |
| AD-1708899 | 37.10 | 1.50 | 74.69 | 9.73 | 88.87 | 10.06 | 19.00 | 6.82 | 25.47 | 3.31 | 50.32 | 9.44 | 81.40 | 2.23 |
| AD-1706674 | 32.84 | 9.12 | 64.73 | 4.42 | 83.67 | 6.57 | 23.52 | 5.70 | 28.16 | 5.66 | 35.56 | 3.67 | 79.83 | 4.59 |
| AD-1707631 | 17.72 | 3.24 | 32.29 | 8.79 | 73.51 | 6.20 | 19.06 | 3.32 | 21.57 | 2.84 | 30.74 | 2.52 | 57.82 | 7.61 |
| AD-1706759 | 22.82 | 5.97 | 59.65 | 15.92 | 81.70 | 12.26 | 15.52 | 1.03 | 15.75 | 2.69 | 31.88 | 3.25 | 64.72 | 9.61 |
| AD-1711747 | 16.88 | 1.38 | 51.75 | 5.39 | 77.38 | 9.80 | 7.61 | 1.11 | 10.05 | 2.18 | 18.90 | 2.56 | 45.02 | 6.23 |
| AD-1707149 | 30.43 | 7.20 | 68.03 | 10.50 | 95.47 | 10.74 | 12.97 | 2.94 | 15.39 | 4.97 | 31.35 | 3.87 | 51.94 | 2.96 |
| AD-1708251 | 67.20 | 2.14 | 75.30 | 12.49 | 80.77 | 12.76 | 28.28 | 6.61 | 37.65 | 10.05 | 51.75 | 12.05 | 78.36 | 9.89 |
| AD-1711776 | 42.99 | 0.86 | 80.17 | 9.26 | 89.90 | 2.55 | 33.31 | 3.56 | 39.81 | 7.57 | 61.94 | 4.12 | 88.88 | 14.71 |
| AD-1707315 | 31.05 | 8.92 | 70.52 | 5.55 | 98.15 | 8.08 | 36.35 | 6.21 | 33.91 | 4.76 | 46.61 | 2.99 | 86.97 | 17.28 |
| AD-1706750 | 20.76 | 2.52 | 61.32 | 8.84 | 71.39 | 12.47 | 16.65 | 1.24 | 15.84 | 3.69 | 29.05 | 2.00 | 65.00 | 9.30 |
| AD-1706799 | 27.06 | 4.43 | 65.37 | 6.49 | 84.62 | 11.72 | 36.11 | 8.14 | 36.55 | 9.82 | 46.21 | 10.11 | 87.85 | 10.61 |
| AD-1708485 | 21.96 | 3.70 | 48.80 | 10.16 | 86.49 | 16.04 | 18.55 | 5.12 | 24.80 | 4.25 | 28.45 | 4.00 | 72.48 | 20.64 |
| AD-1707633 | 21.02 | 2.82 | 47.90 | 7.29 | 60.86 | 3.25 | 17.84 | 4.49 | 22.25 | 9.40 | 25.12 | 5.14 | 58.59 | 13.07 |
| AD-1709090 | 21.63 | 1.82 | 53.58 | 8.28 | 75.93 | 13.41 | 25.00 | 6.30 | 24.74 | 12.69 | 36.00 | 2.38 | 65.83 | 23.02 |
| AD-1707466 | 72.22 | 20.46 | 96.23 | 13.67 | 89.94 | 17.07 | 62.02 | 9.68 | 63.83 | 11.34 | 82.95 | 20.07 | 89.09 | 5.98 |
| AD-1711767 | 30.18 | 5.67 | 66.05 | 9.01 | 71.99 | 9.45 | 12.82 | 1.91 | 18.77 | 4.64 | 31.68 | 1.25 | 63.00 | 4.37 |
| AD-1707388 | 78.28 | 3.85 | 81.05 | 21.06 | 92.40 | 9.78 | 56.73 | 14.94 | 59.70 | 18.76 | 70.84 | 9.94 | 117.00 | 32.65 |
| AD-1711770 | 24.22 | 4.30 | 50.53 | 10.17 | 60.23 | 15.99 | 13.64 | 4.56 | 18.17 | 4.10 | 29.29 | 5.60 | 63.32 | 20.42 |
| AD-1706748 | 27.88 | 7.45 | 58.08 | 8.17 | 85.22 | 9.26 | 19.35 | 7.28 | 23.70 | 10.45 | 35.92 | 2.11 | 82.43 | 29.42 |
| AD-1707307 | 38.24 | 4.51 | 69.58 | 18.90 | 81.80 | 12.11 | 22.77 | 1.58 | 24.06 | 5.50 | 34.26 | 5.34 | 72.51 | 11.65 |
| AD-1707302 | 22.90 | 3.30 | 56.34 | 5.01 | 77.35 | 8.51 | 14.86 | 4.07 | 16.11 | 7.60 | 37.43 | 6.16 | 65.34 | 12.89 |
| AD-1709126 | 37.24 | 1.81 | 67.53 | 14.34 | 74.35 | 12.21 | 25.21 | 2.16 | 25.01 | 0.88 | 40.35 | 2.47 | 78.75 | 5.06 |
| AD-1711765 | 26.06 | 4.01 | 54.94 | 4.24 | 85.81 | 12.69 | 12.51 | 3.92 | 12.54 | 2.33 | 27.24 | 4.60 | 58.54 | 9.15 |
| AD-1707140 | 20.69 | 2.95 | 41.27 | 7.55 | 65.60 | 2.37 | 10.68 | 1.92 | 13.99 | 2.40 | 28.57 | 4.11 | 48.20 | 7.92 |
| AD-1706751 | 19.01 | 0.80 | 51.90 | 10.38 | 93.47 | 7.11 | 17.08 | 4.62 | 16.12 | 5.22 | 25.48 | 3.88 | 68.13 | 17.00 |
| AD-1706930 | 13.61 | 2.50 | 33.64 | 4.46 | 54.73 | 9.10 | 15.41 | 3.46 | 19.00 | 6.91 | 30.56 | 6.18 | 74.72 | 7.50 |
| AD-1708564 | 33.12 | 3.93 | 64.85 | 7.58 | 77.16 | 9.05 | 23.64 | 4.07 | 36.07 | 9.13 | 38.87 | 5.58 | 79.09 | 9.95 |
| AD-1706746 | 36.26 | 6.43 | 72.34 | 12.42 | 100.13 | 3.81 | 23.12 | 8.26 | 28.72 | 10.09 | 45.63 | 4.80 | 72.75 | 8.12 |
| AD-1706863 | 26.84 | 5.99 | 64.11 | 16.03 | 75.02 | 16.52 | 28.71 | 5.45 | 30.51 | 4.57 | 53.96 | 7.78 | 75.02 | 6.39 |
| AD-1706933 | 24.84 | 2.39 | 53.63 | 19.88 | 61.71 | 13.32 | 16.45 | 2.89 | 21.72 | 2.52 | 33.18 | 7.42 | 67.85 | 12.54 |
| AD-1706650 | 7.75 | 1.33 | 28.02 | 3.29 | 52.07 | 12.66 | 6.10 | 2.27 | 7.05 | 1.70 | 16.05 | 4.29 | 37.57 | 4.81 |
| AD-1706645 | 10.74 | 0.62 | 29.43 | 8.71 | 52.47 | 2.06 | 7.63 | 1.56 | 9.23 | 1.42 | 17.05 | 1.33 | 42.18 | 7.55 |
| AD-1706763 | 7.28 | 0.69 | 31.38 | 8.79 | 53.36 | 11.31 | 6.52 | 0.85 | 8.04 | 2.06 | 14.76 | 2.55 | 36.65 | 8.26 |
| AD-1706642 | 8.66 | 3.81 | 30.56 | 5.40 | 54.72 | 4.19 | 8.78 | 3.63 | 11.66 | 6.36 | 16.43 | 3.88 | 36.47 | 4.72 |
| AD-1706749 | 10.66 | 1.62 | 37.02 | 7.09 | 59.79 | 5.94 | 10.16 | 0.80 | 9.50 | 2.34 | 20.32 | 2.72 | 48.14 | 5.76 |
| AD-1709044 | 17.47 | 3.75 | 34.89 | 11.05 | 65.44 | 14.86 | 17.68 | 6.18 | 13.10 | 2.45 | 29.34 | 3.15 | 50.29 | 6.25 |
| AD-1707063 | 8.70 | 1.45 | 29.38 | 5.78 | 47.59 | 2.97 | 7.93 | 1.13 | 8.36 | 1.64 | 21.41 | 1.43 | 32.97 | 9.60 |
| AD-1706666 | 16.48 | 2.20 | 40.53 | 4.15 | 60.54 | 0.68 | 15.42 | 6.42 | 15.54 | 5.16 | 40.29 | 3.51 | 35.82 | 2.33 |
| AD-1707305 | 9.42 | 1.49 | 32.49 | 3.03 | 58.24 | 8.28 | 6.79 | 2.33 | 8.64 | 2.70 | 18.06 | 4.38 | 29.85 | 7.65 |
| AD-1707060 | 17.25 | 1.90 | 46.73 | 5.87 | 61.56 | 4.71 | 9.86 | 4.04 | 10.63 | 3.23 | 25.87 | 2.46 | 44.20 | 13.53 |
| AD-1707318 | 13.61 | 2.20 | 42.86 | 9.79 | 54.22 | 9.49 | 10.33 | 3.55 | 11.95 | 3.18 | 23.43 | 2.08 | 36.27 | 12.76 |
| AD-1707290 | 17.86 | 5.21 | 49.67 | 8.59 | 62.49 | 5.49 | 14.25 | 3.65 | 13.86 | 4.57 | 36.67 | 7.08 | 43.04 | 4.48 |
| AD-1711760 | 18.10 | 3.22 | 45.83 | 12.27 | 61.36 | 9.28 | 10.80 | 1.65 | 11.13 | 3.37 | 34.34 | 3.50 | 43.15 | 11.26 |

### Example 5: In Vitro Single Dose Screening of dsRNA Duplexes Targeting PDE3B

[1025] Using methods as described above, the dsRNA agents targeting PDE3B listed in Tables 14 and 15 were screened in vitro in Hep3B cells. The results of the single dose screen are shown in Table 22.

TABLE 22
Single dose screen for dsRNA agents
targeting PDE3B in Hep3b cells

PDE3B/GAPDH
10 nM

| Duplex Name | % Avg message remaining (n = 4) | SD |
|---|---|---|
| AD-1735860.1 | 23.709 | 2.696 |
| AD-1735859.1 | 20.551 | 5.347 |
| AD-1735858.1 | 14.679 | 1.474 |
| AD-1735857.1 | 16.078 | 1.257 |
| AD-1735856.1 | 64.047 | 7.135 |
| AD-1735855.1 | 18.703 | 1.706 |
| AD-1735854.1 | 91.214 | 2.665 |
| AD-1735853.1 | 61.829 | 7.675 |
| AD-1735852.1 | 24.913 | 1.561 |
| AD-1735851.1 | 24.650 | 1.255 |
| AD-1735850.1 | 51.046 | 2.446 |
| AD-1735849.1 | 40.548 | 3.364 |
| AD-1735848.1 | 71.080 | 3.478 |
| AD-1735847.1 | 28.692 | 1.123 |
| AD-1735846.1 | 19.800 | 1.135 |
| AD-1735845.1 | 22.788 | 1.056 |
| AD-1735844.1 | 44.102 | 0.526 |
| AD-1735843.1 | 52.791 | 8.362 |
| AD-1735842.1 | 35.622 | 1.690 |
| AD-1735841.1 | 18.613 | 2.422 |
| AD-1735840.1 | 57.636 | 0.785 |
| AD-1735839.1 | 97.956 | 4.340 |
| AD-1735838.1 | 40.270 | 2.411 |
| AD-1735837.1 | 30.805 | 1.988 |
| AD-1735836.1 | 35.379 | 6.026 |
| AD-1735835.1 | 26.142 | 3.567 |
| AD-1735834.1 | 35.490 | 3.096 |
| AD-1735833.1 | 64.925 | 1.880 |
| AD-1735832.1 | 21.201 | 2.311 |
| AD-1735831.1 | 37.417 | 4.395 |
| AD-1735830.1 | 23.780 | 2.967 |
| AD-1735829.1 | 40.465 | 2.494 |
| AD-1735828.1 | 53.338 | 1.805 |
| AD-1735827.1 | 23.074 | 6.126 |
| AD-1735826.1 | 61.743 | 0.745 |
| AD-1735825.1 | 42.766 | 14.280 |
| AD-1735824.1 | 19.157 | 0.711 |
| AD-1735823.1 | 38.720 | 1.905 |
| AD-1735822.1 | 71.730 | 3.742 |
| AD-1735821.1 | 37.215 | 0.923 |
| AD-1735820.1 | 24.961 | 0.995 |
| AD-1735819.1 | 16.917 | 0.728 |
| AD-1735818.1 | 46.222 | 0.902 |
| AD-1735817.1 | 61.037 | 0.700 |
| AD-1735816.1 | 35.774 | 2.507 |
| AD-1735815.1 | 43.474 | 2.475 |
| AD-1735814.1 | 45.076 | 0.985 |
| AD-1735813.1 | 28.507 | 1.743 |
| AD-1735812.1 | 70.709 | 1.627 |
| AD-1735811.1 | 22.367 | 0.715 |
| AD-1735810.1 | 32.837 | 1.316 |
| AD-1735809.1 | 19.024 | 1.358 |
| AD-1735808.1 | 37.406 | 3.104 |
| AD-1735807.1 | 39.498 | 3.599 |
| AD-1735806.1 | 32.960 | 1.566 |
| AD-1735805.1 | 76.711 | 1.049 |
| AD-1735804.1 | 30.205 | 1.234 |
| AD-1735803.1 | 29.615 | 0.884 |
| AD-1735802.1 | 89.553 | 2.905 |
| AD-1735801.1 | 35.954 | 0.721 |
| AD-1735800.1 | 22.730 | 2.119 |
| AD-1735799.1 | 38.084 | 2.611 |
| AD-1735798.1 | 21.808 | 1.760 |
| AD-1735797.1 | 39.127 | 5.754 |
| AD-1735796.1 | 24.799 | 3.324 |
| AD-1735795.1 | 29.095 | 2.968 |
| AD-1735794.1 | 74.630 | 2.670 |
| AD-1735793.1 | 50.655 | 2.625 |
| AD-1735792.1 | 21.774 | 1.922 |
| AD-1735791.1 | 29.879 | 1.379 |
| AD-1735790.1 | 45.278 | 3.178 |
| AD-1735789.1 | 53.799 | 3.522 |
| AD-1735788.1 | 24.525 | 2.272 |
| AD-1735787.1 | 41.825 | 5.048 |
| AD-1735786.1 | 47.854 | 2.516 |
| AD-1735785.1 | 24.928 | 5.836 |
| AD-1735784.1 | 26.802 | 2.165 |
| AD-1735783.1 | 22.593 | 2.437 |
| AD-1735782.1 | 51.096 | 3.906 |
| AD-1735781.1 | 25.026 | 1.459 |
| AD-1735780.1 | 17.158 | 1.252 |
| AD-1735779.1 | 93.272 | 6.172 |
| AD-1735778.1 | 24.207 | 1.738 |
| AD-1735777.1 | 21.304 | 0.659 |
| AD-1735776.1 | 23.915 | 5.465 |
| AD-1735775.1 | 21.095 | 1.525 |
| AD-1735774.1 | 51.845 | 2.742 |
| AD-1735773.1 | 28.834 | 5.357 |
| AD-1735772.1 | 22.993 | 2.710 |
| AD-1735771.1 | 21.214 | 1.330 |
| AD-1735770.1 | 29.426 | 7.369 |
| AD-1735769.1 | 50.021 | 9.727 |
| AD-1735768.1 | 51.776 | 2.906 |
| AD-1735767.1 | 66.112 | 13.788 |
| AD-1735766.1 | 48.132 | 2.745 |
| AD-1735765.1 | 78.926 | 8.535 |
| AD-1735764.1 | 31.425 | 6.159 |
| AD-1735763.1 | 39.086 | 4.992 |
| AD-1735762.1 | 28.522 | 1.684 |
| AD-1735761.1 | 24.999 | 1.443 |
| AD-1735760.1 | 100.922 | 13.187 |
| AD-1735759.1 | 44.830 | 2.225 |
| AD-1735758.1 | 24.656 | 3.386 |
| AD-1735757.1 | 39.249 | 2.608 |
| AD-1735756.1 | 25.038 | 2.266 |
| AD-1735755.1 | 59.725 | 1.902 |
| AD-1735754.1 | 58.172 | 3.336 |
| AD-1735753.1 | 19.504 | 1.090 |
| AD-1735752.1 | 39.414 | 3.022 |
| AD-1735751.1 | 99.329 | 6.328 |
| AD-1735750.1 | 20.627 | 0.706 |
| AD-1735749.1 | 46.816 | 1.166 |
| AD-1735748.1 | 28.579 | 1.052 |
| AD-1735747.1 | 79.882 | 6.062 |
| AD-1735746.1 | 22.412 | 1.094 |
| AD-1735745.1 | 35.269 | 1.846 |
| AD-1735744.1 | 80.796 | 4.208 |
| AD-1735743.1 | 16.948 | 0.992 |
| AD-1735742.1 | 33.029 | 1.186 |
| AD-1735741.1 | 20.754 | 1.851 |
| AD-1735740.1 | 65.848 | 4.934 |
| AD-1735739.1 | 29.858 | 0.742 |
| AD-1735738.1 | 15.106 | 1.527 |
| AD-1735737.1 | 18.822 | 0.946 |
| AD-1735736.1 | 21.250 | 2.499 |
| AD-1735735.1 | 29.588 | 2.812 |
| AD-1735734.1 | 40.456 | 4.030 |
| AD-1735733.1 | 32.308 | 6.658 |
| AD-1735732.1 | 84.880 | 4.774 |
| AD-1735731.1 | 92.758 | 5.134 |
| AD-1735730.1 | 30.568 | 2.601 |
| AD-1735729.1 | 25.859 | 6.962 |
| AD-1735728.1 | 14.793 | 0.736 |
| AD-1735727.1 | 24.247 | 2.191 |
| AD-1735726.1 | 19.711 | 2.888 |
| AD-1735725.1 | 26.066 | 0.946 |
| AD-1735724.1 | 21.329 | 0.845 |
| AD-1735723.1 | 41.212 | 5.232 |
| AD-1735722.1 | 19.123 | 1.479 |
| AD-1735721.1 | 32.446 | 2.942 |
| AD-1735720.1 | 27.006 | 6.384 |
| AD-1735719.1 | 24.997 | 8.940 |
| AD-1735718.1 | 19.553 | 2.845 |
| AD-1735717.1 | 47.688 | 16.341 |
| AD-1735716.1 | 20.980 | 2.028 |
| AD-1735715.1 | 41.194 | 6.384 |
| AD-1735714.1 | 25.154 | 4.575 |
| AD-1735713.1 | 17.184 | 2.579 |
| AD-1735712.1 | 17.501 | 1.079 |
| AD-1735711.1 | 30.023 | 3.460 |
| AD-1735710.1 | 25.387 | 5.162 |
| AD-1735709.1 | 62.222 | 7.071 |
| AD-1735708.1 | 85.988 | 22.851 |
| AD-1735707.1 | 20.219 | 2.756 |
| AD-1735706.1 | 18.664 | 3.260 |
| AD-1735705.1 | 25.208 | 2.956 |
| AD-1735704.1 | 20.478 | 1.354 |
| AD-1735703.1 | 22.386 | 4.605 |
| AD-1735702.1 | 65.465 | 18.354 |
| AD-1735701.1 | 58.432 | 21.264 |
| AD-1735700.1 | 29.458 | 1.405 |
| AD-1735699.1 | 26.141 | 2.115 |
| AD-1735698.1 | 25.475 | 1.590 |
| AD-1735697.1 | 110.116 | 4.516 |
| AD-1735696.1 | 21.957 | 2.061 |
| AD-1735695.1 | 38.524 | 7.895 |
| AD-1735694.1 | 16.352 | 2.076 |
| AD-1735693.1 | 13.906 | 2.757 |
| AD-1735692.1 | 87.266 | 12.920 |
| AD-1735691.1 | 57.983 | 4.032 |
| AD-1735690.1 | 62.142 | 3.477 |
| AD-1735689.1 | 84.924 | 5.580 |
| AD-1735688.1 | 17.170 | 1.339 |
| AD-1735687.1 | 19.041 | 1.800 |
| AD-1735686.1 | 37.229 | 1.697 |
| AD-1735685.1 | 63.412 | 8.597 |
| AD-1735684.1 | 82.100 | 4.966 |
| AD-1735683.1 | 19.608 | 4.567 |
| AD-1735682.1 | 39.393 | 5.573 |
| AD-1735681.1 | 28.252 | 3.787 |
| AD-1735680.1 | 20.977 | 1.302 |
| AD-1735679.1 | 26.540 | 1.005 |
| AD-1735678.1 | 75.941 | 10.521 |
| AD-1735677.1 | 71.242 | 12.310 |
| AD-1735676.1 | 14.192 | 4.284 |
| AD-1735675.1 | 25.581 | 2.905 |
| AD-1735674.1 | 18.237 | 1.270 |
| AD-1735673.1 | 49.950 | 4.698 |
| AD-1735672.1 | 45.190 | 4.895 |
| AD-1735671.1 | 48.600 | 14.146 |
| AD-1735670.1 | 27.972 | 1.043 |
| AD-1735669.1 | 37.706 | 4.548 |
| AD-1735668.1 | 21.295 | 2.205 |
| AD-1735667.1 | 20.943 | 1.604 |
| AD-1735666.1 | 22.679 | 0.591 |
| AD-1735665.1 | 23.466 | 3.781 |
| AD-1735664.1 | 21.604 | 7.639 |
| AD-1735663.1 | 18.338 | 4.288 |
| AD-1735662.1 | 58.417 | 7.253 |
| AD-1735661.1 | 21.512 | 1.617 |
| AD-1735660.1 | 17.670 | 1.798 |
| AD-1735659.1 | 28.972 | 5.188 |
| AD-1735658.1 | 27.689 | 0.477 |
| AD-1735657.1 | 75.794 | 6.235 |
| AD-1735656.1 | 21.802 | 5.378 |
| AD-1735655.1 | 19.501 | 1.729 |
| AD-1735654.1 | 23.484 | 2.101 |
| AD-1735653.1 | 63.740 | 33.435 |
| AD-1735652.1 | 27.984 | 3.477 |
| AD-1735651.1 | 39.385 | 1.397 |
| AD-1735650.1 | 15.347 | 0.813 |
| AD-1735649.1 | 25.165 | 2.325 |
| AD-1735648.1 | 33.073 | 2.315 |
| AD-1735647.1 | 16.820 | 1.985 |
| AD-1735646.1 | 55.994 | 5.828 |
| AD-1735645.1 | 12.154 | 1.921 |
| AD-1735644.1 | 17.745 | 1.643 |
| AD-1735643.1 | 13.923 | 3.189 |
| AD-1735642.1 | 55.255 | 2.792 |
| AD-1735641.1 | 48.249 | 6.537 |
| AD-1735640.1 | 18.494 | 0.962 |
| AD-1735639.1 | 27.638 | 2.892 |
| AD-1735638.1 | 47.689 | 6.093 |
| AD-1735637.1 | 38.073 | 5.322 |
| AD-1735636.1 | 19.722 | 3.753 |
| AD-1735635.1 | 32.670 | 1.578 |
| AD-1735634.1 | 18.063 | 1.428 |
| AD-1735633.1 | 16.891 | 2.258 |
| AD-1735632.1 | 95.524 | 0.685 |
| AD-1735631.1 | 40.879 | 4.633 |
| AD-1735630.1 | 26.068 | 3.356 |
| AD-1735629.1 | 19.330 | 2.600 |
| AD-1735628.1 | 17.470 | 1.514 |
| AD-1735627.1 | 45.620 | 5.372 |
| AD-1735626.1 | 30.086 | 2.595 |
| AD-1735625.1 | 47.252 | 6.513 |
| AD-1735624.1 | 83.854 | 10.000 |
| AD-1735623.1 | 22.800 | 1.603 |
| AD-1735622.1 | 16.870 | 1.728 |
| AD-1735621.1 | 32.332 | 9.786 |
| AD-1735620.1 | 42.507 | 1.603 |
| AD-1735619.1 | 89.434 | 2.676 |
| AD-1735618.1 | 25.773 | 2.560 |
| AD-1735617.1 | 35.284 | 4.815 |
| AD-1735616.1 | 13.217 | 1.679 |
| AD-1735615.1 | 35.212 | 5.461 |
| AD-1735614.1 | 13.061 | 1.196 |
| AD-1735613.1 | 21.191 | 1.016 |
| AD-1735612.1 | 62.200 | 9.169 |
| AD-1735611.1 | 17.737 | 2.166 |
| AD-1735610.1 | 46.749 | 2.389 |
| AD-1735609.1 | 20.890 | 1.371 |
| AD-1735608.1 | 16.779 | 2.166 |
| AD-1735607.1 | 10.409 | 0.676 |
| AD-1735606.1 | 34.953 | 10.155 |
| AD-1735605.1 | 81.087 | 8.632 |
| AD-1735604.1 | 53.898 | 11.426 |
| AD-1735603.1 | 34.331 | 3.868 |
| AD-1735602.1 | 35.125 | 3.978 |
| AD-1735601.1 | 17.106 | 0.910 |
| AD-1735600.1 | 38.242 | 3.303 |
| AD-1735599.1 | 10.192 | 2.638 |
| AD-1735598.1 | 67.145 | 9.671 |
| AD-1735597.1 | 25.931 | 3.096 |
| AD-1735596.1 | 70.287 | 11.476 |
| AD-1735595.1 | 70.859 | 20.399 |
| AD-1735594.1 | 14.430 | 0.732 |
| AD-1735593.1 | 20.530 | 2.301 |
| AD-1735592.1 | 45.267 | 10.242 |
| AD-1735591.1 | 14.976 | 0.539 |

### Example 6: In Vitro Single Dose Screening of dsRNA Duplexes Targeting INHBC

[1026] The dsRNA agents targeting INHBC listed in Tables 16 and 17 were screened in Hepa1-6 cells by an in vitro dual-Luciferase assay.

[1027] Briefly, Hepa1-6 cells were transfected by adding 50 μL of siRNA duplexes and 100 ng of a V180 plasmid, comprising human INHBC target sequence, nucleotides 1425-3202 of NM_005538.4, or 75 ng of a V179 plasmid, comprising human INHBC target sequence, nucleotides 1-1485 of NM_005538.4, per well along with 100 μL of Opti-MEM plus 0.5 μL of Lipofectamine 2000 per well (Invitrogen, Carlsbad CA. cat 13778-150) and then incubated at room temperature for 15 minutes. The mixture was then added to the cells which were re-suspended in 35 μL of fresh complete media. The transfected cells were incubated at 37° C. in an atmosphere of 5% CO2. Single-dose experiments were performed at 10 nM.

[1028] Twenty-four hours after the siRNAs and plasmid were transfected, Firefly (transfection control) and Renilla (fused to INHBC target sequence comprising nucleotides 1425-3202 or nucleotides 1-1485 of NM_005538.4) luciferase were measured. First, media was removed from the cells. Then, Firefly luciferase activity was measured by adding 75 μL of Dual-Glo® Luciferase Reagent equal to the culture medium volume to each well and mix. The mixture was incubated at room temperature for 30 minutes before luminescense (500 nm) was measured on a Spectramax (Molecular Devices) to detect the Firefly luciferase signal. Renilla luciferase activity was measured by adding 75 μL of room temperature of Dual-Glo® Stop & Glo® Reagent to each well and the plates were incubated for 10-15 minutes before luminescence was again measured to determine the Renilla luciferase signal. The Dual-Glo® Stop & Glo® Reagent quenches the firefly luciferase signal and sustained luminescence for the Renilla luciferase reaction. siRNA activity was determined by normalizing the Renilla (INHBC) signal to the Firefly (control) signal within each well. The magnitude of siRNA activity was then assessed relative to cells that were transfected with the same vector but were not treated with siRNA or were treated with a non-targeting siRNA. All transfections were done with n=4.

[1029] The results of the dual-luciferase assays of the agents are provided in Table 23.

TABLE 23
Dual-Luciferase Screen for dsRNA agents
targeting INHBC in Hepa1-6 Cells

| | | RLuc/FLuc | |
|---|---|---|---|
| Reporter | | 10 nM | |
| Plasmid | Duplex ID | % Avg message remaining (n = 4) | SD |
| V180 | AD-1732940.1 | 14.150 | 0.629 |
| | AD-1732908.1 | 7.967 | 0.476 |
| | AD-1732890.1 | 10.260 | 0.453 |
| | AD-1732885.1 | 8.392 | 0.401 |
| | AD-1732881.1 | 61.954 | 0.878 |
| | AD-1732865.1 | 16.807 | 0.670 |
| | AD-1732849.1 | 41.476 | 2.680 |
| | AD-1732827.1 | 14.425 | 0.743 |
| | AD-1732807.1 | 19.622 | 0.725 |
| | AD-1732786.1 | 17.152 | 0.302 |
| | AD-1732757.1 | 18.612 | 1.287 |
| | AD-1732744.1 | 16.097 | 1.579 |
| | AD-1732728.1 | 29.876 | 2.334 |
| | AD-1732708.1 | 68.958 | 7.072 |
| | AD-1732696.1 | 11.309 | 1.048 |
| | AD-1732677.1 | 10.846 | 0.810 |
| | AD-1732661.1 | 12.693 | 0.648 |
| | AD-1732644.1 | 21.739 | 2.433 |
| | AD-1732625.1 | 20.810 | 0.984 |
| | AD-1732604.1 | 34.719 | 1.881 |
| | AD-1732584.1 | 25.478 | 0.950 |
| | AD-1732565.1 | 23.217 | 1.123 |
| | AD-1732549.1 | 77.904 | 2.566 |
| | AD-1732533.1 | 55.404 | 2.637 |
| | AD-1732520.1 | 75.941 | 4.976 |
| | AD-1732500.1 | 60.074 | 4.736 |
| | AD-1732479.1 | 76.945 | 3.845 |
| | AD-1732469.1 | 28.398 | 4.223 |
| | AD-1732440.1 | 69.737 | 3.729 |
| | AD-1732415.1 | 79.748 | 4.738 |
| | AD-1732389.1 | 19.244 | 0.749 |
| | AD-1732372.1 | 12.871 | 1.092 |
| | AD-1732353.1 | 14.060 | 0.517 |
| | AD-1732335.1 | 16.929 | 0.643 |
| | AD-1732308.1 | 7.798 | 0.528 |
| | AD-1732291.1 | 16.073 | 0.324 |
| | AD-1732269.1 | 15.369 | 0.454 |
| | AD-1732253.1 | 11.966 | 0.396 |
| | AD-1732235.1 | 15.662 | 0.455 |
| | AD-1732217.1 | 11.891 | 0.307 |
| | AD-1732195.1 | 22.664 | 2.324 |
| | AD-1732176.1 | 40.545 | 3.354 |
| | AD-1732173.1 | 36.333 | 4.051 |
| | AD-1732157.1 | 12.425 | 0.688 |
| | AD-1732110.1 | 8.878 | 0.368 |
| | AD-1732094.1 | 16.277 | 0.992 |
| | AD-1732078.1 | 12.292 | 0.574 |
| | AD-1732062.1 | 13.286 | 1.417 |
| | AD-1732048.1 | 25.400 | 0.737 |
| | AD-1732031.1 | 12.699 | 1.522 |
| | AD-1732013.1 | 13.228 | 0.746 |
| | AD-1731997.1 | 14.695 | 2.144 |
| | AD-1731978.1 | 22.496 | 3.865 |
| | AD-1731958.1 | 20.145 | 0.926 |
| | AD-1731932.1 | 66.101 | 5.314 |
| | AD-1731923.1 | 74.139 | 8.370 |
| | AD-1731906.1 | 45.134 | 4.197 |
| | AD-1731890.1 | 33.397 | 2.478 |
| | AD-1731874.1 | 41.801 | 1.190 |
| | AD-1731858.1 | 4.851 | 0.510 |
| | AD-1731842.1 | 6.224 | 0.565 |
| | AD-1731819.1 | 11.143 | 0.815 |
| | AD-1731813.1 | 8.497 | 0.331 |
| | AD-1731782.1 | 4.415 | 0.145 |
| | AD-1731753.1 | 11.691 | 1.185 |
| | AD-1731750.1 | 5.301 | 0.362 |
| | AD-1731745.1 | 10.404 | 0.658 |
| | AD-1731728.1 | 22.012 | 2.859 |
| | AD-1731720.1 | 12.432 | 0.820 |
| | AD-1731704.1 | 5.547 | 0.321 |
| | AD-1731687.1 | 3.065 | 0.161 |
| | AD-1731671.1 | 19.915 | 2.526 |
| V179 | AD-1731704.1 | 15.257 | 0.906 |
| | AD-1731687.1 | 11.014 | 0.767 |
| | AD-1731671.1 | 34.407 | 2.796 |
| | AD-1731646.1 | 50.018 | 5.438 |
| | AD-1731618.1 | 15.753 | 1.031 |
| | AD-1731600.1 | 12.780 | 0.848 |
| | AD-1731584.1 | 8.732 | 0.637 |
| | AD-1731564.1 | 13.821 | 1.071 |
| | AD-1731562.1 | 9.409 | 0.428 |
| | AD-1731545.1 | 66.529 | 4.870 |
| | AD-1731527.1 | 92.440 | 1.602 |
| | AD-1731511.1 | 75.267 | 3.429 |
| | AD-1731492.1 | 9.940 | 0.588 |
| | AD-1731484.1 | 27.855 | 1.905 |
| | AD-1731457.1 | 18.170 | 2.945 |
| | AD-1731431.1 | 42.677 | 4.621 |
| | AD-1731415.1 | 12.748 | 1.092 |
| | AD-1731398.1 | 28.945 | 3.717 |
| | AD-1731380.1 | 48.750 | 4.591 |
| | AD-1731371.1 | 72.563 | 2.686 |
| | AD-1731358.1 | 65.200 | 3.035 |
| | AD-1731340.1 | 8.662 | 0.132 |
| | AD-1731323.1 | 43.722 | 2.197 |
| | AD-1731307.1 | 67.294 | 4.521 |
| | AD-1731289.1 | 52.881 | 4.906 |
| | AD-1731264.1 | 22.594 | 2.101 |
| | AD-1731234.1 | 55.843 | 3.247 |
| | AD-1731205.1 | 10.827 | 0.702 |
| | AD-1731189.1 | 18.905 | 0.211 |
| | AD-1731173.1 | 58.483 | 2.870 |
| | AD-1731156.1 | 82.335 | 3.005 |
| | AD-1731137.1 | 20.307 | 1.198 |
| | AD-1731134.1 | 80.176 | 2.738 |
| | AD-1731117.1 | 65.192 | 2.858 |
| | AD-1731088.1 | 68.296 | 3.034 |
| | AD-1731064.1 | 44.769 | 2.606 |
| | AD-1731042.1 | 50.015 | 2.644 |
| | AD-1731035.1 | 57.224 | 3.625 |
| | AD-1731019.1 | 98.342 | 5.416 |
| | AD-1731003.1 | 30.570 | 3.760 |
| | AD-1730982.1 | 20.454 | 3.248 |
| | AD-1730958.1 | 25.954 | 0.786 |
| | AD-1730942.1 | 19.353 | 1.173 |
| | AD-1730926.1 | 36.218 | 0.945 |
| | AD-1730910.1 | 9.242 | 0.575 |
| | AD-1730873.1 | 17.439 | 1.317 |
| | AD-1730857.1 | 7.533 | 0.374 |
| | AD-1730841.1 | 15.620 | 1.085 |
| | AD-1730825.1 | 35.996 | 1.675 |
| | AD-1730807.1 | 13.721 | 0.994 |
| | AD-1730790.1 | 8.641 | 0.196 |
| | AD-1730769.1 | 37.556 | 1.872 |
| | AD-1730765.1 | 32.573 | 2.368 |
| | AD-1730749.1 | 41.768 | 1.107 |
| | AD-1730726.1 | 37.291 | 1.641 |
| | AD-1730691.1 | 20.187 | 1.873 |
| | AD-1730667.1 | 36.466 | 4.387 |
| | AD-1730643.1 | 35.649 | 2.632 |
| | AD-1730636.1 | 90.291 | 3.709 |
| | AD-1730606.1 | 35.942 | 0.833 |
| | AD-1730588.1 | 34.769 | 1.603 |
| | AD-1730570.1 | 46.879 | 2.310 |
| | AD-1730554.1 | 10.475 | 0.681 |
| | AD-1730529.1 | 42.962 | 3.284 |
| | AD-1730512.1 | 25.624 | 1.247 |
| | AD-1730493.1 | 72.772 | 4.634 |
| | Positive control | 0.663 | 0.053 |

### Example 7: In Vitro Single Dose Screening of dsRNA Duplexes Targeting PLIN1

[1030] Using methods as described above, the dsRNA agents targeting PLIN1 listed in Tables 10 and 11 were screened in vitro in Hepa1-6 cells by the dual-Luciferase assay. The results of the single dose screen are shown in Table 24.

TABLE 24
Dual-Luciferase Screen for dsRNA agents
targeting PLIN1 in Hepa1-6 Cells

RLuc/FLuc
10 nM

| Duplex ID | % Avg message remaining | SD |
|---|---|---|
| AD-1735320.1 | 53.561 | 4.672 |
| AD-1735319.1 | 33.212 | 3.061 |
| AD-1735318.1 | 87.299 | 11.406 |
| AD-1735317.1 | 72.995 | 9.626 |
| AD-1735316.1 | 80.346 | 7.389 |
| AD-1735315.1 | 34.013 | 3.602 |
| AD-1735314.1 | 77.100 | 9.948 |
| AD-1735313.1 | 61.678 | 7.363 |
| AD-1735312.1 | 47.388 | 4.892 |
| AD-1735311.1 | 57.067 | 4.870 |
| AD-1735310.1 | 69.433 | 2.837 |
| AD-1735309.1 | 87.563 | 6.359 |
| AD-1735308.1 | 54.214 | 6.804 |
| AD-1735307.1 | 77.536 | 7.971 |
| AD-1735306.1 | 44.999 | 0.952 |
| AD-1735305.1 | 20.312 | 0.690 |
| AD-1735304.1 | 37.885 | 1.346 |
| AD-1735303.1 | 89.423 | 1.906 |
| AD-1735302.1 | 71.173 | 4.238 |
| AD-1735301.1 | 70.170 | 3.690 |
| AD-1735300.1 | 62.217 | 7.128 |
| AD-1735299.1 | 45.332 | 4.595 |
| AD-1735298.1 | 75.846 | 7.520 |
| AD-1735297.1 | 69.820 | 5.033 |
| AD-1735296.1 | 64.227 | 7.301 |
| AD-1735295.1 | 90.389 | 7.070 |
| AD-1735294.1 | 73.067 | 7.141 |
| AD-1735293.1 | 26.508 | 3.863 |
| AD-1735292.1 | 91.596 | 11.766 |
| AD-1735291.1 | 84.530 | 11.202 |
| AD-1735290.1 | 80.139 | 6.540 |
| AD-1735289.1 | 40.946 | 2.761 |
| AD-1735288.1 | 33.302 | 3.704 |
| AD-1735287.1 | 37.684 | 3.007 |
| AD-1735286.1 | 47.467 | 3.016 |
| AD-1735285.1 | 28.454 | 1.209 |
| AD-1735284.1 | 30.826 | 3.351 |
| AD-1735283.1 | 35.399 | 1.914 |
| AD-1735282.1 | 39.620 | 3.772 |
| AD-1735281.1 | 65.860 | 1.354 |
| AD-1735280.1 | 21.944 | 2.006 |
| AD-1735279.1 | 52.047 | 4.181 |
| AD-1735278.1 | 36.993 | 3.597 |
| AD-1735277.1 | 43.703 | 0.939 |
| AD-1735276.1 | 24.075 | 1.681 |
| AD-1735275.1 | 41.179 | 1.720 |
| AD-1735274.1 | 30.228 | 2.242 |
| AD-1735273.1 | 37.603 | 3.724 |
| AD-1735272.1 | 27.325 | 2.573 |
| AD-1735271.1 | 54.654 | 4.358 |
| AD-1735270.1 | 30.214 | 2.322 |
| AD-1735269.1 | 47.580 | 1.497 |
| AD-1735268.1 | 29.621 | 2.529 |
| AD-1735267.1 | 38.804 | 3.763 |
| AD-1735266.1 | 29.659 | 0.328 |
| AD-1735265.1 | 34.545 | 2.741 |
| AD-1735264.1 | 80.144 | 6.568 |
| AD-1735263.1 | 26.159 | 1.851 |
| AD-1735262.1 | 37.861 | 1.332 |
| AD-1735261.1 | 43.807 | 5.808 |
| AD-1735260.1 | 30.677 | 2.583 |
| AD-1735259.1 | 43.570 | 4.475 |
| AD-1735258.1 | 40.682 | 3.274 |
| AD-1735257.1 | 43.057 | 2.824 |
| AD-1735256.1 | 38.041 | 2.568 |
| AD-1735255.1 | 21.650 | 0.909 |
| AD-1735254.1 | 27.873 | 3.744 |
| AD-1735253.1 | 77.253 | 3.270 |
| AD-1735252.1 | 39.960 | 2.697 |
| AD-1735251.1 | 41.732 | 2.546 |
| AD-1735250.1 | 27.088 | 1.383 |
| AD-1735249.1 | 29.574 | 1.839 |
| AD-1735248.1 | 45.794 | 3.063 |
| AD-1735247.1 | 68.096 | 8.378 |
| AD-1735246.1 | 40.621 | 2.231 |
| AD-1735245.1 | 59.324 | 3.637 |
| AD-1735244.1 | 22.847 | 1.836 |
| AD-1735243.1 | 85.325 | 3.497 |
| AD-1735242.1 | 35.687 | 3.410 |
| AD-1735241.1 | 23.433 | 0.870 |
| AD-1735240.1 | 31.517 | 1.780 |
| AD-1735239.1 | 36.244 | 2.725 |
| AD-1735238.1 | 32.611 | 1.443 |
| AD-1735237.1 | 14.047 | 0.939 |
| AD-1735236.1 | 16.631 | 0.772 |
| AD-1735235.1 | 31.488 | 3.435 |
| AD-1735234.1 | 39.842 | 2.222 |
| AD-1735233.1 | 13.998 | 0.629 |
| AD-1735232.1 | 47.840 | 5.226 |
| AD-1735231.1 | 31.494 | 1.469 |
| AD-1735230.1 | 23.989 | 1.990 |
| AD-1735229.1 | 19.072 | 2.237 |
| AD-1735228.1 | 16.810 | 1.007 |
| AD-1735227.1 | 27.650 | 2.449 |
| AD-1735226.1 | 24.667 | 1.786 |
| AD-1735225.1 | 23.622 | 2.500 |
| AD-1735224.1 | 24.205 | 1.728 |
| AD-1735223.1 | 13.924 | 1.257 |
| AD-1735222.1 | 16.961 | 1.476 |
| AD-1735221.1 | 26.245 | 1.531 |
| AD-1735220.1 | 28.657 | 1.159 |
| AD-1735219.1 | 16.124 | 1.387 |
| AD-1735218.1 | 23.929 | 1.107 |
| AD-1735217.1 | 71.822 | 3.235 |
| AD-1735216.1 | 22.636 | 1.631 |
| AD-1735215.1 | 10.556 | 1.255 |
| AD-1735214.1 | 92.571 | 5.143 |
| AD-1735213.1 | 25.487 | 2.249 |
| AD-1735212.1 | 12.128 | 0.655 |
| AD-1735211.1 | 29.064 | 2.614 |
| AD-1735210.1 | 19.343 | 2.334 |
| AD-1735209.1 | 17.586 | 1.040 |
| AD-1735208.1 | 13.678 | 0.528 |
| AD-1735207.1 | 25.561 | 1.744 |
| AD-1735206.1 | 21.848 | 2.252 |
| AD-1735205.1 | 17.025 | 1.043 |
| AD-1735204.1 | 15.538 | 0.982 |
| AD-1735203.1 | 16.080 | 1.928 |
| AD-1735202.1 | 16.432 | 0.718 |
| AD-1735201.1 | 34.346 | 1.470 |
| AD-1735200.1 | 24.511 | 1.673 |
| AD-1735199.1 | 7.066 | 0.486 |
| AD-1735198.1 | 14.709 | 1.084 |
| AD-1735197.1 | 16.627 | 1.417 |
| AD-1735196.1 | 13.687 | 0.708 |
| AD-1735195.1 | 22.964 | 1.902 |
| AD-1735194.1 | 39.620 | 0.928 |
| AD-1735193.1 | 27.843 | 1.143 |
| AD-1735192.1 | 17.138 | 0.504 |
| AD-1735191.1 | 20.200 | 1.123 |
| AD-1735190.1 | 18.874 | 0.788 |
| AD-1735189.1 | 21.167 | 0.415 |
| AD-1735188.1 | 25.098 | 3.920 |
| AD-1735187.1 | 33.725 | 1.983 |
| AD-1735186.1 | 17.016 | 0.284 |
| positive control | 0.759 | 0.092 |

### Example 8. In Vivo Assessment of RNAi Agents in Non-Human Primates (NHP)

[1031] The pharmacodynamic activity of duplexes targeting INHBE was also assessed in vivo in non-human primates (NHP).

[1032] As depicted in FIG. 1, on Day 0 female non-human primates (n=3) were subcutaneously administered a single 3 mg/kg dose of AD-1707306, AD-1711744, AD-1708473, AD-1707640, AD-1707639, AD-1706583, AD-1706593, AD-1706761, or AD-1706662, or PBS control. Post-dose, plasma samples were collected biweekly, serum samples were collected weekly, and liver biopsy samples were collected at Days 28 and 57 post-dose to determine the effect of the agents on INHBE and INHBC mRNA expression, as described above, and clinical chemistry and hematological read-outs. Animals were sacrificed at Day 90 post-dose, tissue samples were collected and the levels of INHBE and INHBC mRNA were quantified as described above.

[1033] As depicted in FIGS. 2A and 2B, at Day 28 post-dose, a single 3 mg/kg subcutaneous dose of the agents potently inhibited INHBE expression in vivo (FIG. 2A) but not INHBC (FIG. 2B) expression.

### EQUIVALENTS

[1034] Those skilled in the art will recognize, or be able to ascertain using no more than routine experimentation, many equivalents to the specific embodiments and methods described herein. Such equivalents are intended to be encompassed by the scope of the following claims.

1. A double stranded ribonucleic acid (dsRNA) agent for inhibiting expression of a metabolic disorder-associated target gene selected from the group consisting of inhibin subunit beta E (INHBE), activin A receptor type 1C (ACVR1C), perilipin-1 (PLIN1), phosphodiesterase 3B (PDE3B), and inhibin subunit beta C (INHBC) in a cell,
wherein the dsRNA agent comprises a sense strand and an antisense strand forming a double stranded region,
a) wherein the metabolic disorder-associated target gene is INHBE and the antisense strand comprises at least 15 contiguous nucleotides differing by no more than 3 nucleotides from any one of the antisense strand nucleotide sequences selected from the group consisting of
SEQ ID NO: 6245
5′-AAAGACGGCAGAAUGGAAAGAGG-3′ of;
SEQ ID NO: 64
5′-AAGAAAGUAUAAAUGCUUGUCUC-3′ of;
SEQ ID NO: 63
5′-ACAGACAAGAAAGUGCCCAUUUG-3′ of;
SEQ ID NO: 58
5′-AGUUAUTCUGGGACGACUGGUCU-3′ of;
and
SEQ ID NO: 6403
5′-AAAGCCAGAGUCUCAGACAAGAA-3′ of.
and
wherein all of the nucleotides of the sense strand and all of the nucleotides of the antisense strand comprise a nucleotide modification
b) wherein the metabolic disorder-associated target gene is INHBE and the antisense strand comprises at least 15 contiguous nucleotides differing by no more than three nucleotides from the complement of any one of the nucleotide sequence of nucleotides 400-422, 1430-1452, 1863-1885, 410-432, 518-540, 519-541, 640-662, or 1864-1886 of SEQ ID NO: 1;
c) wherein the sense strand comprises at least 15 contiguous nucleotides differing by no more than 3 nucleotides from the nucleotide sequence of any one of SEQ ID NOs: 1, 3, 5, 7, 9, 11, 13, 15, 17, 19, 21, 23, 25, 27, 29, 31, 33, 35, 37, 39, 41, 43, 45, 47, 49, 51, 53, or 55, and the antisense strand comprises at least 15 contiguous nucleotides differing by no more than 3 nucleotides from the corresponding portion of the nucleotide sequence of any one of SEQ ID NOs: 2, 4, 6, 8, 10, 12, 14, 16, 18, 20, 22, 24, 26, 28, 30, 32, 34, 36, 38, 40, 42, 44, 46, 48, 50, 52, 54, or 56;
d) wherein the antisense strand comprises a region of complementarity to an mRNA encoding the target gene, and wherein the region of complementarity comprises at least 15 contiguous nucleotides differing by no more than 3 nucleotides from any one of the antisense nucleotide sequences in any one of Tables 2-17, 19 and 20.

2.-22. (canceled)

23. The dsRNA agent of claim 1, wherein at least one of the nucleotides of the dsRNA agent comprises a nucleotide modification.

24. (canceled)

25. The dsRNA agent of claim 1, wherein all of the nucleotides of the sense strand and all of the nucleotides of the antisense strand comprise a nucleotide modification.

26. The dsRNA agent of claim 23, wherein at least one of the nucleotide modifications is selected from the group consisting of a deoxy-nucleotide modification, a 3′-terminal deoxythimidine (dT) nucleotide modification, a 2′-O-methyl nucleotide modification, a 2′-fluoro nucleotide modification, a 2′-deoxy-nucleotide modification, a locked nucleotide modification, an unlocked nucleotide modification, a conformationally restricted nucleotide modification, a constrained ethyl nucleotide modification, an abasic nucleotide modification, a 2′-amino-nucleotide modification, a 2′-O-allyl-nucleotide modification, 2′-C-alkyl-nucleotide modification, 2′-hydroxly-nucleotide modification, a 2′-methoxyethyl nucleotide modification, a 2′-O-alkyl-nucleotide modification, a morpholino nucleotide modification, a phosphoramidate modification, a non-natural base comprising nucleotide modification, a tetrahydropyran nucleotide modification, a 1,5-anhydrohexitol nucleotide modification, a cyclohexenyl nucleotide modification, a nucleotide comprising a phosphorothioate group modification, a nucleotide comprising a methylphosphonate group modification, a nucleotide comprising a 5′-phosphate modification, a nucleotide comprising a 5′-phosphate mimic modification, a thermally destabilizing nucleotide modification, a glycol nucleotide (GNA) modification, a nucleotide comprising a 2′ phosphate modification, and a 2-O—(N-methylacetamide) nucleotide modification; and combinations thereof.

27.-30. (canceled)

31. The dsRNA agent of claim 1, further comprising a phosphate or phosphate mimic at the 5′-end of the antisense strand.

32. (canceled)

33. The dsRNA agent of claim 1, wherein the 3′ end of the sense strand is protected via an end cap which is a cyclic group having an amine, said cyclic group being selected from the group consisting of pyrrolidinyl, pyrazolinyl, pyrazolidinyl, imidazolinyl, imidazolidinyl, piperidinyl, piperazinyl, [1,3]dioxolanyl, oxazolidinyl, isoxazolidinyl, morpholinyl, thiazolidinyl, isothiazolidinyl, quinoxalinyl, pyridazinonyl, tetrahydrofuranyl, and decalinyl.

34. The dsRNA agent of claim 1, wherein the double stranded region is 19-30 nucleotide pairs in length.

35.-38. (canceled)

39. The dsRNA agent of claim 1, wherein each strand is independently no more than 30 nucleotides in length.

40.-43. (canceled)

44. The dsRNA agent of claim 1, wherein at least one strand comprises a 3′ overhang of at least 1 nucleotide; or at least one strand comprises a 3′ overhang of at least 2 nucleotides.

45. (canceled)

46. The dsRNA agent of claim 1, wherein one or more C22 hydrocarbon chains is conjugated to one or more internal positions on at least one strand.

47.-69. (canceled)

70. The dsRNA agent of claim 1, further comprising a targeting ligand that targets a receptor which mediates delivery to adipose tissue.

71. (canceled)

72. The dsRNA agent of claim 1, further comprising a targeting ligand that targets a liver tissue.

73. The dsRNA agent of claim 72, wherein the targeting ligand is conjugated to the 3′ end of the sense strand of the dsRNA agent.

74. The dsRNA agent of claim 72, wherein the targeting ligand is an N-acetylgalactosamine (GalNAc) derivative.

75. The dsRNA agent of claim 72, wherein the targeting ligand is one or more GalNAc derivatives attached through a monovalent, bivalent, or trivalent branched linker.

76. The dsRNA agent of claim 72, wherein the targeting ligand is

[chemical structure]

77. The dsRNA agent of claim 76, wherein the dsRNA agent is conjugated to the targeting ligand as shown in the following schematic [chemical structure]
and, wherein X is O or S.

78. The dsRNA agent of claim 77, wherein the X is O.

79. (canceled)

80. The dsRNA agent of claim 1, wherein the dsRNA agent further comprises at least one phosphorothioate or methylphosphonate internucleotide linkage.

81.-121. (canceled)

122. A cell containing the dsRNA agent of claim 1.

123. A pharmaceutical composition for inhibiting expression of a metabolic disorder-associated target gene selected from the group consisting of inhibin subunit beta E (INHBE), activin A receptor type 1C (ACVR1C), perilipin-1 (PLIN1), phosphodiesterase 3B (PDE3B), and inhibin subunit beta C (INHBC) comprising the dsRNA agent of claim 1 and a pharmaceutically acceptable carrier.

124.-128. (canceled)

129. A method of inhibiting expression of a metabolic disorder-associated target gene selected from the group consisting of inhibin subunit beta E (INHBE), activin A receptor type 1C (ACVR1C), perilipin-1 (PLIN1), phosphodiesterase 3B (PDE3B), and inhibin subunit beta C (INHBC) in a cell, the method comprising contacting the cell with the dsRNA agent of claim 1, thereby inhibiting expression of the metabolic disorder-associated target gene in the cell.

130.-144. (canceled)

145. A method of treating a subject having a metabolic disorder, comprising administering to the subject a therapeutically effective amount of the dsRNA agent of claim 1, thereby treating the subject having the metabolic disorder.

146.-169. (canceled)

170. A kit, a vial, or a syringe comprising the dsRNA agent of claim 1.

171.-173. (canceled)

The application's sequence listing, which the Patent Office published only in electronic form, follows.

SEQUENCE LISTING (8455 sequences)

SEQ ID NO: 1 - DNA, 2460 bp, Homo sapiens
  source 1..2460: mol_type = genomic DNA
agtagccagacatgagctgtgagggtcaagcacagctatccatcagatgatctactttcagccttcctgagtcccagacaatagaagacaggtggctgtacccttggccaagggtaggtgtggcagtggtgtctgctgtcactgtgccctcattggcccccagcaatcagactcaacagacggagcaactgccatccgaggctcctgaaccagggccattcaccaggagcatgcggctccctgatgtccagctctggctggtgctgctgtgggcactggtgcgagcacaggggacagggtctgtgtgtccctcctgtgggggctccaaactggcaccccaagcagaacgagctctggtgctggagctagccaagcagcaaatcctggatgggttgcacctgaccagtcgtcccagaataactcatcctccaccccaggcagcgctgaccagagccctccggagactacagccagggagtgtggctccagggaatggggaggaggtcatcagctttgctactgtcacagactccacttcagcctacagctccctgctcacttttcacctgtccactcctcggtcccaccacctgtaccatgcccgcctgtggctgcacgtgctccccacccttcctggcactctttgcttgaggatcttccgatggggaccaaggaggaggcgccaagggtcccgcactctcctggctgagcaccacatcaccaacctgggctggcataccttaactctgccctctagtggcttgaggggtgagaagtctggtgtcctgaaactgcaactagactgcagacccctagaaggcaacagcacagttactggacaaccgaggcggctcttggacacagcaggacaccagcagcccttcctagagcttaagatccgagccaatgagcctggagcaggccgggccaggaggaggacccccacctgtgagcctgcgacccccttatgttgcaggcgagaccattacgtagacttccaggaactgggatggcgggactggatactgcagcccgaggggtaccagctgaattactgcagtgggcagtgccctccccacctggctggcagcccaggcattgctgcctctttccattctgccgtcttcagcctcctcaaagccaacaatccttggcctgccagtacctcctgttgtgtccctactgcccgaaggcccctctctctcctctacctggatcataatggcaatgtggtcaagacggatgtgccagatatggtggtggaggcctgtggctgcagctagcaagaggacctggggctttggagtgaagagaccaagatgaagtttcccaggcacagggcatctgtgactggaggcatcagattcctgatccacaccccaacccaacaaccacctggcaatatgactcacttgacccctatgggacccaaatgggcactttcttgtctgagactctggcttattccaggttggctgatgtgttgggagatgggtaaagcgtttcttctaaaggggtctacccagaaagcatgatttcctgccctaagtcctgtgagaagatgtcagggactagggagggagggagggaaggcagagaaaaattacttagcctctcccaagatgagaaagtcctcaagtgaggggaggaggaagcagatagatggtccagcaggcttgaagcagggtaagcaggctggcccagggtaagggctgttgaggtaccttaagggaaggtcaagagggagatgggcaaggcgctgagggaggatgcttaggggacccccagaaacaggagtcaggaaaatgaggcactaagcctaagaagttccctggtttttcccaggggacaggacccactgggagacaagcatttatactttctttcttcttttttatttttttgagatcgagtctcgctctgtcaccaggctggagtgcagtgacacgatcttggctcactgcaacctccgtctcctgggttcaagtgattcttctgcctcagcctcccgagcagctgggattacaggcgcccactaatttttgtattcttagtagaaacgaggtttcaacatgttggccaggatggtctcaatctcttgacctcttgatccacccgacttggcctcccgaagtgatgagattataggcgtgagccaccgcgcctggcttatactttcttaataaaaaggagaaagaaaatcaacaaatgtgagtcataaagaagggttagggtgatggtccagagcaacagttcttcaagtgtactctgtaggcttctgggaggtcccttttcaggggtgtccacaaagtcaaagctattttcataataatactaacatgttatttgccttttgaattctcattatcttaaaattgtattgtggagttttccagaggccgtgtgacatgtgattacatcatctttctgacatcattgttaatggaatgtgtgcttgta

SEQ ID NO: 2 - DNA, 2460 bp, Homo sapiens
  source 1..2460: mol_type = genomic DNA
tacaagcacacattccattaacaatgatgtcagaaagatgatgtaatcacatgtcacacggcctctggaaaactccacaatacaattttaagataatgagaattcaaaaggcaaataacatgttagtattattatgaaaatagctttgactttgtggacacccctgaaaagggacctcccagaagcctacagagtacacttgaagaactgttgctctggaccatcaccctaacccttctttatgactcacatttgttgattttctttctcctttttattaagaaagtataagccaggcgcggtggctcacgcctataatctcatcacttcgggaggccaagtcgggtggatcaagaggtcaagagattgagaccatcctggccaacatgttgaaacctcgtttctactaagaatacaaaaattagtgggcgcctgtaatcccagctgctcgggaggctgaggcagaagaatcacttgaacccaggagacggaggttgcagtgagccaagatcgtgtcactgcactccagcctggtgacagagcgagactcgatctcaaaaaaataaaaaagaagaaagaaagtataaatgcttgtctcccagtgggtcctgtcccctgggaaaaaccagggaacttcttaggcttagtgcctcattttcctgactcctgtttctgggggtcccctaagcatcctccctcagcgccttgcccatctccctcttgaccttcccttaaggtacctcaacagcccttaccctgggccagcctgcttaccctgcttcaagcctgctggaccatctatctgcttcctcctcccctcacttgaggactttctcatcttgggagaggctaagtaatttttctctgccttccctccctccctccctagtccctgacatcttctcacaggacttagggcaggaaatcatgctttctgggtagacccctttagaagaaacgctttacccatctcccaacacatcagccaacctggaataagccagagtctcagacaagaaagtgcccatttgggtcccataggggtcaagtgagtcatattgccaggtggttgttgggttggggtgtggatcaggaatctgatgcctccagtcacagatgccctgtgcctgggaaacttcatcttggtctcttcactccaaagccccaggtcctcttgctagctgcagccacaggcctccaccaccatatctggcacatccgtcttgaccacattgccattatgatccaggtagaggagagagaggggccttcgggcagtagggacacaacaggaggtactggcaggccaaggattgttggctttgaggaggctgaagacggcagaatggaaagaggcagcaatgcctgggctgccagccaggtggggagggcactgcccactgcagtaattcagctggtacccctcgggctgcagtatccagtcccgccatcccagttcctggaagtctacgtaatggtctcgcctgcaacataagggggtcgcaggctcacaggtgggggtcctcctcctggcccggcctgctccaggctcattggctcggatcttaagctctaggaagggctgctggtgtcctgctgtgtccaagagccgcctcggttgtccagtaactgtgctgttgccttctaggggtctgcagtctagttgcagtttcaggacaccagacttctcacccctcaagccactagagggcagagttaaggtatgccagcccaggttggtgatgtggtgctcagccaggagagtgcgggacccttggcgcctcctccttggtccccatcggaagatcctcaagcaaagagtgccaggaagggtggggagcacgtgcagccacaggcgggcatggtacaggtggtgggaccgaggagtggacaggtgaaaagtgagcagggagctgtaggctgaagtggagtctgtgacagtagcaaagctgatgacctcctccccattccctggagccacactccctggctgtagtctccggagggctctggtcagcgctgcctggggtggaggatgagttattctgggacgactggtcaggtgcaacccatccaggatttgctgcttggctagctccagcaccagagctcgttctgcttggggtgccagtttggagcccccacaggagggacacacagaccctgtcccctgtgctcgcaccagtgcccacagcagcaccagccagagctggacatcagggagccgcatgctcctggtgaatggccctggttcaggagcctcggatggcagttgctccgtctgttgagtctgattgctgggggccaatgagggcacagtgacagcagacaccactgccacacctacccttggccaagggtacagccacctgtcttctattgtctgggactcaggaaggctgaaagtagatcatctgatggatagctgtgcttgaccctcacagctcatgtctggctact

SEQ ID NO: 3 - DNA, 2211 bp, Mus musculus
  source 1..2211: mol_type = genomic DNA
caagcaactggctctaaagaggccctgccagtagttagtcatgaactgtgagggtcacacatagctaccccaccaggcgatctactctcagtcttcctgagtcctaggctattgaggacaagtagcttggtctgctctttgtcaagggtagctgtgacactggtttgctgttgctgctgctgctgctgctgctgctgctgctgctgctgctgctgctgctgcttctgtatcctctttgggaaatcagactcataaaactgccacccattcgaggttctcaaagcagagccatctacctggagcatgaagcttccaaaagcccagctctggctaatactgctgtgggcattggtgtgggtgcagagtacaagatctgcgtgcccgtcctgtgggggcccaacactggcaccccaaggagaacgcgctctggtcctggagctagccaagcagcaaatcctggagggactgcacctaaccagccgtcccagaataactcggcctctgccccaggcagcactgaccagagccctccggagactgcagcccaagagcatggtccctggcaaccgagagaaagtcatcagctttgctaccatcatagacaaatccacttcaacctaccgctccatgctcaccttccagctgtcccctctttggtcccaccacctgtaccatgcccgcctctggctgcatgtgcctccctcttttccgggcactctgtacctgaggatcttccgttgcggcaccactaggtgccgaggattccgcaccttcctagctgagcaccaaaccacttcctctggctggcacgccctgactctgccctctagcggcttgcggagtgaggactctggcgtcgtgaaactccaactggaatttagacccctggaccttaacagcaccgctgcgggactgccacggctgctcttggacacagcgggacagcaacgtcccttcttggaacttaagatccgagctaatgaacctggagcaggtcgggccaggaggaggactcccacctgtgagcctgagacccccttatgttgtaggcgagaccactatgtagacttccaggagctggggtggcgggattggatcctgcagccggagggataccagctgaattactgcagtgggcagtgcccgccccacctggctggcagtcctggcattgctgcctccttccattctgccgtctttagcctcctcaaagccaacaacccttggcctgcgggttcttcctgctgtgtccccactgcacgaaggcctctctctctcctctaccttgaccataatggcaatgtggtcaagaccgatgtgccagacatggtagtagaggcctgtggctgcagctagcaacagggcctgaaggttctgggtgaagttcaaggttcaagttgggggttcccacgtgtctggaagctcgagttccggatccatactgacacccaataagctgtgtagcagtatgcctgggtttgacccctatggaacttaaatgggcgttttcttgtcccagattctggcctatttcaggctgtttcaaatgtggacagatgggtaaagcgttgcctttcaagggactgcctggccagcaccattttctacatcaagccctgttccaggacagcagggatgccgtgggagggaaggaagaacacagggagaaactatttagtctctcccgagaaagaagttcctcaagtaatgaaggcggaagtagaagggtgggcagattaggaaaagacaaacatacaggctaagaacagggtgcattgcctgctttgacaaggtcaagaggaagaggagcaggcgccgaggaaggaggggtgtcggggtccctggaatcgagaatcagtaaaaaggggtgctgaactcgtaagttcttaggcttccccctcgaggacaggacccacgcgggtgacatacattttatattttcttaataaaaaggagaaagaaaagcaccagagaattgtgtaaggggttgttaaaatgggccagaagcgaagtgtggtttggggacctctgtgccccagcgggtttctgagactttctcaggggttttcaagactattttcataatcacactgagatgttatttatcatttgctaccattatctttacattgtacagtgggaacagggtgtggtggcttacacttataactacagcaccgtgagttcaagaccggccttcatagtgaattc

SEQ ID NO: 4 - DNA, 2211 bp, Mus musculus
  source 1..2211: mol_type = genomic DNA
gaattcactatgaaggccggtcttgaactcacggtgctgtagttataagtgtaagccaccacaccctgttcccactgtacaatgtaaagataatggtagcaaatgataaataacatctcagtgtgattatgaaaatagtcttgaaaacccctgagaaagtctcagaaacccgctggggcacagaggtccccaaaccacacttcgcttctggcccattttaacaaccccttacacaattctctggtgcttttctttctcctttttattaagaaaatataaaatgtatgtcacccgcgtgggtcctgtcctcgagggggaagcctaagaacttacgagttcagcacccctttttactgattctcgattccagggaccccgacacccctccttcctcggcgcctgctcctcttcctcttgaccttgtcaaagcaggcaatgcaccctgttcttagcctgtatgtttgtcttttcctaatctgcccacccttctacttccgccttcattacttgaggaacttctttctcgggagagactaaatagtttctccctgtgttcttccttccctcccacggcatccctgctgtcctggaacagggcttgatgtagaaaatggtgctggccaggcagtcccttgaaaggcaacgctttacccatctgtccacatttgaaacagcctgaaataggccagaatctgggacaagaaaacgcccatttaagttccataggggtcaaacccaggcatactgctacacagcttattgggtgtcagtatggatccggaactcgagcttccagacacgtgggaacccccaacttgaaccttgaacttcacccagaaccttcaggccctgttgctagctgcagccacaggcctctactaccatgtctggcacatcggtcttgaccacattgccattatggtcaaggtagaggagagagagaggccttcgtgcagtggggacacagcaggaagaacccgcaggccaagggttgttggctttgaggaggctaaagacggcagaatggaaggaggcagcaatgccaggactgccagccaggtggggcgggcactgcccactgcagtaattcagctggtatccctccggctgcaggatccaatcccgccaccccagctcctggaagtctacatagtggtctcgcctacaacataagggggtctcaggctcacaggtgggagtcctcctcctggcccgacctgctccaggttcattagctcggatcttaagttccaagaagggacgttgctgtcccgctgtgtccaagagcagccgtggcagtcccgcagcggtgctgttaaggtccaggggtctaaattccagttggagtttcacgacgccagagtcctcactccgcaagccgctagagggcagagtcagggcgtgccagccagaggaagtggtttggtgctcagctaggaaggtgcggaatcctcggcacctagtggtgccgcaacggaagatcctcaggtacagagtgcccggaaaagagggaggcacatgcagccagaggcgggcatggtacaggtggtgggaccaaagaggggacagctggaaggtgagcatggagcggtaggttgaagtggatttgtctatgatggtagcaaagctgatgactttctctcggttgccagggaccatgctcttgggctgcagtctccggagggctctggtcagtgctgcctggggcagaggccgagttattctgggacggctggttaggtgcagtccctccaggatttgctgcttggctagctccaggaccagagcgcgttctccttggggtgccagtgttgggcccccacaggacgggcacgcagatcttgtactctgcacccacaccaatgcccacagcagtattagccagagctgggcttttggaagcttcatgctccaggtagatggctctgctttgagaacctcgaatgggtggcagttttatgagtctgatttcccaaagaggatacagaagcagcagcagcagcagcagcagcagcagcagcagcagcagcagcagcagcaacagcaaaccagtgtcacagctacccttgacaaagagcagaccaagctacttgtcctcaatagcctaggactcaggaagactgagagtagatcgcctggtggggtagctatgtgtgaccctcacagttcatgactaactactggcagggcctctttagagccagttgcttg

SEQ ID NO: 5 - DNA, 1053 bp, Rattus norvegicus
  source 1..1053: mol_type = genomic DNA
atgggactttcaaatgtccagctctggacaatactgctgtgggcattggcatgggtgcagagtacaagatctgcgtgcccgtcctgtggggccccaactctgacaccccaaggagaacgcgctctggtcctagagctagccaagcagcaaatcctggaggggctgcacctaaccagccgtcccagaataactcgtcctctgccccaggcagcactgaccagagccctccggagactgcagcccaggagcatggtccctggcaaccgagagaaagtcatcagctttgctaccagcatagacaaatccacttcaacctaccgctccgtgctcaccttccaactgtcccctctttggtcccaccacctgtaccatgcccgcctctggctgcacgtgcccccctcttttccggccactctgtatctgaggatcttcggttgcggtaccacgaggtgcagaggatcccgcacgttcctagctgattaccaaaccacttcctccggctggcacgccctgactctgccctctagcggcttgcggagtgaggaatctggagtcacaaaactccaactggaattcagacctctggaccttaacagcactactgccagactgccacggctgctgttggacacagcgggacagcagcgtcccttcttggaacttaagatccgagctaatgaacccggagcaggccgggccaggaggaggactcccacctgtgagtctgagacccccttatgttgtagacgagaccactatgtcgatttccaggagctggggtggagagactggatcctgcagccggagggataccagctgaattactgcagtgggcagtgcccgccccacctggctggcagccctggcattgctgcttccttccattctgctgtctttagcctcctcaaagccaacaacccttggcctgcgggttcttcctgctgtgtccccaccgcgcgaaggcctctctccctcctctaccttgaccataatggcaatgtggtcaagaccgatgtgccagacatggttgtagaggcctgtggctgcagctag

SEQ ID NO: 6 - DNA, 1053 bp, Rattus norvegicus
  source 1..1053: mol_type = genomic DNA
ctagctgcagccacaggcctctacaaccatgtctggcacatcggtcttgaccacattgccattatggtcaaggtagaggagggagagaggccttcgcgcggtggggacacagcaggaagaacccgcaggccaagggttgttggctttgaggaggctaaagacagcagaatggaaggaagcagcaatgccagggctgccagccaggtggggcgggcactgcccactgcagtaattcagctggtatccctccggctgcaggatccagtctctccaccccagctcctggaaatcgacatagtggtctcgtctacaacataagggggtctcagactcacaggtgggagtcctcctcctggcccggcctgctccgggttcattagctcggatcttaagttccaagaagggacgctgctgtcccgctgtgtccaacagcagccgtggcagtctggcagtagtgctgttaaggtccagaggtctgaattccagttggagttttgtgactccagattcctcactccgcaagccgctagagggcagagtcagggcgtgccagccggaggaagtggtttggtaatcagctaggaacgtgcgggatcctctgcacctcgtggtaccgcaaccgaagatcctcagatacagagtggccggaaaagaggggggcacgtgcagccagaggcgggcatggtacaggtggtgggaccaaagaggggacagttggaaggtgagcacggagcggtaggttgaagtggatttgtctatgctggtagcaaagctgatgactttctctcggttgccagggaccatgctcctgggctgcagtctccggagggctctggtcagtgctgcctggggcagaggacgagttattctgggacggctggttaggtgcagcccctccaggatttgctgcttggctagctctaggaccagagcgcgttctccttggggtgtcagagttggggccccacaggacgggcacgcagatcttgtactctgcacccatgccaatgcccacagcagtattgtccagagctggacatttgaaagtcccat

SEQ ID NO: 7 - DNA, 2391 bp, Macaca mulatta
  source 1..2391: mol_type = genomic DNA
aaataaaataaaataaaatttaaatttcaaaaagttaagaaaaaaaagacctggcactacttctaggatgccccaaatttaggcaactctcacagtcacttgaaagagaagtggcagctgggtatatgccctcccaagtgtcatgccccttgacagtcctgatggaccctgccctgtgcaagattgcatcaccaccaccaccacctctctgggcttccccagacatcacaggaacacattccccaccccaacccccccgctctggccctcctccacatcatgctgcaggccaactggactctgggcggccagcacaggcagggtcagggggtgacttctgtgcctcgtggcactgccatctgggcctgagcaagaggattccattctccgacccacccaacccctcacccctgtcccaacatcaatgctagaaataaagagaccagaattttccttctggcctaagggccccagagaaatacccactggagctcacagctgcctcatggaaactgctacagcagtggtgaagctagaaagactagaggtatgagggaaaattgcccttccccacctggctcataaggcgttccctcccccgagttccagaccttggggactgagcatgtgaaatcatcctctttcttgcatcatgcgtgtccacattgcacccccccacccccatacccctacttcaggcccagtcaccatggccagatggtgaaacctgagctggtggggaggaggacctccaccccctgcaggggcctgatgggcagcacagctggccaatcctgggactcagagggtaggtcggctggctgaccactaggtttggaagccccaggcagctggctctaaagaggccccaggtcagtagccagacatgagctgtgagggtcaagcacagctatccatcagatgatctactttcagccttcctgagtcccaggcaatagaagacaggtggctctacccttggccaagggtgggtgtggcagtggtgtctgctgtcactgtgccttcattggcccccagcaatcagactcaacagacggagcaactgccatctgaggctcccgaaccagggccattcaccaggagcatggggctccctgttgtccagctctggctggtgctgctgtggacactggtgcgagcacaggggacagggtctgtgtgtccctcctgtggggactccaaactggcaccccaagcagaacgagctctggtgctggagctagccaagcagcaaatcctggaggggttgcatctgaccagtcgtcccagaataactcatcctccaccccaggcagcgctgaccagagccctccggagactacagccggggagtgtggctccagggaatggggaggaggtcatcagctttgctactgtcacagactccacttcagcctacagctccctgcttacctttcacctgtccactcctcggttccatcacctgtaccatgcccgcctgtggctgcacatgctccccacccttcctggcactctttgcttgaggatcttccgatggggaccaaggaggaggcaccaaaggtcccgcacccttttggctgagcaccacatcaccaacctgggctggcatgccttaactctgccctctagtggcttgaggggtgagaagtctggtgtcctgaaactgcaactagactgcagacccctagaaggcaacaacagcacagttactggacaaccaaggcggctcctggacacagcaggacaccagcagcccttcctagagcttaagatccgagccaatgagcctggagcaggtcgggccaggaggaggacccccacctgtgagcctgcaacccccttatgttgcaggcgagatcattacgtagacttccaggaactgggatggcaagactggatactgcagcccgaggggtaccagctgaattactgcagtgggcagtgccctccccacctggctggcagcccaggcattgctgcctctttccattctgccgtcttcagcctcctcaaagccaacaatccttggcctgccagtacctcctgctgtgtccctactgcccgaaggcccctttctctcctctacctggatcataatggcaatgtggtcaagacggatgtgccagatatggtggtggaggcctgtggctgcagctagcaagaggacctggggctttggagtgaagagaccaagatgaagtttcccaggcacagggcatctgcggctggaggcatcagattcctgatccacaccccaacccaacaaccacctggcaatatgactcacttgacccctatggaacccaaatgggcactttcttgtctgagactctggcttgttccaggttggctgatgtgttggcagatgggtaaagcatttgttctaaa

SEQ ID NO: 8 - DNA, 2391 bp, Macaca mulatta
  source 1..2391: mol_type = genomic DNA
tttagaacaaatgctttacccatctgccaacacatcagccaacctggaacaagccagagtctcagacaagaaagtgcccatttgggttccataggggtcaagtgagtcatattgccaggtggttgttgggttggggtgtggatcaggaatctgatgcctccagccgcagatgccctgtgcctgggaaacttcatcttggtctcttcactccaaagccccaggtcctcttgctagctgcagccacaggcctccaccaccatatctggcacatccgtcttgaccacattgccattatgatccaggtagaggagagaaaggggccttcgggcagtagggacacagcaggaggtactggcaggccaaggattgttggctttgaggaggctgaagacggcagaatggaaagaggcagcaatgcctgggctgccagccaggtggggagggcactgcccactgcagtaattcagctggtacccctcgggctgcagtatccagtcttgccatcccagttcctggaagtctacgtaatgatctcgcctgcaacataagggggttgcaggctcacaggtgggggtcctcctcctggcccgacctgctccaggctcattggctcggatcttaagctctaggaagggctgctggtgtcctgctgtgtccaggagccgccttggttgtccagtaactgtgctgttgttgccttctaggggtctgcagtctagttgcagtttcaggacaccagacttctcacccctcaagccactagagggcagagttaaggcatgccagcccaggttggtgatgtggtgctcagccaaaagggtgcgggacctttggtgcctcctccttggtccccatcggaagatcctcaagcaaagagtgccaggaagggtggggagcatgtgcagccacaggcgggcatggtacaggtgatggaaccgaggagtggacaggtgaaaggtaagcagggagctgtaggctgaagtggagtctgtgacagtagcaaagctgatgacctcctccccattccctggagccacactccccggctgtagtctccggagggctctggtcagcgctgcctggggtggaggatgagttattctgggacgactggtcagatgcaacccctccaggatttgctgcttggctagctccagcaccagagctcgttctgcttggggtgccagtttggagtccccacaggagggacacacagaccctgtcccctgtgctcgcaccagtgtccacagcagcaccagccagagctggacaacagggagccccatgctcctggtgaatggccctggttcgggagcctcagatggcagttgctccgtctgttgagtctgattgctgggggccaatgaaggcacagtgacagcagacaccactgccacacccacccttggccaagggtagagccacctgtcttctattgcctgggactcaggaaggctgaaagtagatcatctgatggatagctgtgcttgaccctcacagctcatgtctggctactgacctggggcctctttagagccagctgcctggggcttccaaacctagtggtcagccagccgacctaccctctgagtcccaggattggccagctgtgctgcccatcaggcccctgcagggggtggaggtcctcctccccaccagctcaggtttcaccatctggccatggtgactgggcctgaagtaggggtatgggggtgggggggtgcaatgtggacacgcatgatgcaagaaagaggatgatttcacatgctcagtccccaaggtctggaactcgggggagggaacgccttatgagccaggtggggaagggcaattttccctcatacctctagtctttctagcttcaccactgctgtagcagtttccatgaggcagctgtgagctccagtgggtatttctctggggcccttaggccagaaggaaaattctggtctctttatttctagcattgatgttgggacaggggtgaggggttgggtgggtcggagaatggaatcctcttgctcaggcccagatggcagtgccacgaggcacagaagtcaccccctgaccctgcctgtgctggccgcccagagtccagttggcctgcagcatgatgtggaggagggccagagcgggggggttggggtggggaatgtgttcctgtgatgtctggggaagcccagagaggtggtggtggtggtgatgcaatcttgcacagggcagggtccatcaggactgtcaaggggcatgacacttgggagggcatatacccagctgccacttctctttcaagtgactgtgagagttgcctaaatttggggcatcctagaagtagtgccaggtcttttttttcttaactttttgaaatttaaattttattttattttattt

SEQ ID NO: 9 - DNA, 8853 bp, Homo sapiens
  source 1..8853: mol_type = genomic DNA
agtggcaggagcgccgcgcaccgccagccgcagggggcgtgggatgggggcggccggggaggggggcgcccacactgactagagccaaccgcgcacttcaaaagggtgtcggtgccgcgctcccctcccgcggcccgggaacttcaaagcgggccgtgctgccccggctgcctcgctctgctctggggcctcgcagccccggcgcggccgcctggtggcgatgacccgggcgctctgctcagcgctccgccaggctctcctgctgctcgcagcggccgccgagctctcgccaggactgaagtgtgtatgtcttttgtgtgattcttcaaacttcacctgccaaacagaaggagcatgttgggcatcagtcatgctaaccaatggaaaagagcaggtgatcaaatcctgtgtctcccttccagaactgaatgctcaagtcttctgtcatagttccaacaatgttaccaaaaccgaatgctgcttcacagatttttgcaacaacataacactgcaccttccaacagcatcaccaaatgccccaaaacttggacccatggagctggccatcattattactgtgcctgtttgcctcctgtccatagctgcgatgctgacagtatgggcatgccagggtcgacagtgctcctacaggaagaaaaagagaccaaatgtggaggaaccactctctgagtgcaatctggtaaatgctggaaaaactctgaaagatctgatttatgatgtgaccgcctctggatctggctctggtctacctctgttggttcaaaggacaattgcaaggacgattgtgcttcaggaaatagtaggaaaaggtagatttggtgaggtgtggcatggaagatggtgtggggaagatgtggctgtgaaaatattctcctccagagatgaaagatcttggtttcgtgaggcagaaatttaccagacggtcatgctgcgacatgaaaacatccttggtttcattgctgctgacaacaaagataatggaacttggactcaactttggctggtatctgaatatcatgaacagggctccttatatgactatttgaatagaaatatagtgaccgtggctggaatgatcaagctggcgctctcaattgctagtggtctggcacaccttcatatggagattgttggtacacaaggtaaacctgctattgctcatcgagacataaaatcaaagaatatcttagtgaaaaagtgtgaaacttgtgccatagcggacttagggttggctgtgaagcatgattcaatactgaacactatcgacatacctcagaatcctaaagtgggaaccaagaggtatatggctcctgaaatgcttgatgatacaatgaatgtgaatatctttgagtccttcaaacgagctgacatctattctgttggtctggtttactgggaaatagcccggaggtgttcagtcggaggaattgttgaggagtaccaattgccttattatgacatggtgccttcagatccctcgatagaggaaatgagaaaggttgtttgtgaccagaagtttcgaccaagtatcccaaaccagtggcaaagttgtgaagcactccgagtcatggggagaataatgcgtgagtgttggtatgccaacggagcggcccgcctaactgctcttcgtattaagaagactatatctcaactttgtgtcaaagaagactgcaaagcctaatgatgataattatgttaaaaagaaatctctcatagctttcttttccattttcccctttatgtgaatgtttttgccattttttttttgttctacctcaaagataagacagtacagtatttaagtgcccataaggcagcatgaaaagataactctaaagttaagcatgggcaggagttgacttcatccaatctctatgttatgtttaattttattttgaaagcaacacctcaactcatctttttatttaataaggaagaaatatattacaaaagtataaaataagctctataaaaatgttatagtcattaagtttttattttacttgaaccaagagcacatgaatgaacaggaaaagatgtaaaaacatttttttctgagatgaaaacatattaattaaacatgcaaattagagcatgctatctttaggtgatgcaatctatgtttccccctttttaagttagcaggactttttaaaaataaatattgctctaaactttaatatatcgaacgtgagagtggagctgcttagtggaagatgtaagtgaggtgggtgtcccatgtgcttggtctccccttctgctgttctcctgttcttcataatccactactgcagcagtccctgaaccactaaacttgttcctttcatttacaaaagagatacctgacatcctgagacactgagaaatgtcctgaagtcacacagctaatggcagaactggcactaggtccaaatcttgtgataatgaacaccgtaaggttagctagcttcctactttcccttgaatagtgcttttctccctatgtaatatcttttattatgatatttgtggtttagaaggcatattgagttattttgcagaatcataatggacccgcacaaaatctcagaaccatatctgttgacattttttctcatagaaatatcatggttaccccatttgttaatgagcattaatgttttctgaacacttccaaagattaatcaaacataaatattcattgtctgaaaatgtctttaagatacaattcagaggtccctatttcctttgtacatacacacttagaaagaaaagacagaaaaggaagaggaaggaaggaaatattttgagaatatattgagaagaattaagaaaactcttcaatgaagtgttaacaaccaaaccctacagacggtatcagaaacagcaaatagatattcctctaccctttcacagtgagtgagtgagtacagaagaatgctcatgatagttttgccttcattctactttctgtggacacagagtaatgaatatttaatgggacattaaatatgcccttcaaatctataattttactttggtaaacgagatttaacatgatgtcttttatgctcctaaaacatcttttttcaaactccattccttagaacattcttctactgagatgatccaagaccaaaagtgttctttggtacttgcttataaagtgatagtacatgttagcatataatgtattttgaagagtgaagtaaatgctattgataacagtaaaaaaaaaaaaaaaaactaataacagtaaagaaatgctacttgatttttttttaaactggattgctcagattacctgatcgtggtggaacccttttattaagaggaggggaaactttttactatcccatatttaactgttctataaagcaaagcacagcttgggtaatagcgttctgaaggatatacttctgtattttctcatagagtacaatttagtgattatgcttcatttcactatggaaatatgttactgaatctatcttcattttactgagttgaaataaggaaggcaaaaaactgacagctatggagtttgcgtgtacttccatactcgttaatgctctcatccacttattaaataatcatagagcacccatatcttgcttgccacaatatcgggtacaagagggaatacaaagatagataggtcctgccctcagggattttaaagtctaatttgggaatgggaatagggatgtgagtgtgtgggggaagagattaaattgacagataaaatacgaagtgggatgtcttgagttctgcatgacagtgggtttctaggataggtctgaaaattgctttcatttgcaacacatttagaaagtagctttatttggatattacagacaatctaaatatatcatcagtttttaaaagtgcctatgtgaagtgatttttaaaaagagcctatgtgaaggggtaatcttgcttgttcttgttactaatttctcatagattgtttttctgcatatataagaacgaaattatttatttactatggttgtacgtgcctcaaataaacaagaatgatatttcctgttttatttacttatgttgggtaaatatgcttattgaatttttaagagaggattttttaccatctccatttttcttgtcattatgttttgtagcttatttgagggtgtctaaatataatttcatattttattggttcaactttcactctgaagaaatccgtatgttagtacattttgaggtatttttcttgttcttgtgttgtttaactatgactcctaactgagtagtcttatatttcaattacaaaatacattttttaagaaagggaatagagcagcaaaaatgataaggaaaatgttaaaagttgtaatatttcctttactcttaacaggattatatatagaacatgctcacttacaaaaataggatgatgaagtttagagcataaggcaggcttcttgtatatacttatgctgtcaaatgttatattgtttttaatggagtcccattgtgtaatatttatttcttttacattttgttataagcaaaaaaaaaaaaaattctccttaggttatgttcagagtatcagtgttctttactccttacagatattttggctttggggtataatacaagacttgggaaaacactattatgaattttcagtactgtataaagtggtgatgggatttaaatgcagcatcactttctgaaaataagagaaacattatttgttgtcagtatttcagcatgaacttgttgccttgtaaattttgcctttaagtttgtaattggtacagattctgttgtatgctttcttctatgtctaaaatatttggcatgtcacatctagaattcttaatttatgttctgacttgagagttaagtgaaacatgactgtcgtgcactattttaggcatagcacttgcttttcatctttatactttcaattaactttgcattttaaatttccatgattgtatgaaaatagtaacctggttgcagtatctgaaaaaattaaaattagcttttatttaaaaatgaaaatctacaatagattcattaggttagaagttccagaataatttattattttattacacctactattgtagaattactaataaaacaaaacaaaactactcctattttcctggaattttgccaccatgtgacttattggggcagagaaaactcagggttgtctttgagtctgcacaaaagcaccagggaacctgcttagcaaatcgtctgaaaacagggagctgatgtttgccattatacaaagtttgagtaaacaacttaaaattgcttgttagggcatagtctttgattgaaataagtatgagaatgtatttggctaaataaatgtatttaaaatatacaaattttatttcccactggaaaattaagaaagtagcagtaccaaatgaataaaagctggcagttgatgtcttcaataatcattcctttaaaataaattcacaaacacatcattacaagctacttagaaatgtttagtattcgtatcttaaaatggcaccattgtggttttcaaagatattttaaacatcttttgtgaaacatactatttctgtttgacaatgctttgttctagctctgtgtgctgatacctacatggagtttttctgctattttagtgaaaacagtaattcttttatcttgagagctgcttctaaataacaaaaaagttaattggaatgtaagtttttaaaaaatgttaatattaaatagaatttttataatatgggcatttttcaaaacattttaatgaaaatatatagatatttgactttctttttttcatctagccttgctttatatttcattatttttctcactttttttcttaatattccctcactatctttcaacattatcattagttcctaattttaaaaataactcttatttaacttaaccgtctggaatttagccttctaatgaaagagaatcccttagtactctcagagattatataaagttattccaattttgtgtagatgacgaaaccaaggatcagagattaaatgactactagttactagcagaactcttatgaaagcctggtggtgacacccagcactgttccctgccatatccccaacttttactgattaaaaattaattcgcatgcatctaaacctaccttgaatgcacactaacgtaatgtgccattcaatgatgatgataaaatcccacttttctttgggtttctactaaaataatttactcactcagagtgaggtcaatgagaaaaactaaactaggctaagaaagagttgtagaatggttgttgagctaagtaggcaaccactggggtgctgataaaattaatggataaaatttaggaactgtgagagtatagaatttcttagtgcaagtaatgattagagaagcttcctgacatcccccaccctttctgtaaggactgttctttctctttgtaccttggaatgggggtgaaaggtgatttgatagctgaatttgggactatgtccagtgggatattatctaacttttctctctttctcttttttttcccctcagtttctcattagtttgtctttggcattcatcttcttttagtgcattaaaaaatgtttggcagatctcatcaatcccaagtcactctataattcctgtatttctttagttgtcgtttaacctgtccaaacttctacacaatgaacttcttaacaagattttaagttctctgtataagaggtttcacctcataacttctccagtaatccttcatttggcactatagagtatttgttaatggcagagatgatttttcttttaaaacctaaaaagactagctgttatttgtattctagcttttagctaacatataaagaatgtctacttttgctttaatgctaaattccgcttgagaaatagtaactgggaaagacaatttgaaatatatgccccataatgtgattgttaaatttatttctgctgttccataccattgctttgttttgcttttgacaaactaagccattatgctattagtttggaatataatactacagcaaaattaggtaacaatccctattttaaaattcccctaacaataatagaactgccagcatacttttctctttcagttgtagatgaatacattcgagagaatatgagctgtatttcatcctagattttaatattttcagatgtgactgtatttcctgatcattggtccaagttgtcctaaaagaaatttttctctccagacctaacagttttaactgcaagagtttactgtgggttatgttaatctgaattttaatagggccactaagaatctgagtgccttaggagattacccttatacccactgccatcacatccagtcaggcctgttgtgctctatataaatcttcccagctgaggggcaggtgcgggctaaaatccaactgcaattggctcccagacataattttatattttacagagaagcatcttattggcttatatgtgtttaaagaatggtctggcttatacatcttcagaaaatgagaattaaaaagtcaaaataattcttgacatctacagattgaacaaagaacttagaagaaataatactttatcttttcatcctggcattcctgagagaagagaaattgattgtttatcatgttggtttaatttttcaacccagacaatctgcagcaaggcacatggaccccaattttgatatcgtccatacagttttcattctatgcatggagctaattactgactttgcctgtaaagagaggattgtgtgcctaaattttgtctaacaaatgcaagcgtagaatgacatttactaatatttctatttcttccataggctaaataatagtaactaagtatttttaaggacacagccctttttttctctttatacaaaatgagagtatctgagccaaaatattaaattctagttcttttccgcaatgactagtgtcaagctcatgtactcttctgattctagactggagaagattattcaaacttgatctgtgtttcaggtttttaaatgtcctaaaaacagaaaattagattcagatctcaaaaaaggaattttggattgactttcaaagtactaatactaattatacttttcttttggtagcgtgactcttcttatacctaagaacatattacaaatgtcaaaaccattgcattttgacattgcaaaacatgccttgaactcttgaactactgtgaaaagaatcaccgttgtaaagactttttgtaagctagctgatactcttaagtatgtaaaaagattgtctttcagccgacaggcccaaaggaatgtatataaggaaggaatatgaaaaaataaattaggttttaaaataggaattgggcaataaactgtatcaaaaatatgtagatggattttagtagttgtaatttaaatgtggaaggtgaagagaatttcaaactccaaagagaaatgaatgatattcagatgtttcattaatttctagtctgtgaaaatatgcattttatagtaatatgtatagacttattttatttagaaataatagtgttttagaatttattaaaaactcagtgatagcctttataccaaaatgtttaactttaccaacagcaagtcataaaagtatttattttaaagctttttaatattatcgtgtaactttcatctgtcttcagatgtaaataattatctgcctaaatgttatatttttatgtatgcattttctgaaaatgtattgttttgtaaagtgggaaagataataaatcaagcacttcttgcacttgtttctgtgaagcatatagaactctattttaaataaaggaagatgtgtcgta

SEQ ID NO: 10 - DNA, 8853 bp, Homo sapiens
  source 1..8853: mol_type = genomic DNA
tacgacacatcttcctttatttaaaatagagttctatatgcttcacagaaacaagtgcaagaagtgcttgatttattatctttcccactttacaaaacaatacattttcagaaaatgcatacataaaaatataacatttaggcagataattatttacatctgaagacagatgaaagttacacgataatattaaaaagctttaaaataaatacttttatgacttgctgttggtaaagttaaacattttggtataaaggctatcactgagtttttaataaattctaaaacactattatttctaaataaaataagtctatacatattactataaaatgcatattttcacagactagaaattaatgaaacatctgaatatcattcatttctctttggagtttgaaattctcttcaccttccacatttaaattacaactactaaaatccatctacatatttttgatacagtttattgcccaattcctattttaaaacctaatttattttttcatattccttccttatatacattcctttgggcctgtcggctgaaagacaatctttttacatacttaagagtatcagctagcttacaaaaagtctttacaacggtgattcttttcacagtagttcaagagttcaaggcatgttttgcaatgtcaaaatgcaatggttttgacatttgtaatatgttcttaggtataagaagagtcacgctaccaaaagaaaagtataattagtattagtactttgaaagtcaatccaaaattccttttttgagatctgaatctaattttctgtttttaggacatttaaaaacctgaaacacagatcaagtttgaataatcttctccagtctagaatcagaagagtacatgagcttgacactagtcattgcggaaaagaactagaatttaatattttggctcagatactctcattttgtataaagagaaaaaaagggctgtgtccttaaaaatacttagttactattatttagcctatggaagaaatagaaatattagtaaatgtcattctacgcttgcatttgttagacaaaatttaggcacacaatcctctctttacaggcaaagtcagtaattagctccatgcatagaatgaaaactgtatggacgatatcaaaattggggtccatgtgccttgctgcagattgtctgggttgaaaaattaaaccaacatgataaacaatcaatttctcttctctcaggaatgccaggatgaaaagataaagtattatttcttctaagttctttgttcaatctgtagatgtcaagaattattttgactttttaattctcattttctgaagatgtataagccagaccattctttaaacacatataagccaataagatgcttctctgtaaaatataaaattatgtctgggagccaattgcagttggattttagcccgcacctgcccctcagctgggaagatttatatagagcacaacaggcctgactggatgtgatggcagtgggtataagggtaatctcctaaggcactcagattcttagtggccctattaaaattcagattaacataacccacagtaaactcttgcagttaaaactgttaggtctggagagaaaaatttcttttaggacaacttggaccaatgatcaggaaatacagtcacatctgaaaatattaaaatctaggatgaaatacagctcatattctctcgaatgtattcatctacaactgaaagagaaaagtatgctggcagttctattattgttaggggaattttaaaatagggattgttacctaattttgctgtagtattatattccaaactaatagcataatggcttagtttgtcaaaagcaaaacaaagcaatggtatggaacagcagaaataaatttaacaatcacattatggggcatatatttcaaattgtctttcccagttactatttctcaagcggaatttagcattaaagcaaaagtagacattctttatatgttagctaaaagctagaatacaaataacagctagtctttttaggttttaaaagaaaaatcatctctgccattaacaaatactctatagtgccaaatgaaggattactggagaagttatgaggtgaaacctcttatacagagaacttaaaatcttgttaagaagttcattgtgtagaagtttggacaggttaaacgacaactaaagaaatacaggaattatagagtgacttgggattgatgagatctgccaaacattttttaatgcactaaaagaagatgaatgccaaagacaaactaatgagaaactgaggggaaaaaaaagagaaagagagaaaagttagataatatcccactggacatagtcccaaattcagctatcaaatcacctttcacccccattccaaggtacaaagagaaagaacagtccttacagaaagggtgggggatgtcaggaagcttctctaatcattacttgcactaagaaattctatactctcacagttcctaaattttatccattaattttatcagcaccccagtggttgcctacttagctcaacaaccattctacaactctttcttagcctagtttagtttttctcattgacctcactctgagtgagtaaattattttagtagaaacccaaagaaaagtgggattttatcatcatcattgaatggcacattacgttagtgtgcattcaaggtaggtttagatgcatgcgaattaatttttaatcagtaaaagttggggatatggcagggaacagtgctgggtgtcaccaccaggctttcataagagttctgctagtaactagtagtcatttaatctctgatccttggtttcgtcatctacacaaaattggaataactttatataatctctgagagtactaagggattctctttcattagaaggctaaattccagacggttaagttaaataagagttatttttaaaattaggaactaatgataatgttgaaagatagtgagggaatattaagaaaaaaagtgagaaaaataatgaaatataaagcaaggctagatgaaaaaaagaaagtcaaatatctatatattttcattaaaatgttttgaaaaatgcccatattataaaaattctatttaatattaacattttttaaaaacttacattccaattaacttttttgttatttagaagcagctctcaagataaaagaattactgttttcactaaaatagcagaaaaactccatgtaggtatcagcacacagagctagaacaaagcattgtcaaacagaaatagtatgtttcacaaaagatgtttaaaatatctttgaaaaccacaatggtgccattttaagatacgaatactaaacatttctaagtagcttgtaatgatgtgtttgtgaatttattttaaaggaatgattattgaagacatcaactgccagcttttattcatttggtactgctactttcttaattttccagtgggaaataaaatttgtatattttaaatacatttatttagccaaatacattctcatacttatttcaatcaaagactatgccctaacaagcaattttaagttgtttactcaaactttgtataatggcaaacatcagctccctgttttcagacgatttgctaagcaggttccctggtgcttttgtgcagactcaaagacaaccctgagttttctctgccccaataagtcacatggtggcaaaattccaggaaaataggagtagttttgttttgttttattagtaattctacaatagtaggtgtaataaaataataaattattctggaacttctaacctaatgaatctattgtagattttcatttttaaataaaagctaattttaattttttcagatactgcaaccaggttactattttcatacaatcatggaaatttaaaatgcaaagttaattgaaagtataaagatgaaaagcaagtgctatgcctaaaatagtgcacgacagtcatgtttcacttaactctcaagtcagaacataaattaagaattctagatgtgacatgccaaatattttagacatagaagaaagcatacaacagaatctgtaccaattacaaacttaaaggcaaaatttacaaggcaacaagttcatgctgaaatactgacaacaaataatgtttctcttattttcagaaagtgatgctgcatttaaatcccatcaccactttatacagtactgaaaattcataatagtgttttcccaagtcttgtattataccccaaagccaaaatatctgtaaggagtaaagaacactgatactctgaacataacctaaggagaattttttttttttttgcttataacaaaatgtaaaagaaataaatattacacaatgggactccattaaaaacaatataacatttgacagcataagtatatacaagaagcctgccttatgctctaaacttcatcatcctatttttgtaagtgagcatgttctatatataatcctgttaagagtaaaggaaatattacaacttttaacattttccttatcatttttgctgctctattccctttcttaaaaaatgtattttgtaattgaaatataagactactcagttaggagtcatagttaaacaacacaagaacaagaaaaatacctcaaaatgtactaacatacggatttcttcagagtgaaagttgaaccaataaaatatgaaattatatttagacaccctcaaataagctacaaaacataatgacaagaaaaatggagatggtaaaaaatcctctcttaaaaattcaataagcatatttacccaacataagtaaataaaacaggaaatatcattcttgtttatttgaggcacgtacaaccatagtaaataaataatttcgttcttatatatgcagaaaaacaatctatgagaaattagtaacaagaacaagcaagattaccccttcacataggctctttttaaaaatcacttcacataggcacttttaaaaactgatgatatatttagattgtctgtaatatccaaataaagctactttctaaatgtgttgcaaatgaaagcaattttcagacctatcctagaaacccactgtcatgcagaactcaagacatcccacttcgtattttatctgtcaatttaatctcttcccccacacactcacatccctattcccattcccaaattagactttaaaatccctgagggcaggacctatctatctttgtattccctcttgtacccgatattgtggcaagcaagatatgggtgctctatgattatttaataagtggatgagagcattaacgagtatggaagtacacgcaaactccatagctgtcagttttttgccttccttatttcaactcagtaaaatgaagatagattcagtaacatatttccatagtgaaatgaagcataatcactaaattgtactctatgagaaaatacagaagtatatccttcagaacgctattacccaagctgtgctttgctttatagaacagttaaatatgggatagtaaaaagtttcccctcctcttaataaaagggttccaccacgatcaggtaatctgagcaatccagtttaaaaaaaaatcaagtagcatttctttactgttattagtttttttttttttttttactgttatcaatagcatttacttcactcttcaaaatacattatatgctaacatgtactatcactttataagcaagtaccaaagaacacttttggtcttggatcatctcagtagaagaatgttctaaggaatggagtttgaaaaaagatgttttaggagcataaaagacatcatgttaaatctcgtttaccaaagtaaaattatagatttgaagggcatatttaatgtcccattaaatattcattactctgtgtccacagaaagtagaatgaaggcaaaactatcatgagcattcttctgtactcactcactcactgtgaaagggtagaggaatatctatttgctgtttctgataccgtctgtagggtttggttgttaacacttcattgaagagttttcttaattcttctcaatatattctcaaaatatttccttccttcctcttccttttctgtcttttctttctaagtgtgtatgtacaaaggaaatagggacctctgaattgtatcttaaagacattttcagacaatgaatatttatgtttgattaatctttggaagtgttcagaaaacattaatgctcattaacaaatggggtaaccatgatatttctatgagaaaaaatgtcaacagatatggttctgagattttgtgcgggtccattatgattctgcaaaataactcaatatgccttctaaaccacaaatatcataataaaagatattacatagggagaaaagcactattcaagggaaagtaggaagctagctaaccttacggtgttcattatcacaagatttggacctagtgccagttctgccattagctgtgtgacttcaggacatttctcagtgtctcaggatgtcaggtatctcttttgtaaatgaaaggaacaagtttagtggttcagggactgctgcagtagtggattatgaagaacaggagaacagcagaaggggagaccaagcacatgggacacccacctcacttacatcttccactaagcagctccactctcacgttcgatatattaaagtttagagcaatatttatttttaaaaagtcctgctaacttaaaaagggggaaacatagattgcatcacctaaagatagcatgctctaatttgcatgtttaattaatatgttttcatctcagaaaaaaatgtttttacatcttttcctgttcattcatgtgctcttggttcaagtaaaataaaaacttaatgactataacatttttatagagcttattttatacttttgtaatatatttcttccttattaaataaaaagatgagttgaggtgttgctttcaaaataaaattaaacataacatagagattggatgaagtcaactcctgcccatgcttaactttagagttatcttttcatgctgccttatgggcacttaaatactgtactgtcttatctttgaggtagaacaaaaaaaaaatggcaaaaacattcacataaaggggaaaatggaaaagaaagctatgagagatttctttttaacataattatcatcattaggctttgcagtcttctttgacacaaagttgagatatagtcttcttaatacgaagagcagttaggcgggccgctccgttggcataccaacactcacgcattattctccccatgactcggagtgcttcacaactttgccactggtttgggatacttggtcgaaacttctggtcacaaacaacctttctcatttcctctatcgagggatctgaaggcaccatgtcataataaggcaattggtactcctcaacaattcctccgactgaacacctccgggctatttcccagtaaaccagaccaacagaatagatgtcagctcgtttgaaggactcaaagatattcacattcattgtatcatcaagcatttcaggagccatatacctcttggttcccactttaggattctgaggtatgtcgatagtgttcagtattgaatcatgcttcacagccaaccctaagtccgctatggcacaagtttcacactttttcactaagatattctttgattttatgtctcgatgagcaatagcaggtttaccttgtgtaccaacaatctccatatgaaggtgtgccagaccactagcaattgagagcgccagcttgatcattccagccacggtcactatatttctattcaaatagtcatataaggagccctgttcatgatattcagataccagccaaagttgagtccaagttccattatctttgttgtcagcagcaatgaaaccaaggatgttttcatgtcgcagcatgaccgtctggtaaatttctgcctcacgaaaccaagatctttcatctctggaggagaatattttcacagccacatcttccccacaccatcttccatgccacacctcaccaaatctaccttttcctactatttcctgaagcacaatcgtccttgcaattgtcctttgaaccaacagaggtagaccagagccagatccagaggcggtcacatcataaatcagatctttcagagtttttccagcatttaccagattgcactcagagagtggttcctccacatttggtctctttttcttcctgtaggagcactgtcgaccctggcatgcccatactgtcagcatcgcagctatggacaggaggcaaacaggcacagtaataatgatggccagctccatgggtccaagttttggggcatttggtgatgctgttggaaggtgcagtgttatgttgttgcaaaaatctgtgaagcagcattcggttttggtaacattgttggaactatgacagaagacttgagcattcagttctggaagggagacacaggatttgatcacctgctcttttccattggttagcatgactgatgcccaacatgctccttctgtttggcaggtgaagtttgaagaatcacacaaaagacatacacacttcagtcctggcgagagctcggcggccgctgcgagcagcaggagagcctggcggagcgctgagcagagcgcccgggtcatcgccaccaggcggccgcgccggggctgcgaggccccagagcagagcgaggcagccggggcagcacggcccgctttgaagttcccgggccgcgggaggggagcgcggcaccgacacccttttgaagtgcgcggttggctctagtcagtgtgggcgcccccctccccggccgcccccatcccacgccccctgcggctggcggtgcgcggcgctcctgccact

SEQ ID NO: 11 - DNA, 8761 bp, Homo sapiens
  source 1..8761: mol_type = genomic DNA
gttgcgctgccgtcgggcaggtggccgagccccgcgggagctgtcgtcggggccgaattcactgcgccaaggtccagcggaaagctggggcatcccggcgaccgcagggtgtcccttcgcaaattcatcaggcgaaggggaggcggaagctcctggccgctgctctgggggagggctccgagctccaacctgcaagtccaggactgaagtgtgtatgtcttttgtgtgattcttcaaacttcacctgccaaacagaaggagcatgttgggcatcagtcatgctaaccaatggaaaagagcaggtgatcaaatcctgtgtctcccttccagaactgaatgctcaagtcttctgtcatagttccaacaatgttaccaaaaccgaatgctgcttcacagatttttgcaacaacataacactgcaccttccaacagcatcaccaaatgccccaaaacttggacccatggagctggccatcattattactgtgcctgtttgcctcctgtccatagctgcgatgctgacagtatgggcatgccagggtcgacagtgctcctacaggaagaaaaagagaccaaatgtggaggaaccactctctgagtgcaatctggtaaatgctggaaaaactctgaaagatctgatttatgatgtgaccgcctctggatctggctctggtctacctctgttggttcaaaggacaattgcaaggacgattgtgcttcaggaaatagtaggaaaaggtagatttggtgaggtgtggcatggaagatggtgtggggaagatgtggctgtgaaaatattctcctccagagatgaaagatcttggtttcgtgaggcagaaatttaccagacggtcatgctgcgacatgaaaacatccttggtttcattgctgctgacaacaaagataatggaacttggactcaactttggctggtatctgaatatcatgaacagggctccttatatgactatttgaatagaaatatagtgaccgtggctggaatgatcaagctggcgctctcaattgctagtggtctggcacaccttcatatggagattgttggtacacaaggtaaacctgctattgctcatcgagacataaaatcaaagaatatcttagtgaaaaagtgtgaaacttgtgccatagcggacttagggttggctgtgaagcatgattcaatactgaacactatcgacatacctcagaatcctaaagtgggaaccaagaggtatatggctcctgaaatgcttgatgatacaatgaatgtgaatatctttgagtccttcaaacgagctgacatctattctgttggtctggtttactgggaaatagcccggaggtgttcagtcggaggaattgttgaggagtaccaattgccttattatgacatggtgccttcagatccctcgatagaggaaatgagaaaggttgtttgtgaccagaagtttcgaccaagtatcccaaaccagtggcaaagttgtgaagcactccgagtcatggggagaataatgcgtgagtgttggtatgccaacggagcggcccgcctaactgctcttcgtattaagaagactatatctcaactttgtgtcaaagaagactgcaaagcctaatgatgataattatgttaaaaagaaatctctcatagctttcttttccattttcccctttatgtgaatgtttttgccattttttttttgttctacctcaaagataagacagtacagtatttaagtgcccataaggcagcatgaaaagataactctaaagttaagcatgggcaggagttgacttcatccaatctctatgttatgtttaattttattttgaaagcaacacctcaactcatctttttatttaataaggaagaaatatattacaaaagtataaaataagctctataaaaatgttatagtcattaagtttttattttacttgaaccaagagcacatgaatgaacaggaaaagatgtaaaaacatttttttctgagatgaaaacatattaattaaacatgcaaattagagcatgctatctttaggtgatgcaatctatgtttccccctttttaagttagcaggactttttaaaaataaatattgctctaaactttaatatatcgaacgtgagagtggagctgcttagtggaagatgtaagtgaggtgggtgtcccatgtgcttggtctccccttctgctgttctcctgttcttcataatccactactgcagcagtccctgaaccactaaacttgttcctttcatttacaaaagagatacctgacatcctgagacactgagaaatgtcctgaagtcacacagctaatggcagaactggcactaggtccaaatcttgtgataatgaacaccgtaaggttagctagcttcctactttcccttgaatagtgcttttctccctatgtaatatcttttattatgatatttgtggtttagaaggcatattgagttattttgcagaatcataatggacccgcacaaaatctcagaaccatatctgttgacattttttctcatagaaatatcatggttaccccatttgttaatgagcattaatgttttctgaacacttccaaagattaatcaaacataaatattcattgtctgaaaatgtctttaagatacaattcagaggtccctatttcctttgtacatacacacttagaaagaaaagacagaaaaggaagaggaaggaaggaaatattttgagaatatattgagaagaattaagaaaactcttcaatgaagtgttaacaaccaaaccctacagacggtatcagaaacagcaaatagatattcctctaccctttcacagtgagtgagtgagtacagaagaatgctcatgatagttttgccttcattctactttctgtggacacagagtaatgaatatttaatgggacattaaatatgcccttcaaatctataattttactttggtaaacgagatttaacatgatgtcttttatgctcctaaaacatcttttttcaaactccattccttagaacattcttctactgagatgatccaagaccaaaagtgttctttggtacttgcttataaagtgatagtacatgttagcatataatgtattttgaagagtgaagtaaatgctattgataacagtaaaaaaaaaaaaaaaaactaataacagtaaagaaatgctacttgatttttttttaaactggattgctcagattacctgatcgtggtggaacccttttattaagaggaggggaaactttttactatcccatatttaactgttctataaagcaaagcacagcttgggtaatagcgttctgaaggatatacttctgtattttctcatagagtacaatttagtgattatgcttcatttcactatggaaatatgttactgaatctatcttcattttactgagttgaaataaggaaggcaaaaaactgacagctatggagtttgcgtgtacttccatactcgttaatgctctcatccacttattaaataatcatagagcacccatatcttgcttgccacaatatcgggtacaagagggaatacaaagatagataggtcctgccctcagggattttaaagtctaatttgggaatgggaatagggatgtgagtgtgtgggggaagagattaaattgacagataaaatacgaagtgggatgtcttgagttctgcatgacagtgggtttctaggataggtctgaaaattgctttcatttgcaacacatttagaaagtagctttatttggatattacagacaatctaaatatatcatcagtttttaaaagtgcctatgtgaagtgatttttaaaaagagcctatgtgaaggggtaatcttgcttgttcttgttactaatttctcatagattgtttttctgcatatataagaacgaaattatttatttactatggttgtacgtgcctcaaataaacaagaatgatatttcctgttttatttacttatgttgggtaaatatgcttattgaatttttaagagaggattttttaccatctccatttttcttgtcattatgttttgtagcttatttgagggtgtctaaatataatttcatattttattggttcaactttcactctgaagaaatccgtatgttagtacattttgaggtatttttcttgttcttgtgttgtttaactatgactcctaactgagtagtcttatatttcaattacaaaatacattttttaagaaagggaatagagcagcaaaaatgataaggaaaatgttaaaagttgtaatatttcctttactcttaacaggattatatatagaacatgctcacttacaaaaataggatgatgaagtttagagcataaggcaggcttcttgtatatacttatgctgtcaaatgttatattgtttttaatggagtcccattgtgtaatatttatttcttttacattttgttataagcaaaaaaaaaaaaaattctccttaggttatgttcagagtatcagtgttctttactccttacagatattttggctttggggtataatacaagacttgggaaaacactattatgaattttcagtactgtataaagtggtgatgggatttaaatgcagcatcactttctgaaaataagagaaacattatttgttgtcagtatttcagcatgaacttgttgccttgtaaattttgcctttaagtttgtaattggtacagattctgttgtatgctttcttctatgtctaaaatatttggcatgtcacatctagaattcttaatttatgttctgacttgagagttaagtgaaacatgactgtcgtgcactattttaggcatagcacttgcttttcatctttatactttcaattaactttgcattttaaatttccatgattgtatgaaaatagtaacctggttgcagtatctgaaaaaattaaaattagcttttatttaaaaatgaaaatctacaatagattcattaggttagaagttccagaataatttattattttattacacctactattgtagaattactaataaaacaaaacaaaactactcctattttcctggaattttgccaccatgtgacttattggggcagagaaaactcagggttgtctttgagtctgcacaaaagcaccagggaacctgcttagcaaatcgtctgaaaacagggagctgatgtttgccattatacaaagtttgagtaaacaacttaaaattgcttgttagggcatagtctttgattgaaataagtatgagaatgtatttggctaaataaatgtatttaaaatatacaaattttatttcccactggaaaattaagaaagtagcagtaccaaatgaataaaagctggcagttgatgtcttcaataatcattcctttaaaataaattcacaaacacatcattacaagctacttagaaatgtttagtattcgtatcttaaaatggcaccattgtggttttcaaagatattttaaacatcttttgtgaaacatactatttctgtttgacaatgctttgttctagctctgtgtgctgatacctacatggagtttttctgctattttagtgaaaacagtaattcttttatcttgagagctgcttctaaataacaaaaaagttaattggaatgtaagtttttaaaaaatgttaatattaaatagaatttttataatatgggcatttttcaaaacattttaatgaaaatatatagatatttgactttctttttttcatctagccttgctttatatttcattatttttctcactttttttcttaatattccctcactatctttcaacattatcattagttcctaattttaaaaataactcttatttaacttaaccgtctggaatttagccttctaatgaaagagaatcccttagtactctcagagattatataaagttattccaattttgtgtagatgacgaaaccaaggatcagagattaaatgactactagttactagcagaactcttatgaaagcctggtggtgacacccagcactgttccctgccatatccccaacttttactgattaaaaattaattcgcatgcatctaaacctaccttgaatgcacactaacgtaatgtgccattcaatgatgatgataaaatcccacttttctttgggtttctactaaaataatttactcactcagagtgaggtcaatgagaaaaactaaactaggctaagaaagagttgtagaatggttgttgagctaagtaggcaaccactggggtgctgataaaattaatggataaaatttaggaactgtgagagtatagaatttcttagtgcaagtaatgattagagaagcttcctgacatcccccaccctttctgtaaggactgttctttctctttgtaccttggaatgggggtgaaaggtgatttgatagctgaatttgggactatgtccagtgggatattatctaacttttctctctttctcttttttttcccctcagtttctcattagtttgtctttggcattcatcttcttttagtgcattaaaaaatgtttggcagatctcatcaatcccaagtcactctataattcctgtatttctttagttgtcgtttaacctgtccaaacttctacacaatgaacttcttaacaagattttaagttctctgtataagaggtttcacctcataacttctccagtaatccttcatttggcactatagagtatttgttaatggcagagatgatttttcttttaaaacctaaaaagactagctgttatttgtattctagcttttagctaacatataaagaatgtctacttttgctttaatgctaaattccgcttgagaaatagtaactgggaaagacaatttgaaatatatgccccataatgtgattgttaaatttatttctgctgttccataccattgctttgttttgcttttgacaaactaagccattatgctattagtttggaatataatactacagcaaaattaggtaacaatccctattttaaaattcccctaacaataatagaactgccagcatacttttctctttcagttgtagatgaatacattcgagagaatatgagctgtatttcatcctagattttaatattttcagatgtgactgtatttcctgatcattggtccaagttgtcctaaaagaaatttttctctccagacctaacagttttaactgcaagagtttactgtgggttatgttaatctgaattttaatagggccactaagaatctgagtgccttaggagattacccttatacccactgccatcacatccagtcaggcctgttgtgctctatataaatcttcccagctgaggggcaggtgcgggctaaaatccaactgcaattggctcccagacataattttatattttacagagaagcatcttattggcttatatgtgtttaaagaatggtctggcttatacatcttcagaaaatgagaattaaaaagtcaaaataattcttgacatctacagattgaacaaagaacttagaagaaataatactttatcttttcatcctggcattcctgagagaagagaaattgattgtttatcatgttggtttaatttttcaacccagacaatctgcagcaaggcacatggaccccaattttgatatcgtccatacagttttcattctatgcatggagctaattactgactttgcctgtaaagagaggattgtgtgcctaaattttgtctaacaaatgcaagcgtagaatgacatttactaatatttctatttcttccataggctaaataatagtaactaagtatttttaaggacacagccctttttttctctttatacaaaatgagagtatctgagccaaaatattaaattctagttcttttccgcaatgactagtgtcaagctcatgtactcttctgattctagactggagaagattattcaaacttgatctgtgtttcaggtttttaaatgtcctaaaaacagaaaattagattcagatctcaaaaaaggaattttggattgactttcaaagtactaatactaattatacttttcttttggtagcgtgactcttcttatacctaagaacatattacaaatgtcaaaaccattgcattttgacattgcaaaacatgccttgaactcttgaactactgtgaaaagaatcaccgttgtaaagactttttgtaagctagctgatactcttaagtatgtaaaaagattgtctttcagccgacaggcccaaaggaatgtatataaggaaggaatatgaaaaaataaattaggttttaaaataggaattgggcaataaactgtatcaaaaatatgtagatggattttagtagttgtaatttaaatgtggaaggtgaagagaatttcaaactccaaagagaaatgaatgatattcagatgtttcattaatttctagtctgtgaaaatatgcattttatagtaatatgtatagacttattttatttagaaataatagtgttttagaatttattaaaaactcagtgatagcctttataccaaaatgtttaactttaccaacagcaagtcataaaagtatttattttaaagctttttaatattatcgtgtaactttcatctgtcttcagatgtaaataattatctgcctaaatgttatatttttatgtatgcattttctgaaaatgtattgttttgtaaagtgggaaagataataaatcaagcacttcttgcacttgtttctgtgaagcatatagaactctattttaaataaaggaagatgtgtcgta

SEQ ID NO: 12 - DNA, 8761 bp, Homo sapiens
  source 1..8761: mol_type = genomic DNA
tacgacacatcttcctttatttaaaatagagttctatatgcttcacagaaacaagtgcaagaagtgcttgatttattatctttcccactttacaaaacaatacattttcagaaaatgcatacataaaaatataacatttaggcagataattatttacatctgaagacagatgaaagttacacgataatattaaaaagctttaaaataaatacttttatgacttgctgttggtaaagttaaacattttggtataaaggctatcactgagtttttaataaattctaaaacactattatttctaaataaaataagtctatacatattactataaaatgcatattttcacagactagaaattaatgaaacatctgaatatcattcatttctctttggagtttgaaattctcttcaccttccacatttaaattacaactactaaaatccatctacatatttttgatacagtttattgcccaattcctattttaaaacctaatttattttttcatattccttccttatatacattcctttgggcctgtcggctgaaagacaatctttttacatacttaagagtatcagctagcttacaaaaagtctttacaacggtgattcttttcacagtagttcaagagttcaaggcatgttttgcaatgtcaaaatgcaatggttttgacatttgtaatatgttcttaggtataagaagagtcacgctaccaaaagaaaagtataattagtattagtactttgaaagtcaatccaaaattccttttttgagatctgaatctaattttctgtttttaggacatttaaaaacctgaaacacagatcaagtttgaataatcttctccagtctagaatcagaagagtacatgagcttgacactagtcattgcggaaaagaactagaatttaatattttggctcagatactctcattttgtataaagagaaaaaaagggctgtgtccttaaaaatacttagttactattatttagcctatggaagaaatagaaatattagtaaatgtcattctacgcttgcatttgttagacaaaatttaggcacacaatcctctctttacaggcaaagtcagtaattagctccatgcatagaatgaaaactgtatggacgatatcaaaattggggtccatgtgccttgctgcagattgtctgggttgaaaaattaaaccaacatgataaacaatcaatttctcttctctcaggaatgccaggatgaaaagataaagtattatttcttctaagttctttgttcaatctgtagatgtcaagaattattttgactttttaattctcattttctgaagatgtataagccagaccattctttaaacacatataagccaataagatgcttctctgtaaaatataaaattatgtctgggagccaattgcagttggattttagcccgcacctgcccctcagctgggaagatttatatagagcacaacaggcctgactggatgtgatggcagtgggtataagggtaatctcctaaggcactcagattcttagtggccctattaaaattcagattaacataacccacagtaaactcttgcagttaaaactgttaggtctggagagaaaaatttcttttaggacaacttggaccaatgatcaggaaatacagtcacatctgaaaatattaaaatctaggatgaaatacagctcatattctctcgaatgtattcatctacaactgaaagagaaaagtatgctggcagttctattattgttaggggaattttaaaatagggattgttacctaattttgctgtagtattatattccaaactaatagcataatggcttagtttgtcaaaagcaaaacaaagcaatggtatggaacagcagaaataaatttaacaatcacattatggggcatatatttcaaattgtctttcccagttactatttctcaagcggaatttagcattaaagcaaaagtagacattctttatatgttagctaaaagctagaatacaaataacagctagtctttttaggttttaaaagaaaaatcatctctgccattaacaaatactctatagtgccaaatgaaggattactggagaagttatgaggtgaaacctcttatacagagaacttaaaatcttgttaagaagttcattgtgtagaagtttggacaggttaaacgacaactaaagaaatacaggaattatagagtgacttgggattgatgagatctgccaaacattttttaatgcactaaaagaagatgaatgccaaagacaaactaatgagaaactgaggggaaaaaaaagagaaagagagaaaagttagataatatcccactggacatagtcccaaattcagctatcaaatcacctttcacccccattccaaggtacaaagagaaagaacagtccttacagaaagggtgggggatgtcaggaagcttctctaatcattacttgcactaagaaattctatactctcacagttcctaaattttatccattaattttatcagcaccccagtggttgcctacttagctcaacaaccattctacaactctttcttagcctagtttagtttttctcattgacctcactctgagtgagtaaattattttagtagaaacccaaagaaaagtgggattttatcatcatcattgaatggcacattacgttagtgtgcattcaaggtaggtttagatgcatgcgaattaatttttaatcagtaaaagttggggatatggcagggaacagtgctgggtgtcaccaccaggctttcataagagttctgctagtaactagtagtcatttaatctctgatccttggtttcgtcatctacacaaaattggaataactttatataatctctgagagtactaagggattctctttcattagaaggctaaattccagacggttaagttaaataagagttatttttaaaattaggaactaatgataatgttgaaagatagtgagggaatattaagaaaaaaagtgagaaaaataatgaaatataaagcaaggctagatgaaaaaaagaaagtcaaatatctatatattttcattaaaatgttttgaaaaatgcccatattataaaaattctatttaatattaacattttttaaaaacttacattccaattaacttttttgttatttagaagcagctctcaagataaaagaattactgttttcactaaaatagcagaaaaactccatgtaggtatcagcacacagagctagaacaaagcattgtcaaacagaaatagtatgtttcacaaaagatgtttaaaatatctttgaaaaccacaatggtgccattttaagatacgaatactaaacatttctaagtagcttgtaatgatgtgtttgtgaatttattttaaaggaatgattattgaagacatcaactgccagcttttattcatttggtactgctactttcttaattttccagtgggaaataaaatttgtatattttaaatacatttatttagccaaatacattctcatacttatttcaatcaaagactatgccctaacaagcaattttaagttgtttactcaaactttgtataatggcaaacatcagctccctgttttcagacgatttgctaagcaggttccctggtgcttttgtgcagactcaaagacaaccctgagttttctctgccccaataagtcacatggtggcaaaattccaggaaaataggagtagttttgttttgttttattagtaattctacaatagtaggtgtaataaaataataaattattctggaacttctaacctaatgaatctattgtagattttcatttttaaataaaagctaattttaattttttcagatactgcaaccaggttactattttcatacaatcatggaaatttaaaatgcaaagttaattgaaagtataaagatgaaaagcaagtgctatgcctaaaatagtgcacgacagtcatgtttcacttaactctcaagtcagaacataaattaagaattctagatgtgacatgccaaatattttagacatagaagaaagcatacaacagaatctgtaccaattacaaacttaaaggcaaaatttacaaggcaacaagttcatgctgaaatactgacaacaaataatgtttctcttattttcagaaagtgatgctgcatttaaatcccatcaccactttatacagtactgaaaattcataatagtgttttcccaagtcttgtattataccccaaagccaaaatatctgtaaggagtaaagaacactgatactctgaacataacctaaggagaattttttttttttttgcttataacaaaatgtaaaagaaataaatattacacaatgggactccattaaaaacaatataacatttgacagcataagtatatacaagaagcctgccttatgctctaaacttcatcatcctatttttgtaagtgagcatgttctatatataatcctgttaagagtaaaggaaatattacaacttttaacattttccttatcatttttgctgctctattccctttcttaaaaaatgtattttgtaattgaaatataagactactcagttaggagtcatagttaaacaacacaagaacaagaaaaatacctcaaaatgtactaacatacggatttcttcagagtgaaagttgaaccaataaaatatgaaattatatttagacaccctcaaataagctacaaaacataatgacaagaaaaatggagatggtaaaaaatcctctcttaaaaattcaataagcatatttacccaacataagtaaataaaacaggaaatatcattcttgtttatttgaggcacgtacaaccatagtaaataaataatttcgttcttatatatgcagaaaaacaatctatgagaaattagtaacaagaacaagcaagattaccccttcacataggctctttttaaaaatcacttcacataggcacttttaaaaactgatgatatatttagattgtctgtaatatccaaataaagctactttctaaatgtgttgcaaatgaaagcaattttcagacctatcctagaaacccactgtcatgcagaactcaagacatcccacttcgtattttatctgtcaatttaatctcttcccccacacactcacatccctattcccattcccaaattagactttaaaatccctgagggcaggacctatctatctttgtattccctcttgtacccgatattgtggcaagcaagatatgggtgctctatgattatttaataagtggatgagagcattaacgagtatggaagtacacgcaaactccatagctgtcagttttttgccttccttatttcaactcagtaaaatgaagatagattcagtaacatatttccatagtgaaatgaagcataatcactaaattgtactctatgagaaaatacagaagtatatccttcagaacgctattacccaagctgtgctttgctttatagaacagttaaatatgggatagtaaaaagtttcccctcctcttaataaaagggttccaccacgatcaggtaatctgagcaatccagtttaaaaaaaaatcaagtagcatttctttactgttattagtttttttttttttttttactgttatcaatagcatttacttcactcttcaaaatacattatatgctaacatgtactatcactttataagcaagtaccaaagaacacttttggtcttggatcatctcagtagaagaatgttctaaggaatggagtttgaaaaaagatgttttaggagcataaaagacatcatgttaaatctcgtttaccaaagtaaaattatagatttgaagggcatatttaatgtcccattaaatattcattactctgtgtccacagaaagtagaatgaaggcaaaactatcatgagcattcttctgtactcactcactcactgtgaaagggtagaggaatatctatttgctgtttctgataccgtctgtagggtttggttgttaacacttcattgaagagttttcttaattcttctcaatatattctcaaaatatttccttccttcctcttccttttctgtcttttctttctaagtgtgtatgtacaaaggaaatagggacctctgaattgtatcttaaagacattttcagacaatgaatatttatgtttgattaatctttggaagtgttcagaaaacattaatgctcattaacaaatggggtaaccatgatatttctatgagaaaaaatgtcaacagatatggttctgagattttgtgcgggtccattatgattctgcaaaataactcaatatgccttctaaaccacaaatatcataataaaagatattacatagggagaaaagcactattcaagggaaagtaggaagctagctaaccttacggtgttcattatcacaagatttggacctagtgccagttctgccattagctgtgtgacttcaggacatttctcagtgtctcaggatgtcaggtatctcttttgtaaatgaaaggaacaagtttagtggttcagggactgctgcagtagtggattatgaagaacaggagaacagcagaaggggagaccaagcacatgggacacccacctcacttacatcttccactaagcagctccactctcacgttcgatatattaaagtttagagcaatatttatttttaaaaagtcctgctaacttaaaaagggggaaacatagattgcatcacctaaagatagcatgctctaatttgcatgtttaattaatatgttttcatctcagaaaaaaatgtttttacatcttttcctgttcattcatgtgctcttggttcaagtaaaataaaaacttaatgactataacatttttatagagcttattttatacttttgtaatatatttcttccttattaaataaaaagatgagttgaggtgttgctttcaaaataaaattaaacataacatagagattggatgaagtcaactcctgcccatgcttaactttagagttatcttttcatgctgccttatgggcacttaaatactgtactgtcttatctttgaggtagaacaaaaaaaaaatggcaaaaacattcacataaaggggaaaatggaaaagaaagctatgagagatttctttttaacataattatcatcattaggctttgcagtcttctttgacacaaagttgagatatagtcttcttaatacgaagagcagttaggcgggccgctccgttggcataccaacactcacgcattattctccccatgactcggagtgcttcacaactttgccactggtttgggatacttggtcgaaacttctggtcacaaacaacctttctcatttcctctatcgagggatctgaaggcaccatgtcataataaggcaattggtactcctcaacaattcctccgactgaacacctccgggctatttcccagtaaaccagaccaacagaatagatgtcagctcgtttgaaggactcaaagatattcacattcattgtatcatcaagcatttcaggagccatatacctcttggttcccactttaggattctgaggtatgtcgatagtgttcagtattgaatcatgcttcacagccaaccctaagtccgctatggcacaagtttcacactttttcactaagatattctttgattttatgtctcgatgagcaatagcaggtttaccttgtgtaccaacaatctccatatgaaggtgtgccagaccactagcaattgagagcgccagcttgatcattccagccacggtcactatatttctattcaaatagtcatataaggagccctgttcatgatattcagataccagccaaagttgagtccaagttccattatctttgttgtcagcagcaatgaaaccaaggatgttttcatgtcgcagcatgaccgtctggtaaatttctgcctcacgaaaccaagatctttcatctctggaggagaatattttcacagccacatcttccccacaccatcttccatgccacacctcaccaaatctaccttttcctactatttcctgaagcacaatcgtccttgcaattgtcctttgaaccaacagaggtagaccagagccagatccagaggcggtcacatcataaatcagatctttcagagtttttccagcatttaccagattgcactcagagagtggttcctccacatttggtctctttttcttcctgtaggagcactgtcgaccctggcatgcccatactgtcagcatcgcagctatggacaggaggcaaacaggcacagtaataatgatggccagctccatgggtccaagttttggggcatttggtgatgctgttggaaggtgcagtgttatgttgttgcaaaaatctgtgaagcagcattcggttttggtaacattgttggaactatgacagaagacttgagcattcagttctggaagggagacacaggatttgatcacctgctcttttccattggttagcatgactgatgcccaacatgctccttctgtttggcaggtgaagtttgaagaatcacacaaaagacatacacacttcagtcctggacttgcaggttggagctcggagccctcccccagagcagcggccaggagcttccgcctccccttcgcctgatgaatttgcgaagggacaccctgcggtcgccgggatgccccagctttccgctggaccttggcgcagtgaattcggccccgacgacagctcccgcggggctcggccacctgcccgacggcagcgcaac

SEQ ID NO: 13 - DNA, 8613 bp, Homo sapiens
  source 1..8613: mol_type = genomic DNA
agtggcaggagcgccgcgcaccgccagccgcagggggcgtgggatgggggcggccggggaggggggcgcccacactgactagagccaaccgcgcacttcaaaagggtgtcggtgccgcgctcccctcccgcggcccgggaacttcaaagcgggccgtgctgccccggctgcctcgctctgctctggggcctcgcagccccggcgcggccgcctggtggcgatgacccgggcgctctgctcagcgctccgccaggctctcctgctgctcgcagcggccgccgagctctcgccaggactgaagtgtgtatgtcttttgtgtgattcttcaaacttcacctgccaaacagaaggagcatgttgggcatcagtcatgctaaccaatggaaaagagcaggtgatcaaatcctgtgtctcccttccagaactgaatgctcaagtcttctgtcatagttccaacaatgttaccaaaaccgaatgctgcttcacagatttttgcaacaacataacactgcaccttccaacaggtctacctctgttggttcaaaggacaattgcaaggacgattgtgcttcaggaaatagtaggaaaaggtagatttggtgaggtgtggcatggaagatggtgtggggaagatgtggctgtgaaaatattctcctccagagatgaaagatcttggtttcgtgaggcagaaatttaccagacggtcatgctgcgacatgaaaacatccttggtttcattgctgctgacaacaaagataatggaacttggactcaactttggctggtatctgaatatcatgaacagggctccttatatgactatttgaatagaaatatagtgaccgtggctggaatgatcaagctggcgctctcaattgctagtggtctggcacaccttcatatggagattgttggtacacaaggtaaacctgctattgctcatcgagacataaaatcaaagaatatcttagtgaaaaagtgtgaaacttgtgccatagcggacttagggttggctgtgaagcatgattcaatactgaacactatcgacatacctcagaatcctaaagtgggaaccaagaggtatatggctcctgaaatgcttgatgatacaatgaatgtgaatatctttgagtccttcaaacgagctgacatctattctgttggtctggtttactgggaaatagcccggaggtgttcagtcggaggaattgttgaggagtaccaattgccttattatgacatggtgccttcagatccctcgatagaggaaatgagaaaggttgtttgtgaccagaagtttcgaccaagtatcccaaaccagtggcaaagttgtgaagcactccgagtcatggggagaataatgcgtgagtgttggtatgccaacggagcggcccgcctaactgctcttcgtattaagaagactatatctcaactttgtgtcaaagaagactgcaaagcctaatgatgataattatgttaaaaagaaatctctcatagctttcttttccattttcccctttatgtgaatgtttttgccattttttttttgttctacctcaaagataagacagtacagtatttaagtgcccataaggcagcatgaaaagataactctaaagttaagcatgggcaggagttgacttcatccaatctctatgttatgtttaattttattttgaaagcaacacctcaactcatctttttatttaataaggaagaaatatattacaaaagtataaaataagctctataaaaatgttatagtcattaagtttttattttacttgaaccaagagcacatgaatgaacaggaaaagatgtaaaaacatttttttctgagatgaaaacatattaattaaacatgcaaattagagcatgctatctttaggtgatgcaatctatgtttccccctttttaagttagcaggactttttaaaaataaatattgctctaaactttaatatatcgaacgtgagagtggagctgcttagtggaagatgtaagtgaggtgggtgtcccatgtgcttggtctccccttctgctgttctcctgttcttcataatccactactgcagcagtccctgaaccactaaacttgttcctttcatttacaaaagagatacctgacatcctgagacactgagaaatgtcctgaagtcacacagctaatggcagaactggcactaggtccaaatcttgtgataatgaacaccgtaaggttagctagcttcctactttcccttgaatagtgcttttctccctatgtaatatcttttattatgatatttgtggtttagaaggcatattgagttattttgcagaatcataatggacccgcacaaaatctcagaaccatatctgttgacattttttctcatagaaatatcatggttaccccatttgttaatgagcattaatgttttctgaacacttccaaagattaatcaaacataaatattcattgtctgaaaatgtctttaagatacaattcagaggtccctatttcctttgtacatacacacttagaaagaaaagacagaaaaggaagaggaaggaaggaaatattttgagaatatattgagaagaattaagaaaactcttcaatgaagtgttaacaaccaaaccctacagacggtatcagaaacagcaaatagatattcctctaccctttcacagtgagtgagtgagtacagaagaatgctcatgatagttttgccttcattctactttctgtggacacagagtaatgaatatttaatgggacattaaatatgcccttcaaatctataattttactttggtaaacgagatttaacatgatgtcttttatgctcctaaaacatcttttttcaaactccattccttagaacattcttctactgagatgatccaagaccaaaagtgttctttggtacttgcttataaagtgatagtacatgttagcatataatgtattttgaagagtgaagtaaatgctattgataacagtaaaaaaaaaaaaaaaaactaataacagtaaagaaatgctacttgatttttttttaaactggattgctcagattacctgatcgtggtggaacccttttattaagaggaggggaaactttttactatcccatatttaactgttctataaagcaaagcacagcttgggtaatagcgttctgaaggatatacttctgtattttctcatagagtacaatttagtgattatgcttcatttcactatggaaatatgttactgaatctatcttcattttactgagttgaaataaggaaggcaaaaaactgacagctatggagtttgcgtgtacttccatactcgttaatgctctcatccacttattaaataatcatagagcacccatatcttgcttgccacaatatcgggtacaagagggaatacaaagatagataggtcctgccctcagggattttaaagtctaatttgggaatgggaatagggatgtgagtgtgtgggggaagagattaaattgacagataaaatacgaagtgggatgtcttgagttctgcatgacagtgggtttctaggataggtctgaaaattgctttcatttgcaacacatttagaaagtagctttatttggatattacagacaatctaaatatatcatcagtttttaaaagtgcctatgtgaagtgatttttaaaaagagcctatgtgaaggggtaatcttgcttgttcttgttactaatttctcatagattgtttttctgcatatataagaacgaaattatttatttactatggttgtacgtgcctcaaataaacaagaatgatatttcctgttttatttacttatgttgggtaaatatgcttattgaatttttaagagaggattttttaccatctccatttttcttgtcattatgttttgtagcttatttgagggtgtctaaatataatttcatattttattggttcaactttcactctgaagaaatccgtatgttagtacattttgaggtatttttcttgttcttgtgttgtttaactatgactcctaactgagtagtcttatatttcaattacaaaatacattttttaagaaagggaatagagcagcaaaaatgataaggaaaatgttaaaagttgtaatatttcctttactcttaacaggattatatatagaacatgctcacttacaaaaataggatgatgaagtttagagcataaggcaggcttcttgtatatacttatgctgtcaaatgttatattgtttttaatggagtcccattgtgtaatatttatttcttttacattttgttataagcaaaaaaaaaaaaaattctccttaggttatgttcagagtatcagtgttctttactccttacagatattttggctttggggtataatacaagacttgggaaaacactattatgaattttcagtactgtataaagtggtgatgggatttaaatgcagcatcactttctgaaaataagagaaacattatttgttgtcagtatttcagcatgaacttgttgccttgtaaattttgcctttaagtttgtaattggtacagattctgttgtatgctttcttctatgtctaaaatatttggcatgtcacatctagaattcttaatttatgttctgacttgagagttaagtgaaacatgactgtcgtgcactattttaggcatagcacttgcttttcatctttatactttcaattaactttgcattttaaatttccatgattgtatgaaaatagtaacctggttgcagtatctgaaaaaattaaaattagcttttatttaaaaatgaaaatctacaatagattcattaggttagaagttccagaataatttattattttattacacctactattgtagaattactaataaaacaaaacaaaactactcctattttcctggaattttgccaccatgtgacttattggggcagagaaaactcagggttgtctttgagtctgcacaaaagcaccagggaacctgcttagcaaatcgtctgaaaacagggagctgatgtttgccattatacaaagtttgagtaaacaacttaaaattgcttgttagggcatagtctttgattgaaataagtatgagaatgtatttggctaaataaatgtatttaaaatatacaaattttatttcccactggaaaattaagaaagtagcagtaccaaatgaataaaagctggcagttgatgtcttcaataatcattcctttaaaataaattcacaaacacatcattacaagctacttagaaatgtttagtattcgtatcttaaaatggcaccattgtggttttcaaagatattttaaacatcttttgtgaaacatactatttctgtttgacaatgctttgttctagctctgtgtgctgatacctacatggagtttttctgctattttagtgaaaacagtaattcttttatcttgagagctgcttctaaataacaaaaaagttaattggaatgtaagtttttaaaaaatgttaatattaaatagaatttttataatatgggcatttttcaaaacattttaatgaaaatatatagatatttgactttctttttttcatctagccttgctttatatttcattatttttctcactttttttcttaatattccctcactatctttcaacattatcattagttcctaattttaaaaataactcttatttaacttaaccgtctggaatttagccttctaatgaaagagaatcccttagtactctcagagattatataaagttattccaattttgtgtagatgacgaaaccaaggatcagagattaaatgactactagttactagcagaactcttatgaaagcctggtggtgacacccagcactgttccctgccatatccccaacttttactgattaaaaattaattcgcatgcatctaaacctaccttgaatgcacactaacgtaatgtgccattcaatgatgatgataaaatcccacttttctttgggtttctactaaaataatttactcactcagagtgaggtcaatgagaaaaactaaactaggctaagaaagagttgtagaatggttgttgagctaagtaggcaaccactggggtgctgataaaattaatggataaaatttaggaactgtgagagtatagaatttcttagtgcaagtaatgattagagaagcttcctgacatcccccaccctttctgtaaggactgttctttctctttgtaccttggaatgggggtgaaaggtgatttgatagctgaatttgggactatgtccagtgggatattatctaacttttctctctttctcttttttttcccctcagtttctcattagtttgtctttggcattcatcttcttttagtgcattaaaaaatgtttggcagatctcatcaatcccaagtcactctataattcctgtatttctttagttgtcgtttaacctgtccaaacttctacacaatgaacttcttaacaagattttaagttctctgtataagaggtttcacctcataacttctccagtaatccttcatttggcactatagagtatttgttaatggcagagatgatttttcttttaaaacctaaaaagactagctgttatttgtattctagcttttagctaacatataaagaatgtctacttttgctttaatgctaaattccgcttgagaaatagtaactgggaaagacaatttgaaatatatgccccataatgtgattgttaaatttatttctgctgttccataccattgctttgttttgcttttgacaaactaagccattatgctattagtttggaatataatactacagcaaaattaggtaacaatccctattttaaaattcccctaacaataatagaactgccagcatacttttctctttcagttgtagatgaatacattcgagagaatatgagctgtatttcatcctagattttaatattttcagatgtgactgtatttcctgatcattggtccaagttgtcctaaaagaaatttttctctccagacctaacagttttaactgcaagagtttactgtgggttatgttaatctgaattttaatagggccactaagaatctgagtgccttaggagattacccttatacccactgccatcacatccagtcaggcctgttgtgctctatataaatcttcccagctgaggggcaggtgcgggctaaaatccaactgcaattggctcccagacataattttatattttacagagaagcatcttattggcttatatgtgtttaaagaatggtctggcttatacatcttcagaaaatgagaattaaaaagtcaaaataattcttgacatctacagattgaacaaagaacttagaagaaataatactttatcttttcatcctggcattcctgagagaagagaaattgattgtttatcatgttggtttaatttttcaacccagacaatctgcagcaaggcacatggaccccaattttgatatcgtccatacagttttcattctatgcatggagctaattactgactttgcctgtaaagagaggattgtgtgcctaaattttgtctaacaaatgcaagcgtagaatgacatttactaatatttctatttcttccataggctaaataatagtaactaagtatttttaaggacacagccctttttttctctttatacaaaatgagagtatctgagccaaaatattaaattctagttcttttccgcaatgactagtgtcaagctcatgtactcttctgattctagactggagaagattattcaaacttgatctgtgtttcaggtttttaaatgtcctaaaaacagaaaattagattcagatctcaaaaaaggaattttggattgactttcaaagtactaatactaattatacttttcttttggtagcgtgactcttcttatacctaagaacatattacaaatgtcaaaaccattgcattttgacattgcaaaacatgccttgaactcttgaactactgtgaaaagaatcaccgttgtaaagactttttgtaagctagctgatactcttaagtatgtaaaaagattgtctttcagccgacaggcccaaaggaatgtatataaggaaggaatatgaaaaaataaattaggttttaaaataggaattgggcaataaactgtatcaaaaatatgtagatggattttagtagttgtaatttaaatgtggaaggtgaagagaatttcaaactccaaagagaaatgaatgatattcagatgtttcattaatttctagtctgtgaaaatatgcattttatagtaatatgtatagacttattttatttagaaataatagtgttttagaatttattaaaaactcagtgatagcctttataccaaaatgtttaactttaccaacagcaagtcataaaagtatttattttaaagctttttaatattatcgtgtaactttcatctgtcttcagatgtaaataattatctgcctaaatgttatatttttatgtatgcattttctgaaaatgtattgttttgtaaagtgggaaagataataaatcaagcacttcttgcacttgtttctgtgaagcatatagaactctattttaaataaaggaagatgtgtcgta

SEQ ID NO: 14 - DNA, 8613 bp, Homo sapiens
  source 1..8613: mol_type = genomic DNA
tacgacacatcttcctttatttaaaatagagttctatatgcttcacagaaacaagtgcaagaagtgcttgatttattatctttcccactttacaaaacaatacattttcagaaaatgcatacataaaaatataacatttaggcagataattatttacatctgaagacagatgaaagttacacgataatattaaaaagctttaaaataaatacttttatgacttgctgttggtaaagttaaacattttggtataaaggctatcactgagtttttaataaattctaaaacactattatttctaaataaaataagtctatacatattactataaaatgcatattttcacagactagaaattaatgaaacatctgaatatcattcatttctctttggagtttgaaattctcttcaccttccacatttaaattacaactactaaaatccatctacatatttttgatacagtttattgcccaattcctattttaaaacctaatttattttttcatattccttccttatatacattcctttgggcctgtcggctgaaagacaatctttttacatacttaagagtatcagctagcttacaaaaagtctttacaacggtgattcttttcacagtagttcaagagttcaaggcatgttttgcaatgtcaaaatgcaatggttttgacatttgtaatatgttcttaggtataagaagagtcacgctaccaaaagaaaagtataattagtattagtactttgaaagtcaatccaaaattccttttttgagatctgaatctaattttctgtttttaggacatttaaaaacctgaaacacagatcaagtttgaataatcttctccagtctagaatcagaagagtacatgagcttgacactagtcattgcggaaaagaactagaatttaatattttggctcagatactctcattttgtataaagagaaaaaaagggctgtgtccttaaaaatacttagttactattatttagcctatggaagaaatagaaatattagtaaatgtcattctacgcttgcatttgttagacaaaatttaggcacacaatcctctctttacaggcaaagtcagtaattagctccatgcatagaatgaaaactgtatggacgatatcaaaattggggtccatgtgccttgctgcagattgtctgggttgaaaaattaaaccaacatgataaacaatcaatttctcttctctcaggaatgccaggatgaaaagataaagtattatttcttctaagttctttgttcaatctgtagatgtcaagaattattttgactttttaattctcattttctgaagatgtataagccagaccattctttaaacacatataagccaataagatgcttctctgtaaaatataaaattatgtctgggagccaattgcagttggattttagcccgcacctgcccctcagctgggaagatttatatagagcacaacaggcctgactggatgtgatggcagtgggtataagggtaatctcctaaggcactcagattcttagtggccctattaaaattcagattaacataacccacagtaaactcttgcagttaaaactgttaggtctggagagaaaaatttcttttaggacaacttggaccaatgatcaggaaatacagtcacatctgaaaatattaaaatctaggatgaaatacagctcatattctctcgaatgtattcatctacaactgaaagagaaaagtatgctggcagttctattattgttaggggaattttaaaatagggattgttacctaattttgctgtagtattatattccaaactaatagcataatggcttagtttgtcaaaagcaaaacaaagcaatggtatggaacagcagaaataaatttaacaatcacattatggggcatatatttcaaattgtctttcccagttactatttctcaagcggaatttagcattaaagcaaaagtagacattctttatatgttagctaaaagctagaatacaaataacagctagtctttttaggttttaaaagaaaaatcatctctgccattaacaaatactctatagtgccaaatgaaggattactggagaagttatgaggtgaaacctcttatacagagaacttaaaatcttgttaagaagttcattgtgtagaagtttggacaggttaaacgacaactaaagaaatacaggaattatagagtgacttgggattgatgagatctgccaaacattttttaatgcactaaaagaagatgaatgccaaagacaaactaatgagaaactgaggggaaaaaaaagagaaagagagaaaagttagataatatcccactggacatagtcccaaattcagctatcaaatcacctttcacccccattccaaggtacaaagagaaagaacagtccttacagaaagggtgggggatgtcaggaagcttctctaatcattacttgcactaagaaattctatactctcacagttcctaaattttatccattaattttatcagcaccccagtggttgcctacttagctcaacaaccattctacaactctttcttagcctagtttagtttttctcattgacctcactctgagtgagtaaattattttagtagaaacccaaagaaaagtgggattttatcatcatcattgaatggcacattacgttagtgtgcattcaaggtaggtttagatgcatgcgaattaatttttaatcagtaaaagttggggatatggcagggaacagtgctgggtgtcaccaccaggctttcataagagttctgctagtaactagtagtcatttaatctctgatccttggtttcgtcatctacacaaaattggaataactttatataatctctgagagtactaagggattctctttcattagaaggctaaattccagacggttaagttaaataagagttatttttaaaattaggaactaatgataatgttgaaagatagtgagggaatattaagaaaaaaagtgagaaaaataatgaaatataaagcaaggctagatgaaaaaaagaaagtcaaatatctatatattttcattaaaatgttttgaaaaatgcccatattataaaaattctatttaatattaacattttttaaaaacttacattccaattaacttttttgttatttagaagcagctctcaagataaaagaattactgttttcactaaaatagcagaaaaactccatgtaggtatcagcacacagagctagaacaaagcattgtcaaacagaaatagtatgtttcacaaaagatgtttaaaatatctttgaaaaccacaatggtgccattttaagatacgaatactaaacatttctaagtagcttgtaatgatgtgtttgtgaatttattttaaaggaatgattattgaagacatcaactgccagcttttattcatttggtactgctactttcttaattttccagtgggaaataaaatttgtatattttaaatacatttatttagccaaatacattctcatacttatttcaatcaaagactatgccctaacaagcaattttaagttgtttactcaaactttgtataatggcaaacatcagctccctgttttcagacgatttgctaagcaggttccctggtgcttttgtgcagactcaaagacaaccctgagttttctctgccccaataagtcacatggtggcaaaattccaggaaaataggagtagttttgttttgttttattagtaattctacaatagtaggtgtaataaaataataaattattctggaacttctaacctaatgaatctattgtagattttcatttttaaataaaagctaattttaattttttcagatactgcaaccaggttactattttcatacaatcatggaaatttaaaatgcaaagttaattgaaagtataaagatgaaaagcaagtgctatgcctaaaatagtgcacgacagtcatgtttcacttaactctcaagtcagaacataaattaagaattctagatgtgacatgccaaatattttagacatagaagaaagcatacaacagaatctgtaccaattacaaacttaaaggcaaaatttacaaggcaacaagttcatgctgaaatactgacaacaaataatgtttctcttattttcagaaagtgatgctgcatttaaatcccatcaccactttatacagtactgaaaattcataatagtgttttcccaagtcttgtattataccccaaagccaaaatatctgtaaggagtaaagaacactgatactctgaacataacctaaggagaattttttttttttttgcttataacaaaatgtaaaagaaataaatattacacaatgggactccattaaaaacaatataacatttgacagcataagtatatacaagaagcctgccttatgctctaaacttcatcatcctatttttgtaagtgagcatgttctatatataatcctgttaagagtaaaggaaatattacaacttttaacattttccttatcatttttgctgctctattccctttcttaaaaaatgtattttgtaattgaaatataagactactcagttaggagtcatagttaaacaacacaagaacaagaaaaatacctcaaaatgtactaacatacggatttcttcagagtgaaagttgaaccaataaaatatgaaattatatttagacaccctcaaataagctacaaaacataatgacaagaaaaatggagatggtaaaaaatcctctcttaaaaattcaataagcatatttacccaacataagtaaataaaacaggaaatatcattcttgtttatttgaggcacgtacaaccatagtaaataaataatttcgttcttatatatgcagaaaaacaatctatgagaaattagtaacaagaacaagcaagattaccccttcacataggctctttttaaaaatcacttcacataggcacttttaaaaactgatgatatatttagattgtctgtaatatccaaataaagctactttctaaatgtgttgcaaatgaaagcaattttcagacctatcctagaaacccactgtcatgcagaactcaagacatcccacttcgtattttatctgtcaatttaatctcttcccccacacactcacatccctattcccattcccaaattagactttaaaatccctgagggcaggacctatctatctttgtattccctcttgtacccgatattgtggcaagcaagatatgggtgctctatgattatttaataagtggatgagagcattaacgagtatggaagtacacgcaaactccatagctgtcagttttttgccttccttatttcaactcagtaaaatgaagatagattcagtaacatatttccatagtgaaatgaagcataatcactaaattgtactctatgagaaaatacagaagtatatccttcagaacgctattacccaagctgtgctttgctttatagaacagttaaatatgggatagtaaaaagtttcccctcctcttaataaaagggttccaccacgatcaggtaatctgagcaatccagtttaaaaaaaaatcaagtagcatttctttactgttattagtttttttttttttttttactgttatcaatagcatttacttcactcttcaaaatacattatatgctaacatgtactatcactttataagcaagtaccaaagaacacttttggtcttggatcatctcagtagaagaatgttctaaggaatggagtttgaaaaaagatgttttaggagcataaaagacatcatgttaaatctcgtttaccaaagtaaaattatagatttgaagggcatatttaatgtcccattaaatattcattactctgtgtccacagaaagtagaatgaaggcaaaactatcatgagcattcttctgtactcactcactcactgtgaaagggtagaggaatatctatttgctgtttctgataccgtctgtagggtttggttgttaacacttcattgaagagttttcttaattcttctcaatatattctcaaaatatttccttccttcctcttccttttctgtcttttctttctaagtgtgtatgtacaaaggaaatagggacctctgaattgtatcttaaagacattttcagacaatgaatatttatgtttgattaatctttggaagtgttcagaaaacattaatgctcattaacaaatggggtaaccatgatatttctatgagaaaaaatgtcaacagatatggttctgagattttgtgcgggtccattatgattctgcaaaataactcaatatgccttctaaaccacaaatatcataataaaagatattacatagggagaaaagcactattcaagggaaagtaggaagctagctaaccttacggtgttcattatcacaagatttggacctagtgccagttctgccattagctgtgtgacttcaggacatttctcagtgtctcaggatgtcaggtatctcttttgtaaatgaaaggaacaagtttagtggttcagggactgctgcagtagtggattatgaagaacaggagaacagcagaaggggagaccaagcacatgggacacccacctcacttacatcttccactaagcagctccactctcacgttcgatatattaaagtttagagcaatatttatttttaaaaagtcctgctaacttaaaaagggggaaacatagattgcatcacctaaagatagcatgctctaatttgcatgtttaattaatatgttttcatctcagaaaaaaatgtttttacatcttttcctgttcattcatgtgctcttggttcaagtaaaataaaaacttaatgactataacatttttatagagcttattttatacttttgtaatatatttcttccttattaaataaaaagatgagttgaggtgttgctttcaaaataaaattaaacataacatagagattggatgaagtcaactcctgcccatgcttaactttagagttatcttttcatgctgccttatgggcacttaaatactgtactgtcttatctttgaggtagaacaaaaaaaaaatggcaaaaacattcacataaaggggaaaatggaaaagaaagctatgagagatttctttttaacataattatcatcattaggctttgcagtcttctttgacacaaagttgagatatagtcttcttaatacgaagagcagttaggcgggccgctccgttggcataccaacactcacgcattattctccccatgactcggagtgcttcacaactttgccactggtttgggatacttggtcgaaacttctggtcacaaacaacctttctcatttcctctatcgagggatctgaaggcaccatgtcataataaggcaattggtactcctcaacaattcctccgactgaacacctccgggctatttcccagtaaaccagaccaacagaatagatgtcagctcgtttgaaggactcaaagatattcacattcattgtatcatcaagcatttcaggagccatatacctcttggttcccactttaggattctgaggtatgtcgatagtgttcagtattgaatcatgcttcacagccaaccctaagtccgctatggcacaagtttcacactttttcactaagatattctttgattttatgtctcgatgagcaatagcaggtttaccttgtgtaccaacaatctccatatgaaggtgtgccagaccactagcaattgagagcgccagcttgatcattccagccacggtcactatatttctattcaaatagtcatataaggagccctgttcatgatattcagataccagccaaagttgagtccaagttccattatctttgttgtcagcagcaatgaaaccaaggatgttttcatgtcgcagcatgaccgtctggtaaatttctgcctcacgaaaccaagatctttcatctctggaggagaatattttcacagccacatcttccccacaccatcttccatgccacacctcaccaaatctaccttttcctactatttcctgaagcacaatcgtccttgcaattgtcctttgaaccaacagaggtagacctgttggaaggtgcagtgttatgttgttgcaaaaatctgtgaagcagcattcggttttggtaacattgttggaactatgacagaagacttgagcattcagttctggaagggagacacaggatttgatcacctgctcttttccattggttagcatgactgatgcccaacatgctccttctgtttggcaggtgaagtttgaagaatcacacaaaagacatacacacttcagtcctggcgagagctcggcggccgctgcgagcagcaggagagcctggcggagcgctgagcagagcgcccgggtcatcgccaccaggcggccgcgccggggctgcgaggccccagagcagagcgaggcagccggggcagcacggcccgctttgaagttcccgggccgcgggaggggagcgcggcaccgacacccttttgaagtgcgcggttggctctagtcagtgtgggcgcccccctccccggccgcccccatcccacgccccctgcggctggcggtgcgcggcgctcctgccact

SEQ ID NO: 15 - DNA, 8382 bp, Homo sapiens
  source 1..8382: mol_type = genomic DNA
agtggcaggagcgccgcgcaccgccagccgcagggggcgtgggatgggggcggccggggaggggggcgcccacactgactagagccaaccgcgcacttcaaaagggtgtcggtgccgcgctcccctcccgcggcccgggaacttcaaagcgggccgtgctgccccggctgcctcgctctgctctggggcctcgcagccccggcgcggccgcctggtggcgatgacccgggcgctctgctcagcgctccgccaggctctcctgctgctcgcagcggccgccgagctctcgccaggactgaagtgtgtatgtcttttgtgtgattcttcaaacttcacctgccaaacagaaggagcatgttgggcatcagtcatgctaaccaatggaaaagagcaggtgatcaaatcctgtgtctcccttccagaactgaatgctcaagtcttctgtcatagttccaacaatgttaccaaaaccgaatgctgcttcacagatttttgcaacaacataacactgcaccttccaacagataatggaacttggactcaactttggctggtatctgaatatcatgaacagggctccttatatgactatttgaatagaaatatagtgaccgtggctggaatgatcaagctggcgctctcaattgctagtggtctggcacaccttcatatggagattgttggtacacaaggtaaacctgctattgctcatcgagacataaaatcaaagaatatcttagtgaaaaagtgtgaaacttgtgccatagcggacttagggttggctgtgaagcatgattcaatactgaacactatcgacatacctcagaatcctaaagtgggaaccaagaggtatatggctcctgaaatgcttgatgatacaatgaatgtgaatatctttgagtccttcaaacgagctgacatctattctgttggtctggtttactgggaaatagcccggaggtgttcagtcggaggaattgttgaggagtaccaattgccttattatgacatggtgccttcagatccctcgatagaggaaatgagaaaggttgtttgtgaccagaagtttcgaccaagtatcccaaaccagtggcaaagttgtgaagcactccgagtcatggggagaataatgcgtgagtgttggtatgccaacggagcggcccgcctaactgctcttcgtattaagaagactatatctcaactttgtgtcaaagaagactgcaaagcctaatgatgataattatgttaaaaagaaatctctcatagctttcttttccattttcccctttatgtgaatgtttttgccattttttttttgttctacctcaaagataagacagtacagtatttaagtgcccataaggcagcatgaaaagataactctaaagttaagcatgggcaggagttgacttcatccaatctctatgttatgtttaattttattttgaaagcaacacctcaactcatctttttatttaataaggaagaaatatattacaaaagtataaaataagctctataaaaatgttatagtcattaagtttttattttacttgaaccaagagcacatgaatgaacaggaaaagatgtaaaaacatttttttctgagatgaaaacatattaattaaacatgcaaattagagcatgctatctttaggtgatgcaatctatgtttccccctttttaagttagcaggactttttaaaaataaatattgctctaaactttaatatatcgaacgtgagagtggagctgcttagtggaagatgtaagtgaggtgggtgtcccatgtgcttggtctccccttctgctgttctcctgttcttcataatccactactgcagcagtccctgaaccactaaacttgttcctttcatttacaaaagagatacctgacatcctgagacactgagaaatgtcctgaagtcacacagctaatggcagaactggcactaggtccaaatcttgtgataatgaacaccgtaaggttagctagcttcctactttcccttgaatagtgcttttctccctatgtaatatcttttattatgatatttgtggtttagaaggcatattgagttattttgcagaatcataatggacccgcacaaaatctcagaaccatatctgttgacattttttctcatagaaatatcatggttaccccatttgttaatgagcattaatgttttctgaacacttccaaagattaatcaaacataaatattcattgtctgaaaatgtctttaagatacaattcagaggtccctatttcctttgtacatacacacttagaaagaaaagacagaaaaggaagaggaaggaaggaaatattttgagaatatattgagaagaattaagaaaactcttcaatgaagtgttaacaaccaaaccctacagacggtatcagaaacagcaaatagatattcctctaccctttcacagtgagtgagtgagtacagaagaatgctcatgatagttttgccttcattctactttctgtggacacagagtaatgaatatttaatgggacattaaatatgcccttcaaatctataattttactttggtaaacgagatttaacatgatgtcttttatgctcctaaaacatcttttttcaaactccattccttagaacattcttctactgagatgatccaagaccaaaagtgttctttggtacttgcttataaagtgatagtacatgttagcatataatgtattttgaagagtgaagtaaatgctattgataacagtaaaaaaaaaaaaaaaaactaataacagtaaagaaatgctacttgatttttttttaaactggattgctcagattacctgatcgtggtggaacccttttattaagaggaggggaaactttttactatcccatatttaactgttctataaagcaaagcacagcttgggtaatagcgttctgaaggatatacttctgtattttctcatagagtacaatttagtgattatgcttcatttcactatggaaatatgttactgaatctatcttcattttactgagttgaaataaggaaggcaaaaaactgacagctatggagtttgcgtgtacttccatactcgttaatgctctcatccacttattaaataatcatagagcacccatatcttgcttgccacaatatcgggtacaagagggaatacaaagatagataggtcctgccctcagggattttaaagtctaatttgggaatgggaatagggatgtgagtgtgtgggggaagagattaaattgacagataaaatacgaagtgggatgtcttgagttctgcatgacagtgggtttctaggataggtctgaaaattgctttcatttgcaacacatttagaaagtagctttatttggatattacagacaatctaaatatatcatcagtttttaaaagtgcctatgtgaagtgatttttaaaaagagcctatgtgaaggggtaatcttgcttgttcttgttactaatttctcatagattgtttttctgcatatataagaacgaaattatttatttactatggttgtacgtgcctcaaataaacaagaatgatatttcctgttttatttacttatgttgggtaaatatgcttattgaatttttaagagaggattttttaccatctccatttttcttgtcattatgttttgtagcttatttgagggtgtctaaatataatttcatattttattggttcaactttcactctgaagaaatccgtatgttagtacattttgaggtatttttcttgttcttgtgttgtttaactatgactcctaactgagtagtcttatatttcaattacaaaatacattttttaagaaagggaatagagcagcaaaaatgataaggaaaatgttaaaagttgtaatatttcctttactcttaacaggattatatatagaacatgctcacttacaaaaataggatgatgaagtttagagcataaggcaggcttcttgtatatacttatgctgtcaaatgttatattgtttttaatggagtcccattgtgtaatatttatttcttttacattttgttataagcaaaaaaaaaaaaaattctccttaggttatgttcagagtatcagtgttctttactccttacagatattttggctttggggtataatacaagacttgggaaaacactattatgaattttcagtactgtataaagtggtgatgggatttaaatgcagcatcactttctgaaaataagagaaacattatttgttgtcagtatttcagcatgaacttgttgccttgtaaattttgcctttaagtttgtaattggtacagattctgttgtatgctttcttctatgtctaaaatatttggcatgtcacatctagaattcttaatttatgttctgacttgagagttaagtgaaacatgactgtcgtgcactattttaggcatagcacttgcttttcatctttatactttcaattaactttgcattttaaatttccatgattgtatgaaaatagtaacctggttgcagtatctgaaaaaattaaaattagcttttatttaaaaatgaaaatctacaatagattcattaggttagaagttccagaataatttattattttattacacctactattgtagaattactaataaaacaaaacaaaactactcctattttcctggaattttgccaccatgtgacttattggggcagagaaaactcagggttgtctttgagtctgcacaaaagcaccagggaacctgcttagcaaatcgtctgaaaacagggagctgatgtttgccattatacaaagtttgagtaaacaacttaaaattgcttgttagggcatagtctttgattgaaataagtatgagaatgtatttggctaaataaatgtatttaaaatatacaaattttatttcccactggaaaattaagaaagtagcagtaccaaatgaataaaagctggcagttgatgtcttcaataatcattcctttaaaataaattcacaaacacatcattacaagctacttagaaatgtttagtattcgtatcttaaaatggcaccattgtggttttcaaagatattttaaacatcttttgtgaaacatactatttctgtttgacaatgctttgttctagctctgtgtgctgatacctacatggagtttttctgctattttagtgaaaacagtaattcttttatcttgagagctgcttctaaataacaaaaaagttaattggaatgtaagtttttaaaaaatgttaatattaaatagaatttttataatatgggcatttttcaaaacattttaatgaaaatatatagatatttgactttctttttttcatctagccttgctttatatttcattatttttctcactttttttcttaatattccctcactatctttcaacattatcattagttcctaattttaaaaataactcttatttaacttaaccgtctggaatttagccttctaatgaaagagaatcccttagtactctcagagattatataaagttattccaattttgtgtagatgacgaaaccaaggatcagagattaaatgactactagttactagcagaactcttatgaaagcctggtggtgacacccagcactgttccctgccatatccccaacttttactgattaaaaattaattcgcatgcatctaaacctaccttgaatgcacactaacgtaatgtgccattcaatgatgatgataaaatcccacttttctttgggtttctactaaaataatttactcactcagagtgaggtcaatgagaaaaactaaactaggctaagaaagagttgtagaatggttgttgagctaagtaggcaaccactggggtgctgataaaattaatggataaaatttaggaactgtgagagtatagaatttcttagtgcaagtaatgattagagaagcttcctgacatcccccaccctttctgtaaggactgttctttctctttgtaccttggaatgggggtgaaaggtgatttgatagctgaatttgggactatgtccagtgggatattatctaacttttctctctttctcttttttttcccctcagtttctcattagtttgtctttggcattcatcttcttttagtgcattaaaaaatgtttggcagatctcatcaatcccaagtcactctataattcctgtatttctttagttgtcgtttaacctgtccaaacttctacacaatgaacttcttaacaagattttaagttctctgtataagaggtttcacctcataacttctccagtaatccttcatttggcactatagagtatttgttaatggcagagatgatttttcttttaaaacctaaaaagactagctgttatttgtattctagcttttagctaacatataaagaatgtctacttttgctttaatgctaaattccgcttgagaaatagtaactgggaaagacaatttgaaatatatgccccataatgtgattgttaaatttatttctgctgttccataccattgctttgttttgcttttgacaaactaagccattatgctattagtttggaatataatactacagcaaaattaggtaacaatccctattttaaaattcccctaacaataatagaactgccagcatacttttctctttcagttgtagatgaatacattcgagagaatatgagctgtatttcatcctagattttaatattttcagatgtgactgtatttcctgatcattggtccaagttgtcctaaaagaaatttttctctccagacctaacagttttaactgcaagagtttactgtgggttatgttaatctgaattttaatagggccactaagaatctgagtgccttaggagattacccttatacccactgccatcacatccagtcaggcctgttgtgctctatataaatcttcccagctgaggggcaggtgcgggctaaaatccaactgcaattggctcccagacataattttatattttacagagaagcatcttattggcttatatgtgtttaaagaatggtctggcttatacatcttcagaaaatgagaattaaaaagtcaaaataattcttgacatctacagattgaacaaagaacttagaagaaataatactttatcttttcatcctggcattcctgagagaagagaaattgattgtttatcatgttggtttaatttttcaacccagacaatctgcagcaaggcacatggaccccaattttgatatcgtccatacagttttcattctatgcatggagctaattactgactttgcctgtaaagagaggattgtgtgcctaaattttgtctaacaaatgcaagcgtagaatgacatttactaatatttctatttcttccataggctaaataatagtaactaagtatttttaaggacacagccctttttttctctttatacaaaatgagagtatctgagccaaaatattaaattctagttcttttccgcaatgactagtgtcaagctcatgtactcttctgattctagactggagaagattattcaaacttgatctgtgtttcaggtttttaaatgtcctaaaaacagaaaattagattcagatctcaaaaaaggaattttggattgactttcaaagtactaatactaattatacttttcttttggtagcgtgactcttcttatacctaagaacatattacaaatgtcaaaaccattgcattttgacattgcaaaacatgccttgaactcttgaactactgtgaaaagaatcaccgttgtaaagactttttgtaagctagctgatactcttaagtatgtaaaaagattgtctttcagccgacaggcccaaaggaatgtatataaggaaggaatatgaaaaaataaattaggttttaaaataggaattgggcaataaactgtatcaaaaatatgtagatggattttagtagttgtaatttaaatgtggaaggtgaagagaatttcaaactccaaagagaaatgaatgatattcagatgtttcattaatttctagtctgtgaaaatatgcattttatagtaatatgtatagacttattttatttagaaataatagtgttttagaatttattaaaaactcagtgatagcctttataccaaaatgtttaactttaccaacagcaagtcataaaagtatttattttaaagctttttaatattatcgtgtaactttcatctgtcttcagatgtaaataattatctgcctaaatgttatatttttatgtatgcattttctgaaaatgtattgttttgtaaagtgggaaagataataaatcaagcacttcttgcacttgtttctgtgaagcatatagaactctattttaaataaaggaagatgtgtcgta

SEQ ID NO: 16 - DNA, 8382 bp, Homo sapiens
  source 1..8382: mol_type = genomic DNA
tacgacacatcttcctttatttaaaatagagttctatatgcttcacagaaacaagtgcaagaagtgcttgatttattatctttcccactttacaaaacaatacattttcagaaaatgcatacataaaaatataacatttaggcagataattatttacatctgaagacagatgaaagttacacgataatattaaaaagctttaaaataaatacttttatgacttgctgttggtaaagttaaacattttggtataaaggctatcactgagtttttaataaattctaaaacactattatttctaaataaaataagtctatacatattactataaaatgcatattttcacagactagaaattaatgaaacatctgaatatcattcatttctctttggagtttgaaattctcttcaccttccacatttaaattacaactactaaaatccatctacatatttttgatacagtttattgcccaattcctattttaaaacctaatttattttttcatattccttccttatatacattcctttgggcctgtcggctgaaagacaatctttttacatacttaagagtatcagctagcttacaaaaagtctttacaacggtgattcttttcacagtagttcaagagttcaaggcatgttttgcaatgtcaaaatgcaatggttttgacatttgtaatatgttcttaggtataagaagagtcacgctaccaaaagaaaagtataattagtattagtactttgaaagtcaatccaaaattccttttttgagatctgaatctaattttctgtttttaggacatttaaaaacctgaaacacagatcaagtttgaataatcttctccagtctagaatcagaagagtacatgagcttgacactagtcattgcggaaaagaactagaatttaatattttggctcagatactctcattttgtataaagagaaaaaaagggctgtgtccttaaaaatacttagttactattatttagcctatggaagaaatagaaatattagtaaatgtcattctacgcttgcatttgttagacaaaatttaggcacacaatcctctctttacaggcaaagtcagtaattagctccatgcatagaatgaaaactgtatggacgatatcaaaattggggtccatgtgccttgctgcagattgtctgggttgaaaaattaaaccaacatgataaacaatcaatttctcttctctcaggaatgccaggatgaaaagataaagtattatttcttctaagttctttgttcaatctgtagatgtcaagaattattttgactttttaattctcattttctgaagatgtataagccagaccattctttaaacacatataagccaataagatgcttctctgtaaaatataaaattatgtctgggagccaattgcagttggattttagcccgcacctgcccctcagctgggaagatttatatagagcacaacaggcctgactggatgtgatggcagtgggtataagggtaatctcctaaggcactcagattcttagtggccctattaaaattcagattaacataacccacagtaaactcttgcagttaaaactgttaggtctggagagaaaaatttcttttaggacaacttggaccaatgatcaggaaatacagtcacatctgaaaatattaaaatctaggatgaaatacagctcatattctctcgaatgtattcatctacaactgaaagagaaaagtatgctggcagttctattattgttaggggaattttaaaatagggattgttacctaattttgctgtagtattatattccaaactaatagcataatggcttagtttgtcaaaagcaaaacaaagcaatggtatggaacagcagaaataaatttaacaatcacattatggggcatatatttcaaattgtctttcccagttactatttctcaagcggaatttagcattaaagcaaaagtagacattctttatatgttagctaaaagctagaatacaaataacagctagtctttttaggttttaaaagaaaaatcatctctgccattaacaaatactctatagtgccaaatgaaggattactggagaagttatgaggtgaaacctcttatacagagaacttaaaatcttgttaagaagttcattgtgtagaagtttggacaggttaaacgacaactaaagaaatacaggaattatagagtgacttgggattgatgagatctgccaaacattttttaatgcactaaaagaagatgaatgccaaagacaaactaatgagaaactgaggggaaaaaaaagagaaagagagaaaagttagataatatcccactggacatagtcccaaattcagctatcaaatcacctttcacccccattccaaggtacaaagagaaagaacagtccttacagaaagggtgggggatgtcaggaagcttctctaatcattacttgcactaagaaattctatactctcacagttcctaaattttatccattaattttatcagcaccccagtggttgcctacttagctcaacaaccattctacaactctttcttagcctagtttagtttttctcattgacctcactctgagtgagtaaattattttagtagaaacccaaagaaaagtgggattttatcatcatcattgaatggcacattacgttagtgtgcattcaaggtaggtttagatgcatgcgaattaatttttaatcagtaaaagttggggatatggcagggaacagtgctgggtgtcaccaccaggctttcataagagttctgctagtaactagtagtcatttaatctctgatccttggtttcgtcatctacacaaaattggaataactttatataatctctgagagtactaagggattctctttcattagaaggctaaattccagacggttaagttaaataagagttatttttaaaattaggaactaatgataatgttgaaagatagtgagggaatattaagaaaaaaagtgagaaaaataatgaaatataaagcaaggctagatgaaaaaaagaaagtcaaatatctatatattttcattaaaatgttttgaaaaatgcccatattataaaaattctatttaatattaacattttttaaaaacttacattccaattaacttttttgttatttagaagcagctctcaagataaaagaattactgttttcactaaaatagcagaaaaactccatgtaggtatcagcacacagagctagaacaaagcattgtcaaacagaaatagtatgtttcacaaaagatgtttaaaatatctttgaaaaccacaatggtgccattttaagatacgaatactaaacatttctaagtagcttgtaatgatgtgtttgtgaatttattttaaaggaatgattattgaagacatcaactgccagcttttattcatttggtactgctactttcttaattttccagtgggaaataaaatttgtatattttaaatacatttatttagccaaatacattctcatacttatttcaatcaaagactatgccctaacaagcaattttaagttgtttactcaaactttgtataatggcaaacatcagctccctgttttcagacgatttgctaagcaggttccctggtgcttttgtgcagactcaaagacaaccctgagttttctctgccccaataagtcacatggtggcaaaattccaggaaaataggagtagttttgttttgttttattagtaattctacaatagtaggtgtaataaaataataaattattctggaacttctaacctaatgaatctattgtagattttcatttttaaataaaagctaattttaattttttcagatactgcaaccaggttactattttcatacaatcatggaaatttaaaatgcaaagttaattgaaagtataaagatgaaaagcaagtgctatgcctaaaatagtgcacgacagtcatgtttcacttaactctcaagtcagaacataaattaagaattctagatgtgacatgccaaatattttagacatagaagaaagcatacaacagaatctgtaccaattacaaacttaaaggcaaaatttacaaggcaacaagttcatgctgaaatactgacaacaaataatgtttctcttattttcagaaagtgatgctgcatttaaatcccatcaccactttatacagtactgaaaattcataatagtgttttcccaagtcttgtattataccccaaagccaaaatatctgtaaggagtaaagaacactgatactctgaacataacctaaggagaattttttttttttttgcttataacaaaatgtaaaagaaataaatattacacaatgggactccattaaaaacaatataacatttgacagcataagtatatacaagaagcctgccttatgctctaaacttcatcatcctatttttgtaagtgagcatgttctatatataatcctgttaagagtaaaggaaatattacaacttttaacattttccttatcatttttgctgctctattccctttcttaaaaaatgtattttgtaattgaaatataagactactcagttaggagtcatagttaaacaacacaagaacaagaaaaatacctcaaaatgtactaacatacggatttcttcagagtgaaagttgaaccaataaaatatgaaattatatttagacaccctcaaataagctacaaaacataatgacaagaaaaatggagatggtaaaaaatcctctcttaaaaattcaataagcatatttacccaacataagtaaataaaacaggaaatatcattcttgtttatttgaggcacgtacaaccatagtaaataaataatttcgttcttatatatgcagaaaaacaatctatgagaaattagtaacaagaacaagcaagattaccccttcacataggctctttttaaaaatcacttcacataggcacttttaaaaactgatgatatatttagattgtctgtaatatccaaataaagctactttctaaatgtgttgcaaatgaaagcaattttcagacctatcctagaaacccactgtcatgcagaactcaagacatcccacttcgtattttatctgtcaatttaatctcttcccccacacactcacatccctattcccattcccaaattagactttaaaatccctgagggcaggacctatctatctttgtattccctcttgtacccgatattgtggcaagcaagatatgggtgctctatgattatttaataagtggatgagagcattaacgagtatggaagtacacgcaaactccatagctgtcagttttttgccttccttatttcaactcagtaaaatgaagatagattcagtaacatatttccatagtgaaatgaagcataatcactaaattgtactctatgagaaaatacagaagtatatccttcagaacgctattacccaagctgtgctttgctttatagaacagttaaatatgggatagtaaaaagtttcccctcctcttaataaaagggttccaccacgatcaggtaatctgagcaatccagtttaaaaaaaaatcaagtagcatttctttactgttattagtttttttttttttttttactgttatcaatagcatttacttcactcttcaaaatacattatatgctaacatgtactatcactttataagcaagtaccaaagaacacttttggtcttggatcatctcagtagaagaatgttctaaggaatggagtttgaaaaaagatgttttaggagcataaaagacatcatgttaaatctcgtttaccaaagtaaaattatagatttgaagggcatatttaatgtcccattaaatattcattactctgtgtccacagaaagtagaatgaaggcaaaactatcatgagcattcttctgtactcactcactcactgtgaaagggtagaggaatatctatttgctgtttctgataccgtctgtagggtttggttgttaacacttcattgaagagttttcttaattcttctcaatatattctcaaaatatttccttccttcctcttccttttctgtcttttctttctaagtgtgtatgtacaaaggaaatagggacctctgaattgtatcttaaagacattttcagacaatgaatatttatgtttgattaatctttggaagtgttcagaaaacattaatgctcattaacaaatggggtaaccatgatatttctatgagaaaaaatgtcaacagatatggttctgagattttgtgcgggtccattatgattctgcaaaataactcaatatgccttctaaaccacaaatatcataataaaagatattacatagggagaaaagcactattcaagggaaagtaggaagctagctaaccttacggtgttcattatcacaagatttggacctagtgccagttctgccattagctgtgtgacttcaggacatttctcagtgtctcaggatgtcaggtatctcttttgtaaatgaaaggaacaagtttagtggttcagggactgctgcagtagtggattatgaagaacaggagaacagcagaaggggagaccaagcacatgggacacccacctcacttacatcttccactaagcagctccactctcacgttcgatatattaaagtttagagcaatatttatttttaaaaagtcctgctaacttaaaaagggggaaacatagattgcatcacctaaagatagcatgctctaatttgcatgtttaattaatatgttttcatctcagaaaaaaatgtttttacatcttttcctgttcattcatgtgctcttggttcaagtaaaataaaaacttaatgactataacatttttatagagcttattttatacttttgtaatatatttcttccttattaaataaaaagatgagttgaggtgttgctttcaaaataaaattaaacataacatagagattggatgaagtcaactcctgcccatgcttaactttagagttatcttttcatgctgccttatgggcacttaaatactgtactgtcttatctttgaggtagaacaaaaaaaaaatggcaaaaacattcacataaaggggaaaatggaaaagaaagctatgagagatttctttttaacataattatcatcattaggctttgcagtcttctttgacacaaagttgagatatagtcttcttaatacgaagagcagttaggcgggccgctccgttggcataccaacactcacgcattattctccccatgactcggagtgcttcacaactttgccactggtttgggatacttggtcgaaacttctggtcacaaacaacctttctcatttcctctatcgagggatctgaaggcaccatgtcataataaggcaattggtactcctcaacaattcctccgactgaacacctccgggctatttcccagtaaaccagaccaacagaatagatgtcagctcgtttgaaggactcaaagatattcacattcattgtatcatcaagcatttcaggagccatatacctcttggttcccactttaggattctgaggtatgtcgatagtgttcagtattgaatcatgcttcacagccaaccctaagtccgctatggcacaagtttcacactttttcactaagatattctttgattttatgtctcgatgagcaatagcaggtttaccttgtgtaccaacaatctccatatgaaggtgtgccagaccactagcaattgagagcgccagcttgatcattccagccacggtcactatatttctattcaaatagtcatataaggagccctgttcatgatattcagataccagccaaagttgagtccaagttccattatctgttggaaggtgcagtgttatgttgttgcaaaaatctgtgaagcagcattcggttttggtaacattgttggaactatgacagaagacttgagcattcagttctggaagggagacacaggatttgatcacctgctcttttccattggttagcatgactgatgcccaacatgctccttctgtttggcaggtgaagtttgaagaatcacacaaaagacatacacacttcagtcctggcgagagctcggcggccgctgcgagcagcaggagagcctggcggagcgctgagcagagcgcccgggtcatcgccaccaggcggccgcgccggggctgcgaggccccagagcagagcgaggcagccggggcagcacggcccgctttgaagttcccgggccgcgggaggggagcgcggcaccgacacccttttgaagtgcgcggttggctctagtcagtgtgggcgcccccctccccggccgcccccatcccacgccccctgcggctggcggtgcgcggcgctcctgccact

SEQ ID NO: 17 - DNA, 9033 bp, Mus musculus
  source 1..9033: mol_type = genomic DNA
gccccgggaacttcaaagcggcccgcgctgcgggctgcgctctgggaccccgaagccttgcaccgccgccgggtggccatgaccccagcgcgcggctccgcactgagcctggccctcctgctggtggccctggccgccgaccttgcggcaggactgaagtgtgtgtgtcttttgtgtgattcttcaaacttcacctgccaaacggaaggagcatgttgggcctccgtcatgctaaccaacgggaaagagcaggtgatcaaatcgtgtgtgtccctcccggaactaaatgctcaggtcttctgtcacagttccaacaacgtgaccaaaaccgaatgttgcttcacagacttctgcaacaatatcacactgcaccttcccacagcatcgccaaatgcccctcgacttggtcccacagagctgacggttgttatcaccgtgccggtttgcctcctgtccatagccgccatgctaacaatatgggcgtgccaggaccgccagtgcacatacaggaagactaagagacacaacgtggaggaagcgctggctgagtacagccttgtgaatgcaggaaaaacactcaaggatctgatctacgatgctactgcctctggctcaggctctggtctgcctctcttggttcaaagaacaatcgcaaggacaattgtacttcaagaaatcgtaggaaaaggtcggtttggggaagtgtggcacggaagatggtgtggagaagatgtggctgtgaaaatattctcctccagggatgagagatcttggttccgtgaggcggaaatttatcagacggtgatgctgagacacgagaacatcctcggtttcatcgcagctgacaacaaagataatggaacttggacacaactctggcttgtgtcagagtatcacgagcagggctccttgtatgactatttgaacagaaacatagtgactgtggctggaatggtcaagctggcgctttccatagcgagtggtctggctcacctgcacatggagatcgtgggtactcaaggtaagcctgctattgctcaccgagatataaagtcaaagaatatcctagtcaaaaaatgtgacacttgtgccatagctgacttagggctggctgtgaagcacgattctatcatgaacactatagacataccccagaatcctaaagtgggaaccaagaggtacatggctcccgaaatgcttgatgatacaatgaacctgagcatctttgagtccttcaagcgagctgacatctattcggtggggctggtttactgggaaatagctcgaaggtgttcagttggaggagttgttgaggagtaccagttgccttactatgacatggtgccttcagatccttcgatagaagaaatgaggaaggttgtctgtgatcagaaactccgaccaaatctcccaaaccagtggcaaagctgtgaagcgctgcgggtcatgggaagaataatgcgtgagtgctggtacgccaacggggcagcacgcctgacagccctgcgcgtgaagaagaccatctcccagctgtgtgtcaaggaagactgtaaagcttagctctgcgtacaggcaaaggaagagtgctcacagctttccttcccgtctcccgctttgtgtaaatgtttttgcttcttttctgctgtgttttattttagttctacctcaaggatgactcactacagtgttgaagtgtcccaaaggcagcatgtaaagataacgctaaagttaagcatgggcaggtcttgactttcccagtttccatgttgtccttagttttatgtttaaaggggacacgactcgttttttctttttatttaaggaggaagatgttatgagtataagataagctacatacaatggtaaaaaaaatattaaatttttgttgtacttgaaccaagagcatccacaaatgagatgaagacatatttaaaatgtgaactactgtatattatggtgaaatggaactgtaaaaattaactgggtccttaaaaagtaaattttgctcagaattttaacatctaaagagtggaaaggtggagtaacaaagtgacaccacgttctcaggacttgctttctctgcctatttgccactctgcatcactacgacagctgtccctaagtagttcgaaaaccacctgagccattactcctcctgatacataacagaggtccatatgtctcaaacactgtgaaatggcccagagtcacagagctcttgccagagctggttacgaaccctgtgacaactagcactgtgaagtttgctggccattatactcccttgaattcccatagagcgtttcttcccaagtgggaagatcaatcatcagttataatattttaaatttagtcacatagtgaatgcattgagtattttgtaagaccataatagattttctagaatttcagaaccaatctattagaatttcatcaaagaaatgtcatcattatcccattcgataatgaaaaaaaatgttttctgaacattgccaaatattgaccaattataaacatccattttctaaagatgtatgtcataagatgtcattgcttttgaggttcatggttggaaagaaaatgacagaaagataaacacggaaagaatttgaggagagttcagagaactctcccgaaggagtgtaaccccttactggtaacagaagatcacatcagtgattacaaggcattcctggccttttaacagggaccatgcatggaagggtttggaggatctacctctattctccatttttgaagttcagaatatttaacaggacaccagatatttctttcaaatgtcctataggctttagtgaagatggtttaactcaacgtctttcagtgttctgaaacagtttcccgaaccccattccttagaactttcatctacctagaagttgttagaatggatgtgcactctaacaaggtcttgaaaagtgatatgttaacatattctattctttgatagttctagcagcaaagacacattccatggatatttttaagggtaaatatttgattgtagcctttctattatgagtaaggtgaagttttactatctagcatcttctaaagcccaacatggtaaatgatgttgtgaagaatacgttatgtatcccataagagggtaacttgatgtctacatatcactatggagatatgctactcgatccatctcatttgactaagtggagataagagaaacaaaagctgacagctgtggagtttgcatgtacttccattctcagtcatgtcctcatccatttataagcacagggcaccccataacttacttgccacaatattgggtacaagagggaataacaagatagataggtcctgccctcggggattttaaagtctaatttgggagtggggaaagacatgtgagtatgagggaagcgagtaaattgacagataaaatatgcagtgggatgcctttgagttctatgtgacaatggcttctagaataggtcttaaaatcacttccaatttgcaacacatttagaagggatctttatttagatattacagcctaattatatcatcagcatcaaaaggtgcgcctacgtgaatggatgttaagaagaaccgtgcgaagggagagctggcttatgtctattatcttatttcacagtttctacatgacggcaatggaattatttacttcaatgattgtatccagatatccaatgaaaaaaacctactctatcctgttccattcaccactgttagggaagtatattttctagattttaaaagagggtgttgtaacatctttattttggtcattatgttttataatttatttcagggtatatacaaacataacttatattttcttggtttagatttcacagtggagaaatctgcacattggtacattttgagacttttgctcattattctgttgctgaactgtaatccctaagtgaataatcttaaagagcagagccacagaagtagtcagggaacaatagaagttgtagtttttgcttaactctcaacatagttctacatagatactgctcacttataaaaaatagagtaatttttagagcataaggcatatttactgtatatatctatgcagttcaattttgtattatgtgtttttgatggaatcttatgtaacacttggtccttgtaaattttgttacgagcaaaaatatcttcttaggttaggtgcaaagtgacaccattgctttgctccttatggatattttggctctgggtataacatagagcttaggaatgctattatgaatttttagtactgtatgcaaaaaatggtggggtttatatacagcatcacttcttgaaatacagaacgcattatttgttgtctacatttgagcatgaatttgttgccttataagtcctgcgttttgagtttgtaatcagtactgactctgttgtatgcatccttccacgtctaaaatatttggcatgtcacatctagaattcttaatttatgttctgccatgagagttaagtgaaacatgactgtcatgctctattttaagcgcagcacttgcttttcatctttatacttttcaattaactttgcattttaaatttccataattgtatgaaaatagtaacctgatcgcaatgtctgaagagtttcaaatcggcgtttattttaaaatgaaaaaaaaaaaactacaacacattcattagatcagaagttccacaatcacttattgttttgagtgcttcgtctattgcagaatgattaaataaaagaaatgtctactgtcctggaattttgccaccatgggacttactgagacagagcaaactcagggcaatcttggagtggaagcaaaagtcccagggaagaccgcagtgcactgcctgaaggcagggagcaggcatctgccatcatacaaggagcaagagaacaacttgaaattacttggcaggcaatgatttttgactgattcttgaaaggaaatatgaacatttacatggctaaattaattcatttaaaatgtggaaattttgatttctatcaagcagttagggaacaataacaaatgcatccaagttggttgctgaattcttcagtattcgtttcctttatgtaacttgaaaaactaatattatcaatcactcagaaatgtttatgcttagtgtcctaaaatggtgtcactgtagtttttgaagctcccctctctcttttttcacttgtggaatgtattatctccatgaataacaatactgtgttttaattccagatcctgatattcacttagattttattcactgtcttagtgaagacagtcatcattttaagggcttttaattttttttttttttgcaggattctttaaaactaaaccaaaaaagatagagaaacagatagatggacagaaagaaagaaagagagaaagaaaggaagaaaggaagaaggaagaaagaggcaaaggaagaaaatctagaaggcaaaacattcattaagtctagtattagtcagaatttctatagtgttcatgttcttctgaggatactgatgcaaactccctggtgcctggctttctctttaccctccaccttagcttcgtttcattatctttcttctactattaaacttgatgttctttcatcaccttccaaaattatagttacttcctaattatttttaaacatagctattatttaacttaatcattatagaattgcacatttataatggagaagaaatcccttagtgttctaaattcttttatatgtgccacagcacaaaatgaaaatgagaatgtaaaagttaaagggactctgagcctcagatcttggttctaatattttgtagacgaagaaactgaagaccggtcattagatggcagctaatggttgtagaaacacagtggtgacacctacttctgcagcctcgcccacgtttacaaattgaaaagtcaatcagcatggatttaacactgcttcatgcacatattaacatcacatgccattcagtgctggtggtcagaccctacttgttgatgcatttctattaaaatagatggcttaggccaaggtcactagggaaaaaatgaaaatagacaaagcaaaaacctaaaagttgttatcgagataggcagaaaagccatgaagcactgatgagtttggaaatgtaattgaagaaatttagtgtgtggagggttttagtgctggctggaggtgtagagcagaggccgagaggacttgcctcgaaagtgaaaagatttgggttcaattttcagcactggtaagagaaggaagataggaaggaggtaagaagggaaggaaggaagtgaggaaggaagaaaggaggaaaggaaggataaaagaaagcattcttagtatgaataatgattatcgaagcctctggaccttccttgctcccttcctgaatgcattgttcctttcccttgtgtgttggaatggtgaaaggtgatttggtacacgaactggagactatgtttagtgtcatttatagtctctctcttgtttgttttgtctttgacatcattgtctcccctggtggcagatttcctgagccctgcccccaccactctactcagctctgtcctttcatgtatttgagccctgtccagactgttacacacggaacgtcttaacaaggttttaatttccccactgtgtataagaggcctcggctcaccagttcattagtgatcgttctcctgacactgggaagagggctctgttaatggcagacatgactttctttctcttccattttagtcagactgtctggttatcttgtagcttttggctagtgcataaagaatgtccgcttctgctttcatgctgaactcagcttcaacagcgacttgaacaaagactgtgaaatacatatcccataatgtgattgctcatgttacgcctgtgataattgagccattggtttgttttattcctgccatcctttgaaatatttttatttatttatttttatgtgttatgggagttttgattgaatgtgggtctgtgtaccatatgcatatccggtgcttgggtaggccaaaagagtctgatcccctgaaactagaattacaggtagttgtaagctgccatgtgggtgctggaaaccagaacttggtcctctggaagagcatcagccagtgcttctaactgctaagccatctctcttctgcttctgccatgtttttagactaagccatgtgccatgctgcttagaatgcagattatgctgaaattaggtaacgatctccactttaaaatttgatattgatagctgccaggattctcctgcagttagtcatagatgaacacaacatttgggagaatatgagctccagctcatcctcattttaataatgccagaaatgtatttttctccttgttggtttatgttacactacaagaaaatttcctcctggacccaacactttcattggaatatgcaattcttccccgggttttaggaatctgactgttcacacagcctgagtgtggtaggaaattcacctttctttccagcatcccacatataaattctccacagggaactcaacagattggggcagctgaggactggggtgagcgctggaactagctcttccctatagagacagttctagaccttacagagaaagacattgtgtgtttctatatcaacataaaatgcccaggcttatccatcattatgaaatagatgctaaatttagaaatggttcttgacatatgcaaactgaacacagaatttggaagaatagaatactctgacttttcttctctgtattcccaagagtaacaagagtaacaaggtggactctttatcctggtgatgggtgtatcttttccccaacctaagtcattggctgcaaggcacagtaacctcaatttctatacatccaccaagttttcattctgtggatgaacctactcatttgcttcacctgtaaagggaggcttgagtgtcaggctctaagaaagttaaccatactaagagatttatcaatatgtttggtttttcattggcagaacagtagtatctaggcaattttaaagatgtagcagtttcctgttctctttaccaagtgagagaatctgagtaaaatattagactccagttcatttctagaatggcttatatcaagctcttgtactctcctgaccctgaactggataggattgtttacacttgattgttgtttcaggttttaaaagggtctcaaaagaaaaaattggattcaggtctataaaaaaaaaaaaggattttgtattaattttcaaagcactaatactaattatacttttcttggggtagtgattctcttcttatacctaagaacatattacacatgtcaaaaccattgcattttgacattgcgaaacacaccttgaactcttgaactactgtgagcagaatcactgttgtaaagatttttttttttttttttttttttggtaagcttgctggtattcttaagtatgtaaaaagatgtcggcttccacaggctcaaatgaatgtacataaggactgtgaaaaaaaaataaattgggttttaaaataagaactgggcgataaattgtatctaaactgcgcagatgggcatcgtcgtgcggctgtgttttcattgttgaaggttgaacagagttctacagagtcgtggatgacattcagatgtttcatgacttttggatctgcgaacatatgcattttatagtcatgtatacttatattgttaagaaataatcatattttagaatttagtaagaactcagtgatagccttcataccaaaatgtttaactttgccaacagctagtcataaaaaagtatttattttaaagctttttaatacaattgcataacttcttgccgcctccaggtgtacattcttctctgcctaaatgttatatttttatgtatgcattttcagaaagcatattgttttggaaagtggcaaagacaatgaattaagcactcgttgcacttgtttctgtaaagcataaagagctctattttaaataaaagaaaacgtgtcataaaaaaaaa

SEQ ID NO: 18 - DNA, 9033 bp, Mus musculus
  source 1..9033: mol_type = genomic DNA
tttttttttatgacacgttttcttttatttaaaatagagctctttatgctttacagaaacaagtgcaacgagtgcttaattcattgtctttgccactttccaaaacaatatgctttctgaaaatgcatacataaaaatataacatttaggcagagaagaatgtacacctggaggcggcaagaagttatgcaattgtattaaaaagctttaaaataaatacttttttatgactagctgttggcaaagttaaacattttggtatgaaggctatcactgagttcttactaaattctaaaatatgattatttcttaacaatataagtatacatgactataaaatgcatatgttcgcagatccaaaagtcatgaaacatctgaatgtcatccacgactctgtagaactctgttcaaccttcaacaatgaaaacacagccgcacgacgatgcccatctgcgcagtttagatacaatttatcgcccagttcttattttaaaacccaatttatttttttttcacagtccttatgtacattcatttgagcctgtggaagccgacatctttttacatacttaagaataccagcaagcttaccaaaaaaaaaaaaaaaaaaaaaaatctttacaacagtgattctgctcacagtagttcaagagttcaaggtgtgtttcgcaatgtcaaaatgcaatggttttgacatgtgtaatatgttcttaggtataagaagagaatcactaccccaagaaaagtataattagtattagtgctttgaaaattaatacaaaatccttttttttttttatagacctgaatccaattttttcttttgagacccttttaaaacctgaaacaacaatcaagtgtaaacaatcctatccagttcagggtcaggagagtacaagagcttgatataagccattctagaaatgaactggagtctaatattttactcagattctctcacttggtaaagagaacaggaaactgctacatctttaaaattgcctagatactactgttctgccaatgaaaaaccaaacatattgataaatctcttagtatggttaactttcttagagcctgacactcaagcctccctttacaggtgaagcaaatgagtaggttcatccacagaatgaaaacttggtggatgtatagaaattgaggttactgtgccttgcagccaatgacttaggttggggaaaagatacacccatcaccaggataaagagtccaccttgttactcttgttactcttgggaatacagagaagaaaagtcagagtattctattcttccaaattctgtgttcagtttgcatatgtcaagaaccatttctaaatttagcatctatttcataatgatggataagcctgggcattttatgttgatatagaaacacacaatgtctttctctgtaaggtctagaactgtctctatagggaagagctagttccagcgctcaccccagtcctcagctgccccaatctgttgagttccctgtggagaatttatatgtgggatgctggaaagaaaggtgaatttcctaccacactcaggctgtgtgaacagtcagattcctaaaacccggggaagaattgcatattccaatgaaagtgttgggtccaggaggaaattttcttgtagtgtaacataaaccaacaaggagaaaaatacatttctggcattattaaaatgaggatgagctggagctcatattctcccaaatgttgtgttcatctatgactaactgcaggagaatcctggcagctatcaatatcaaattttaaagtggagatcgttacctaatttcagcataatctgcattctaagcagcatggcacatggcttagtctaaaaacatggcagaagcagaagagagatggcttagcagttagaagcactggctgatgctcttccagaggaccaagttctggtttccagcacccacatggcagcttacaactacctgtaattctagtttcaggggatcagactcttttggcctacccaagcaccggatatgcatatggtacacagacccacattcaatcaaaactcccataacacataaaaataaataaataaaaatatttcaaaggatggcaggaataaaacaaaccaatggctcaattatcacaggcgtaacatgagcaatcacattatgggatatgtatttcacagtctttgttcaagtcgctgttgaagctgagttcagcatgaaagcagaagcggacattctttatgcactagccaaaagctacaagataaccagacagtctgactaaaatggaagagaaagaaagtcatgtctgccattaacagagccctcttcccagtgtcaggagaacgatcactaatgaactggtgagccgaggcctcttatacacagtggggaaattaaaaccttgttaagacgttccgtgtgtaacagtctggacagggctcaaatacatgaaaggacagagctgagtagagtggtgggggcagggctcaggaaatctgccaccaggggagacaatgatgtcaaagacaaaacaaacaagagagagactataaatgacactaaacatagtctccagttcgtgtaccaaatcacctttcaccattccaacacacaagggaaaggaacaatgcattcaggaagggagcaaggaaggtccagaggcttcgataatcattattcatactaagaatgctttcttttatccttcctttcctcctttcttccttcctcacttccttccttcccttcttacctccttcctatcttccttctcttaccagtgctgaaaattgaacccaaatcttttcactttcgaggcaagtcctctcggcctctgctctacacctccagccagcactaaaaccctccacacactaaatttcttcaattacatttccaaactcatcagtgcttcatggcttttctgcctatctcgataacaacttttaggtttttgctttgtctattttcattttttccctagtgaccttggcctaagccatctattttaatagaaatgcatcaacaagtagggtctgaccaccagcactgaatggcatgtgatgttaatatgtgcatgaagcagtgttaaatccatgctgattgacttttcaatttgtaaacgtgggcgaggctgcagaagtaggtgtcaccactgtgtttctacaaccattagctgccatctaatgaccggtcttcagtttcttcgtctacaaaatattagaaccaagatctgaggctcagagtccctttaacttttacattctcattttcattttgtgctgtggcacatataaaagaatttagaacactaagggatttcttctccattataaatgtgcaattctataatgattaagttaaataatagctatgtttaaaaataattaggaagtaactataattttggaaggtgatgaaagaacatcaagtttaatagtagaagaaagataatgaaacgaagctaaggtggagggtaaagagaaagccaggcaccagggagtttgcatcagtatcctcagaagaacatgaacactatagaaattctgactaatactagacttaatgaatgttttgccttctagattttcttcctttgcctctttcttccttcttcctttcttcctttctttctctctttctttctttctgtccatctatctgtttctctatcttttttggtttagttttaaagaatcctgcaaaaaaaaaaaaaattaaaagcccttaaaatgatgactgtcttcactaagacagtgaataaaatctaagtgaatatcaggatctggaattaaaacacagtattgttattcatggagataatacattccacaagtgaaaaaagagagaggggagcttcaaaaactacagtgacaccattttaggacactaagcataaacatttctgagtgattgataatattagtttttcaagttacataaaggaaacgaatactgaagaattcagcaaccaacttggatgcatttgttattgttccctaactgcttgatagaaatcaaaatttccacattttaaatgaattaatttagccatgtaaatgttcatatttcctttcaagaatcagtcaaaaatcattgcctgccaagtaatttcaagttgttctcttgctccttgtatgatggcagatgcctgctccctgccttcaggcagtgcactgcggtcttccctgggacttttgcttccactccaagattgccctgagtttgctctgtctcagtaagtcccatggtggcaaaattccaggacagtagacatttcttttatttaatcattctgcaatagacgaagcactcaaaacaataagtgattgtggaacttctgatctaatgaatgtgttgtagttttttttttttcattttaaaataaacgccgatttgaaactcttcagacattgcgatcaggttactattttcatacaattatggaaatttaaaatgcaaagttaattgaaaagtataaagatgaaaagcaagtgctgcgcttaaaatagagcatgacagtcatgtttcacttaactctcatggcagaacataaattaagaattctagatgtgacatgccaaatattttagacgtggaaggatgcatacaacagagtcagtactgattacaaactcaaaacgcaggacttataaggcaacaaattcatgctcaaatgtagacaacaaataatgcgttctgtatttcaagaagtgatgctgtatataaaccccaccattttttgcatacagtactaaaaattcataatagcattcctaagctctatgttatacccagagccaaaatatccataaggagcaaagcaatggtgtcactttgcacctaacctaagaagatatttttgctcgtaacaaaatttacaaggaccaagtgttacataagattccatcaaaaacacataatacaaaattgaactgcatagatatatacagtaaatatgccttatgctctaaaaattactctattttttataagtgagcagtatctatgtagaactatgttgagagttaagcaaaaactacaacttctattgttccctgactacttctgtggctctgctctttaagattattcacttagggattacagttcagcaacagaataatgagcaaaagtctcaaaatgtaccaatgtgcagatttctccactgtgaaatctaaaccaagaaaatataagttatgtttgtatataccctgaaataaattataaaacataatgaccaaaataaagatgttacaacaccctcttttaaaatctagaaaatatacttccctaacagtggtgaatggaacaggatagagtaggtttttttcattggatatctggatacaatcattgaagtaaataattccattgccgtcatgtagaaactgtgaaataagataatagacataagccagctctcccttcgcacggttcttcttaacatccattcacgtaggcgcaccttttgatgctgatgatataattaggctgtaatatctaaataaagatcccttctaaatgtgttgcaaattggaagtgattttaagacctattctagaagccattgtcacatagaactcaaaggcatcccactgcatattttatctgtcaatttactcgcttccctcatactcacatgtctttccccactcccaaattagactttaaaatccccgagggcaggacctatctatcttgttattccctcttgtacccaatattgtggcaagtaagttatggggtgccctgtgcttataaatggatgaggacatgactgagaatggaagtacatgcaaactccacagctgtcagcttttgtttctcttatctccacttagtcaaatgagatggatcgagtagcatatctccatagtgatatgtagacatcaagttaccctcttatgggatacataacgtattcttcacaacatcatttaccatgttgggctttagaagatgctagatagtaaaacttcaccttactcataatagaaaggctacaatcaaatatttacccttaaaaatatccatggaatgtgtctttgctgctagaactatcaaagaatagaatatgttaacatatcacttttcaagaccttgttagagtgcacatccattctaacaacttctaggtagatgaaagttctaaggaatggggttcgggaaactgtttcagaacactgaaagacgttgagttaaaccatcttcactaaagcctataggacatttgaaagaaatatctggtgtcctgttaaatattctgaacttcaaaaatggagaatagaggtagatcctccaaacccttccatgcatggtccctgttaaaaggccaggaatgccttgtaatcactgatgtgatcttctgttaccagtaaggggttacactccttcgggagagttctctgaactctcctcaaattctttccgtgtttatctttctgtcattttctttccaaccatgaacctcaaaagcaatgacatcttatgacatacatctttagaaaatggatgtttataattggtcaatatttggcaatgttcagaaaacattttttttcattatcgaatgggataatgatgacatttctttgatgaaattctaatagattggttctgaaattctagaaaatctattatggtcttacaaaatactcaatgcattcactatgtgactaaatttaaaatattataactgatgattgatcttcccacttgggaagaaacgctctatgggaattcaagggagtataatggccagcaaacttcacagtgctagttgtcacagggttcgtaaccagctctggcaagagctctgtgactctgggccatttcacagtgtttgagacatatggacctctgttatgtatcaggaggagtaatggctcaggtggttttcgaactacttagggacagctgtcgtagtgatgcagagtggcaaataggcagagaaagcaagtcctgagaacgtggtgtcactttgttactccacctttccactctttagatgttaaaattctgagcaaaatttactttttaaggacccagttaatttttacagttccatttcaccataatatacagtagttcacattttaaatatgtcttcatctcatttgtggatgctcttggttcaagtacaacaaaaatttaatattttttttaccattgtatgtagcttatcttatactcataacatcttcctccttaaataaaaagaaaaaacgagtcgtgtcccctttaaacataaaactaaggacaacatggaaactgggaaagtcaagacctgcccatgcttaactttagcgttatctttacatgctgcctttgggacacttcaacactgtagtgagtcatccttgaggtagaactaaaataaaacacagcagaaaagaagcaaaaacatttacacaaagcgggagacgggaaggaaagctgtgagcactcttcctttgcctgtacgcagagctaagctttacagtcttccttgacacacagctgggagatggtcttcttcacgcgcagggctgtcaggcgtgctgccccgttggcgtaccagcactcacgcattattcttcccatgacccgcagcgcttcacagctttgccactggtttgggagatttggtcggagtttctgatcacagacaaccttcctcatttcttctatcgaaggatctgaaggcaccatgtcatagtaaggcaactggtactcctcaacaactcctccaactgaacaccttcgagctatttcccagtaaaccagccccaccgaatagatgtcagctcgcttgaaggactcaaagatgctcaggttcattgtatcatcaagcatttcgggagccatgtacctcttggttcccactttaggattctggggtatgtctatagtgttcatgatagaatcgtgcttcacagccagccctaagtcagctatggcacaagtgtcacattttttgactaggatattctttgactttatatctcggtgagcaatagcaggcttaccttgagtacccacgatctccatgtgcaggtgagccagaccactcgctatggaaagcgccagcttgaccattccagccacagtcactatgtttctgttcaaatagtcatacaaggagccctgctcgtgatactctgacacaagccagagttgtgtccaagttccattatctttgttgtcagctgcgatgaaaccgaggatgttctcgtgtctcagcatcaccgtctgataaatttccgcctcacggaaccaagatctctcatccctggaggagaatattttcacagccacatcttctccacaccatcttccgtgccacacttccccaaaccgaccttttcctacgatttcttgaagtacaattgtccttgcgattgttctttgaaccaagagaggcagaccagagcctgagccagaggcagtagcatcgtagatcagatccttgagtgtttttcctgcattcacaaggctgtactcagccagcgcttcctccacgttgtgtctcttagtcttcctgtatgtgcactggcggtcctggcacgcccatattgttagcatggcggctatggacaggaggcaaaccggcacggtgataacaaccgtcagctctgtgggaccaagtcgaggggcatttggcgatgctgtgggaaggtgcagtgtgatattgttgcagaagtctgtgaagcaacattcggttttggtcacgttgttggaactgtgacagaagacctgagcatttagttccgggagggacacacacgatttgatcacctgctctttcccgttggttagcatgacggaggcccaacatgctccttccgtttggcaggtgaagtttgaagaatcacacaaaagacacacacacttcagtcctgccgcaaggtcggcggccagggccaccagcaggagggccaggctcagtgcggagccgcgcgctggggtcatggccacccggcggcggtgcaaggcttcggggtcccagagcgcagcccgcagcgcgggccgctttgaagttcccggggc

SEQ ID NO: 19 - DNA, 8666 bp, Mus musculus
  source 1..8666: mol_type = genomic DNA
agttccccttggctgggctctgaggactgaagtgtgtgtgtcttttgtgtgattcttcaaacttcacctgccaaacggaaggagcatgttgggcctccgtcatgctaaccaacgggaaagagcaggtgatcaaatcgtgtgtgtccctcccggaactaaatgctcaggtcttctgtcacagttccaacaacgtgaccaaaaccgaatgttgcttcacagacttctgcaacaatatcacactgcaccttcccacaggtctgcctctcttggttcaaagaacaatcgcaaggacaattgtacttcaagaaatcgtaggaaaaggtcggtttggggaagtgtggcacggaagatggtgtggagaagatgtggctgtgaaaatattctcctccagggatgagagatcttggttccgtgaggcggaaatttatcagacggtgatgctgagacacgagaacatcctcggtttcatcgcagctgacaacaaagataatggaacttggacacaactctggcttgtgtcagagtatcacgagcagggctccttgtatgactatttgaacagaaacatagtgactgtggctggaatggtcaagctggcgctttccatagcgagtggtctggctcacctgcacatggagatcgtgggtactcaaggtaagcctgctattgctcaccgagatataaagtcaaagaatatcctagtcaaaaaatgtgacacttgtgccatagctgacttagggctggctgtgaagcacgattctatcatgaacactatagacataccccagaatcctaaagtgggaaccaagaggtacatggctcccgaaatgcttgatgatacaatgaacctgagcatctttgagtccttcaagcgagctgacatctattcggtggggctggtttactgggaaatagctcgaaggtgttcagttggaggagttgttgaggagtaccagttgccttactatgacatggtgccttcagatccttcgatagaagaaatgaggaaggttgtctgtgatcagaaactccgaccaaatctcccaaaccagtggcaaagctgtgaagcgctgcgggtcatgggaagaataatgcgtgagtgctggtacgccaacggggcagcacgcctgacagccctgcgcgtgaagaagaccatctcccagctgtgtgtcaaggaagactgtaaagcttagctctgcgtacaggcaaaggaagagtgctcacagctttccttcccgtctcccgctttgtgtaaatgtttttgcttcttttctgctgtgttttattttagttctacctcaaggatgactcactacagtgttgaagtgtcccaaaggcagcatgtaaagataacgctaaagttaagcatgggcaggtcttgactttcccagtttccatgttgtccttagttttatgtttaaaggggacacgactcgttttttctttttatttaaggaggaagatgttatgagtataagataagctacatacaatggtaaaaaaaatattaaatttttgttgtacttgaaccaagagcatccacaaatgagatgaagacatatttaaaatgtgaactactgtatattatggtgaaatggaactgtaaaaattaactgggtccttaaaaagtaaattttgctcagaattttaacatctaaagagtggaaaggtggagtaacaaagtgacaccacgttctcaggacttgctttctctgcctatttgccactctgcatcactacgacagctgtccctaagtagttcgaaaaccacctgagccattactcctcctgatacataacagaggtccatatgtctcaaacactgtgaaatggcccagagtcacagagctcttgccagagctggttacgaaccctgtgacaactagcactgtgaagtttgctggccattatactcccttgaattcccatagagcgtttcttcccaagtgggaagatcaatcatcagttataatattttaaatttagtcacatagtgaatgcattgagtattttgtaagaccataatagattttctagaatttcagaaccaatctattagaatttcatcaaagaaatgtcatcattatcccattcgataatgaaaaaaaatgttttctgaacattgccaaatattgaccaattataaacatccattttctaaagatgtatgtcataagatgtcattgcttttgaggttcatggttggaaagaaaatgacagaaagataaacacggaaagaatttgaggagagttcagagaactctcccgaaggagtgtaaccccttactggtaacagaagatcacatcagtgattacaaggcattcctggccttttaacagggaccatgcatggaagggtttggaggatctacctctattctccatttttgaagttcagaatatttaacaggacaccagatatttctttcaaatgtcctataggctttagtgaagatggtttaactcaacgtctttcagtgttctgaaacagtttcccgaaccccattccttagaactttcatctacctagaagttgttagaatggatgtgcactctaacaaggtcttgaaaagtgatatgttaacatattctattctttgatagttctagcagcaaagacacattccatggatatttttaagggtaaatatttgattgtagcctttctattatgagtaaggtgaagttttactatctagcatcttctaaagcccaacatggtaaatgatgttgtgaagaatacgttatgtatcccataagagggtaacttgatgtctacatatcactatggagatatgctactcgatccatctcatttgactaagtggagataagagaaacaaaagctgacagctgtggagtttgcatgtacttccattctcagtcatgtcctcatccatttataagcacagggcaccccataacttacttgccacaatattgggtacaagagggaataacaagatagataggtcctgccctcggggattttaaagtctaatttgggagtggggaaagacatgtgagtatgagggaagcgagtaaattgacagataaaatatgcagtgggatgcctttgagttctatgtgacaatggcttctagaataggtcttaaaatcacttccaatttgcaacacatttagaagggatctttatttagatattacagcctaattatatcatcagcatcaaaaggtgcgcctacgtgaatggatgttaagaagaaccgtgcgaagggagagctggcttatgtctattatcttatttcacagtttctacatgacggcaatggaattatttacttcaatgattgtatccagatatccaatgaaaaaaacctactctatcctgttccattcaccactgttagggaagtatattttctagattttaaaagagggtgttgtaacatctttattttggtcattatgttttataatttatttcagggtatatacaaacataacttatattttcttggtttagatttcacagtggagaaatctgcacattggtacattttgagacttttgctcattattctgttgctgaactgtaatccctaagtgaataatcttaaagagcagagccacagaagtagtcagggaacaatagaagttgtagtttttgcttaactctcaacatagttctacatagatactgctcacttataaaaaatagagtaatttttagagcataaggcatatttactgtatatatctatgcagttcaattttgtattatgtgtttttgatggaatcttatgtaacacttggtccttgtaaattttgttacgagcaaaaatatcttcttaggttaggtgcaaagtgacaccattgctttgctccttatggatattttggctctgggtataacatagagcttaggaatgctattatgaatttttagtactgtatgcaaaaaatggtggggtttatatacagcatcacttcttgaaatacagaacgcattatttgttgtctacatttgagcatgaatttgttgccttataagtcctgcgttttgagtttgtaatcagtactgactctgttgtatgcatccttccacgtctaaaatatttggcatgtcacatctagaattcttaatttatgttctgccatgagagttaagtgaaacatgactgtcatgctctattttaagcgcagcacttgcttttcatctttatacttttcaattaactttgcattttaaatttccataattgtatgaaaatagtaacctgatcgcaatgtctgaagagtttcaaatcggcgtttattttaaaatgaaaaaaaaaaaactacaacacattcattagatcagaagttccacaatcacttattgttttgagtgcttcgtctattgcagaatgattaaataaaagaaatgtctactgtcctggaattttgccaccatgggacttactgagacagagcaaactcagggcaatcttggagtggaagcaaaagtcccagggaagaccgcagtgcactgcctgaaggcagggagcaggcatctgccatcatacaaggagcaagagaacaacttgaaattacttggcaggcaatgatttttgactgattcttgaaaggaaatatgaacatttacatggctaaattaattcatttaaaatgtggaaattttgatttctatcaagcagttagggaacaataacaaatgcatccaagttggttgctgaattcttcagtattcgtttcctttatgtaacttgaaaaactaatattatcaatcactcagaaatgtttatgcttagtgtcctaaaatggtgtcactgtagtttttgaagctcccctctctcttttttcacttgtggaatgtattatctccatgaataacaatactgtgttttaattccagatcctgatattcacttagattttattcactgtcttagtgaagacagtcatcattttaagggcttttaattttttttttttttgcaggattctttaaaactaaaccaaaaaagatagagaaacagatagatggacagaaagaaagaaagagagaaagaaaggaagaaaggaagaaggaagaaagaggcaaaggaagaaaatctagaaggcaaaacattcattaagtctagtattagtcagaatttctatagtgttcatgttcttctgaggatactgatgcaaactccctggtgcctggctttctctttaccctccaccttagcttcgtttcattatctttcttctactattaaacttgatgttctttcatcaccttccaaaattatagttacttcctaattatttttaaacatagctattatttaacttaatcattatagaattgcacatttataatggagaagaaatcccttagtgttctaaattcttttatatgtgccacagcacaaaatgaaaatgagaatgtaaaagttaaagggactctgagcctcagatcttggttctaatattttgtagacgaagaaactgaagaccggtcattagatggcagctaatggttgtagaaacacagtggtgacacctacttctgcagcctcgcccacgtttacaaattgaaaagtcaatcagcatggatttaacactgcttcatgcacatattaacatcacatgccattcagtgctggtggtcagaccctacttgttgatgcatttctattaaaatagatggcttaggccaaggtcactagggaaaaaatgaaaatagacaaagcaaaaacctaaaagttgttatcgagataggcagaaaagccatgaagcactgatgagtttggaaatgtaattgaagaaatttagtgtgtggagggttttagtgctggctggaggtgtagagcagaggccgagaggacttgcctcgaaagtgaaaagatttgggttcaattttcagcactggtaagagaaggaagataggaaggaggtaagaagggaaggaaggaagtgaggaaggaagaaaggaggaaaggaaggataaaagaaagcattcttagtatgaataatgattatcgaagcctctggaccttccttgctcccttcctgaatgcattgttcctttcccttgtgtgttggaatggtgaaaggtgatttggtacacgaactggagactatgtttagtgtcatttatagtctctctcttgtttgttttgtctttgacatcattgtctcccctggtggcagatttcctgagccctgcccccaccactctactcagctctgtcctttcatgtatttgagccctgtccagactgttacacacggaacgtcttaacaaggttttaatttccccactgtgtataagaggcctcggctcaccagttcattagtgatcgttctcctgacactgggaagagggctctgttaatggcagacatgactttctttctcttccattttagtcagactgtctggttatcttgtagcttttggctagtgcataaagaatgtccgcttctgctttcatgctgaactcagcttcaacagcgacttgaacaaagactgtgaaatacatatcccataatgtgattgctcatgttacgcctgtgataattgagccattggtttgttttattcctgccatcctttgaaatatttttatttatttatttttatgtgttatgggagttttgattgaatgtgggtctgtgtaccatatgcatatccggtgcttgggtaggccaaaagagtctgatcccctgaaactagaattacaggtagttgtaagctgccatgtgggtgctggaaaccagaacttggtcctctggaagagcatcagccagtgcttctaactgctaagccatctctcttctgcttctgccatgtttttagactaagccatgtgccatgctgcttagaatgcagattatgctgaaattaggtaacgatctccactttaaaatttgatattgatagctgccaggattctcctgcagttagtcatagatgaacacaacatttgggagaatatgagctccagctcatcctcattttaataatgccagaaatgtatttttctccttgttggtttatgttacactacaagaaaatttcctcctggacccaacactttcattggaatatgcaattcttccccgggttttaggaatctgactgttcacacagcctgagtgtggtaggaaattcacctttctttccagcatcccacatataaattctccacagggaactcaacagattggggcagctgaggactggggtgagcgctggaactagctcttccctatagagacagttctagaccttacagagaaagacattgtgtgtttctatatcaacataaaatgcccaggcttatccatcattatgaaatagatgctaaatttagaaatggttcttgacatatgcaaactgaacacagaatttggaagaatagaatactctgacttttcttctctgtattcccaagagtaacaagagtaacaaggtggactctttatcctggtgatgggtgtatcttttccccaacctaagtcattggctgcaaggcacagtaacctcaatttctatacatccaccaagttttcattctgtggatgaacctactcatttgcttcacctgtaaagggaggcttgagtgtcaggctctaagaaagttaaccatactaagagatttatcaatatgtttggtttttcattggcagaacagtagtatctaggcaattttaaagatgtagcagtttcctgttctctttaccaagtgagagaatctgagtaaaatattagactccagttcatttctagaatggcttatatcaagctcttgtactctcctgaccctgaactggataggattgtttacacttgattgttgtttcaggttttaaaagggtctcaaaagaaaaaattggattcaggtctataaaaaaaaaaaaggattttgtattaattttcaaagcactaatactaattatacttttcttggggtagtgattctcttcttatacctaagaacatattacacatgtcaaaaccattgcattttgacattgcgaaacacaccttgaactcttgaactactgtgagcagaatcactgttgtaaagatttttttttttttttttttttttggtaagcttgctggtattcttaagtatgtaaaaagatgtcggcttccacaggctcaaatgaatgtacataaggactgtgaaaaaaaaataaattgggttttaaaataagaactgggcgataaattgtatctaaactgcgcagatgggcatcgtcgtgcggctgtgttttcattgttgaaggttgaacagagttctacagagtcgtggatgacattcagatgtttcatgacttttggatctgcgaacatatgcattttatagtcatgtatacttatattgttaagaaataatcatattttagaatttagtaagaactcagtgatagccttcataccaaaatgtttaactttgccaacagctagtcataaaaaagtatttattttaaagctttttaatacaattgcataacttcttgccgcctccaggtgtacattcttctctgcctaaatgttatatttttatgtatgcattttcagaaagcatattgttttggaaagtggcaaagacaatgaattaagcactcgttgcacttgtttctgtaaagcataaagagctctattttaaataaaagaaaacgtgtcataaaaaaaaa

SEQ ID NO: 20 - DNA, 8666 bp, Mus musculus
  source 1..8666: mol_type = genomic DNA
tttttttttatgacacgttttcttttatttaaaatagagctctttatgctttacagaaacaagtgcaacgagtgcttaattcattgtctttgccactttccaaaacaatatgctttctgaaaatgcatacataaaaatataacatttaggcagagaagaatgtacacctggaggcggcaagaagttatgcaattgtattaaaaagctttaaaataaatacttttttatgactagctgttggcaaagttaaacattttggtatgaaggctatcactgagttcttactaaattctaaaatatgattatttcttaacaatataagtatacatgactataaaatgcatatgttcgcagatccaaaagtcatgaaacatctgaatgtcatccacgactctgtagaactctgttcaaccttcaacaatgaaaacacagccgcacgacgatgcccatctgcgcagtttagatacaatttatcgcccagttcttattttaaaacccaatttatttttttttcacagtccttatgtacattcatttgagcctgtggaagccgacatctttttacatacttaagaataccagcaagcttaccaaaaaaaaaaaaaaaaaaaaaaatctttacaacagtgattctgctcacagtagttcaagagttcaaggtgtgtttcgcaatgtcaaaatgcaatggttttgacatgtgtaatatgttcttaggtataagaagagaatcactaccccaagaaaagtataattagtattagtgctttgaaaattaatacaaaatccttttttttttttatagacctgaatccaattttttcttttgagacccttttaaaacctgaaacaacaatcaagtgtaaacaatcctatccagttcagggtcaggagagtacaagagcttgatataagccattctagaaatgaactggagtctaatattttactcagattctctcacttggtaaagagaacaggaaactgctacatctttaaaattgcctagatactactgttctgccaatgaaaaaccaaacatattgataaatctcttagtatggttaactttcttagagcctgacactcaagcctccctttacaggtgaagcaaatgagtaggttcatccacagaatgaaaacttggtggatgtatagaaattgaggttactgtgccttgcagccaatgacttaggttggggaaaagatacacccatcaccaggataaagagtccaccttgttactcttgttactcttgggaatacagagaagaaaagtcagagtattctattcttccaaattctgtgttcagtttgcatatgtcaagaaccatttctaaatttagcatctatttcataatgatggataagcctgggcattttatgttgatatagaaacacacaatgtctttctctgtaaggtctagaactgtctctatagggaagagctagttccagcgctcaccccagtcctcagctgccccaatctgttgagttccctgtggagaatttatatgtgggatgctggaaagaaaggtgaatttcctaccacactcaggctgtgtgaacagtcagattcctaaaacccggggaagaattgcatattccaatgaaagtgttgggtccaggaggaaattttcttgtagtgtaacataaaccaacaaggagaaaaatacatttctggcattattaaaatgaggatgagctggagctcatattctcccaaatgttgtgttcatctatgactaactgcaggagaatcctggcagctatcaatatcaaattttaaagtggagatcgttacctaatttcagcataatctgcattctaagcagcatggcacatggcttagtctaaaaacatggcagaagcagaagagagatggcttagcagttagaagcactggctgatgctcttccagaggaccaagttctggtttccagcacccacatggcagcttacaactacctgtaattctagtttcaggggatcagactcttttggcctacccaagcaccggatatgcatatggtacacagacccacattcaatcaaaactcccataacacataaaaataaataaataaaaatatttcaaaggatggcaggaataaaacaaaccaatggctcaattatcacaggcgtaacatgagcaatcacattatgggatatgtatttcacagtctttgttcaagtcgctgttgaagctgagttcagcatgaaagcagaagcggacattctttatgcactagccaaaagctacaagataaccagacagtctgactaaaatggaagagaaagaaagtcatgtctgccattaacagagccctcttcccagtgtcaggagaacgatcactaatgaactggtgagccgaggcctcttatacacagtggggaaattaaaaccttgttaagacgttccgtgtgtaacagtctggacagggctcaaatacatgaaaggacagagctgagtagagtggtgggggcagggctcaggaaatctgccaccaggggagacaatgatgtcaaagacaaaacaaacaagagagagactataaatgacactaaacatagtctccagttcgtgtaccaaatcacctttcaccattccaacacacaagggaaaggaacaatgcattcaggaagggagcaaggaaggtccagaggcttcgataatcattattcatactaagaatgctttcttttatccttcctttcctcctttcttccttcctcacttccttccttcccttcttacctccttcctatcttccttctcttaccagtgctgaaaattgaacccaaatcttttcactttcgaggcaagtcctctcggcctctgctctacacctccagccagcactaaaaccctccacacactaaatttcttcaattacatttccaaactcatcagtgcttcatggcttttctgcctatctcgataacaacttttaggtttttgctttgtctattttcattttttccctagtgaccttggcctaagccatctattttaatagaaatgcatcaacaagtagggtctgaccaccagcactgaatggcatgtgatgttaatatgtgcatgaagcagtgttaaatccatgctgattgacttttcaatttgtaaacgtgggcgaggctgcagaagtaggtgtcaccactgtgtttctacaaccattagctgccatctaatgaccggtcttcagtttcttcgtctacaaaatattagaaccaagatctgaggctcagagtccctttaacttttacattctcattttcattttgtgctgtggcacatataaaagaatttagaacactaagggatttcttctccattataaatgtgcaattctataatgattaagttaaataatagctatgtttaaaaataattaggaagtaactataattttggaaggtgatgaaagaacatcaagtttaatagtagaagaaagataatgaaacgaagctaaggtggagggtaaagagaaagccaggcaccagggagtttgcatcagtatcctcagaagaacatgaacactatagaaattctgactaatactagacttaatgaatgttttgccttctagattttcttcctttgcctctttcttccttcttcctttcttcctttctttctctctttctttctttctgtccatctatctgtttctctatcttttttggtttagttttaaagaatcctgcaaaaaaaaaaaaaattaaaagcccttaaaatgatgactgtcttcactaagacagtgaataaaatctaagtgaatatcaggatctggaattaaaacacagtattgttattcatggagataatacattccacaagtgaaaaaagagagaggggagcttcaaaaactacagtgacaccattttaggacactaagcataaacatttctgagtgattgataatattagtttttcaagttacataaaggaaacgaatactgaagaattcagcaaccaacttggatgcatttgttattgttccctaactgcttgatagaaatcaaaatttccacattttaaatgaattaatttagccatgtaaatgttcatatttcctttcaagaatcagtcaaaaatcattgcctgccaagtaatttcaagttgttctcttgctccttgtatgatggcagatgcctgctccctgccttcaggcagtgcactgcggtcttccctgggacttttgcttccactccaagattgccctgagtttgctctgtctcagtaagtcccatggtggcaaaattccaggacagtagacatttcttttatttaatcattctgcaatagacgaagcactcaaaacaataagtgattgtggaacttctgatctaatgaatgtgttgtagttttttttttttcattttaaaataaacgccgatttgaaactcttcagacattgcgatcaggttactattttcatacaattatggaaatttaaaatgcaaagttaattgaaaagtataaagatgaaaagcaagtgctgcgcttaaaatagagcatgacagtcatgtttcacttaactctcatggcagaacataaattaagaattctagatgtgacatgccaaatattttagacgtggaaggatgcatacaacagagtcagtactgattacaaactcaaaacgcaggacttataaggcaacaaattcatgctcaaatgtagacaacaaataatgcgttctgtatttcaagaagtgatgctgtatataaaccccaccattttttgcatacagtactaaaaattcataatagcattcctaagctctatgttatacccagagccaaaatatccataaggagcaaagcaatggtgtcactttgcacctaacctaagaagatatttttgctcgtaacaaaatttacaaggaccaagtgttacataagattccatcaaaaacacataatacaaaattgaactgcatagatatatacagtaaatatgccttatgctctaaaaattactctattttttataagtgagcagtatctatgtagaactatgttgagagttaagcaaaaactacaacttctattgttccctgactacttctgtggctctgctctttaagattattcacttagggattacagttcagcaacagaataatgagcaaaagtctcaaaatgtaccaatgtgcagatttctccactgtgaaatctaaaccaagaaaatataagttatgtttgtatataccctgaaataaattataaaacataatgaccaaaataaagatgttacaacaccctcttttaaaatctagaaaatatacttccctaacagtggtgaatggaacaggatagagtaggtttttttcattggatatctggatacaatcattgaagtaaataattccattgccgtcatgtagaaactgtgaaataagataatagacataagccagctctcccttcgcacggttcttcttaacatccattcacgtaggcgcaccttttgatgctgatgatataattaggctgtaatatctaaataaagatcccttctaaatgtgttgcaaattggaagtgattttaagacctattctagaagccattgtcacatagaactcaaaggcatcccactgcatattttatctgtcaatttactcgcttccctcatactcacatgtctttccccactcccaaattagactttaaaatccccgagggcaggacctatctatcttgttattccctcttgtacccaatattgtggcaagtaagttatggggtgccctgtgcttataaatggatgaggacatgactgagaatggaagtacatgcaaactccacagctgtcagcttttgtttctcttatctccacttagtcaaatgagatggatcgagtagcatatctccatagtgatatgtagacatcaagttaccctcttatgggatacataacgtattcttcacaacatcatttaccatgttgggctttagaagatgctagatagtaaaacttcaccttactcataatagaaaggctacaatcaaatatttacccttaaaaatatccatggaatgtgtctttgctgctagaactatcaaagaatagaatatgttaacatatcacttttcaagaccttgttagagtgcacatccattctaacaacttctaggtagatgaaagttctaaggaatggggttcgggaaactgtttcagaacactgaaagacgttgagttaaaccatcttcactaaagcctataggacatttgaaagaaatatctggtgtcctgttaaatattctgaacttcaaaaatggagaatagaggtagatcctccaaacccttccatgcatggtccctgttaaaaggccaggaatgccttgtaatcactgatgtgatcttctgttaccagtaaggggttacactccttcgggagagttctctgaactctcctcaaattctttccgtgtttatctttctgtcattttctttccaaccatgaacctcaaaagcaatgacatcttatgacatacatctttagaaaatggatgtttataattggtcaatatttggcaatgttcagaaaacattttttttcattatcgaatgggataatgatgacatttctttgatgaaattctaatagattggttctgaaattctagaaaatctattatggtcttacaaaatactcaatgcattcactatgtgactaaatttaaaatattataactgatgattgatcttcccacttgggaagaaacgctctatgggaattcaagggagtataatggccagcaaacttcacagtgctagttgtcacagggttcgtaaccagctctggcaagagctctgtgactctgggccatttcacagtgtttgagacatatggacctctgttatgtatcaggaggagtaatggctcaggtggttttcgaactacttagggacagctgtcgtagtgatgcagagtggcaaataggcagagaaagcaagtcctgagaacgtggtgtcactttgttactccacctttccactctttagatgttaaaattctgagcaaaatttactttttaaggacccagttaatttttacagttccatttcaccataatatacagtagttcacattttaaatatgtcttcatctcatttgtggatgctcttggttcaagtacaacaaaaatttaatattttttttaccattgtatgtagcttatcttatactcataacatcttcctccttaaataaaaagaaaaaacgagtcgtgtcccctttaaacataaaactaaggacaacatggaaactgggaaagtcaagacctgcccatgcttaactttagcgttatctttacatgctgcctttgggacacttcaacactgtagtgagtcatccttgaggtagaactaaaataaaacacagcagaaaagaagcaaaaacatttacacaaagcgggagacgggaaggaaagctgtgagcactcttcctttgcctgtacgcagagctaagctttacagtcttccttgacacacagctgggagatggtcttcttcacgcgcagggctgtcaggcgtgctgccccgttggcgtaccagcactcacgcattattcttcccatgacccgcagcgcttcacagctttgccactggtttgggagatttggtcggagtttctgatcacagacaaccttcctcatttcttctatcgaaggatctgaaggcaccatgtcatagtaaggcaactggtactcctcaacaactcctccaactgaacaccttcgagctatttcccagtaaaccagccccaccgaatagatgtcagctcgcttgaaggactcaaagatgctcaggttcattgtatcatcaagcatttcgggagccatgtacctcttggttcccactttaggattctggggtatgtctatagtgttcatgatagaatcgtgcttcacagccagccctaagtcagctatggcacaagtgtcacattttttgactaggatattctttgactttatatctcggtgagcaatagcaggcttaccttgagtacccacgatctccatgtgcaggtgagccagaccactcgctatggaaagcgccagcttgaccattccagccacagtcactatgtttctgttcaaatagtcatacaaggagccctgctcgtgatactctgacacaagccagagttgtgtccaagttccattatctttgttgtcagctgcgatgaaaccgaggatgttctcgtgtctcagcatcaccgtctgataaatttccgcctcacggaaccaagatctctcatccctggaggagaatattttcacagccacatcttctccacaccatcttccgtgccacacttccccaaaccgaccttttcctacgatttcttgaagtacaattgtccttgcgattgttctttgaaccaagagaggcagacctgtgggaaggtgcagtgtgatattgttgcagaagtctgtgaagcaacattcggttttggtcacgttgttggaactgtgacagaagacctgagcatttagttccgggagggacacacacgatttgatcacctgctctttcccgttggttagcatgacggaggcccaacatgctccttccgtttggcaggtgaagtttgaagaatcacacaaaagacacacacacttcagtcctcagagcccagccaaggggaact

SEQ ID NO: 21 - DNA, 1899 bp, Rattus norvegicus
  source 1..1899: mol_type = genomic DNA
gggagcgcccgctgccactagagccaaccgcgcacttccgaagggtgtcgcggctgcgctcccctcccgcgccccgggaacttcaaagcggcccgcgctgcgggctgcgctctgggaccccgaagccttgcaccgccgcggggtggccatgaccccagcgcgccgctccgcactgagcctggccctcctgctggtggcactggcctccgaccttgcggcaggactgaagtgtgtgtgtcttttgtgtgattcctcaaactttacctgccaaaccgaaggagcatgctgggcctctgtcatgctaaccaacgggaaagaacaggtgatcaaatcgtgcgtgtccctcccggaactaaatgctcaggtcttctgtcacagttccaacaacgtgaccaagaccgaatgttgcttcacagacttctgcaacaacatcactctgcaccttcccacagcatctccagatgcccctagacttggccccacagagctgacggttgttatcactgtacctgtttgcctcctgtccatcgcagccatgctaacgatatgggcctgccaggaccgccagtgcacatacaggaagaccaagagacacaatgtggaggaaccactggcagagtacagccttgtcaatgctggaaaaaccctcaaagatctgatttatgatgccactgcctcgggctcaggatctggcctgcctcttttggttcaaagaaccatcgcaaggacaattgtacttcaagaaatcgtaggaaaaggtcggtttggggaagtgtggcacggaagatggtgtggagaagatgtggctgtgaaaatattctcctccagagatgagagatcttggttccgtgaggcagaaatttatcagacggtaatgctgagacatgagaatattctcggtttcatcgcggccgacaacaaagataatggaacctggactcagctttggcttgtgtcagagtatcacgagcagggctccttatatgactatttgaatagaaacatagtgaccgtggctggaatggtcaagttggcgctttcaatagcgagtggtctggctcacctacacatggagatcgtgggcactcaaggtaagcctgctattgctcaccgagatataaagtcaaagaatatcttagtcaaaaagtgtgacacttgtgccatagctgacttagggctggctgtgaaacatgattctatcatgaacactatagatataccccagaatcctaaagtgggaaccaagaggtatatggctcccgaaatgcttgatgatacaatgaacgtcaacatctttgagtccttcaagcgagctgacatctattcggtggggctggtttactgggaaatagctcgaaggtgttcagttggaggacttgttgaagagtaccagttgccttattatgacatggtgccttcagatccttccatagaggaaatgaggaaggtcgtttgtgatcagaaactccgaccaaatctcccaaaccagtggcaaagctgtgaggcgctccgggtcatgggaagaataatgcgtgagtgctggtatgccaacggggcagctcgcctgaccgccctgcgcgtgaagaagaccatttctcagctgtgtgtcaaggaagactgtaaggcctaaggccgcatacaggcgacgggaaagccctcaccactctctttcatgtctcctgctttgtgtaaatgttttcgtttcttttctgctgtgttttgttttagttctacctcaaagatgattcactacagtgttgaagtgtcccaaaggcagcatgaaaagataactctaagcatgggcaggtcttgactttcccagtttccatgttgtccgtacttttatttttaaaggtgacactattcatttttctttttatttaaggaggaagatgttat

SEQ ID NO: 22 - DNA, 1899 bp, Rattus norvegicus
  source 1..1899: mol_type = genomic DNA
ataacatcttcctccttaaataaaaagaaaaatgaatagtgtcacctttaaaaataaaagtacggacaacatggaaactgggaaagtcaagacctgcccatgcttagagttatcttttcatgctgcctttgggacacttcaacactgtagtgaatcatctttgaggtagaactaaaacaaaacacagcagaaaagaaacgaaaacatttacacaaagcaggagacatgaaagagagtggtgagggctttcccgtcgcctgtatgcggccttaggccttacagtcttccttgacacacagctgagaaatggtcttcttcacgcgcagggcggtcaggcgagctgccccgttggcataccagcactcacgcattattcttcccatgacccggagcgcctcacagctttgccactggtttgggagatttggtcggagtttctgatcacaaacgaccttcctcatttcctctatggaaggatctgaaggcaccatgtcataataaggcaactggtactcttcaacaagtcctccaactgaacaccttcgagctatttcccagtaaaccagccccaccgaatagatgtcagctcgcttgaaggactcaaagatgttgacgttcattgtatcatcaagcatttcgggagccatatacctcttggttcccactttaggattctggggtatatctatagtgttcatgatagaatcatgtttcacagccagccctaagtcagctatggcacaagtgtcacactttttgactaagatattctttgactttatatctcggtgagcaatagcaggcttaccttgagtgcccacgatctccatgtgtaggtgagccagaccactcgctattgaaagcgccaacttgaccattccagccacggtcactatgtttctattcaaatagtcatataaggagccctgctcgtgatactctgacacaagccaaagctgagtccaggttccattatctttgttgtcggccgcgatgaaaccgagaatattctcatgtctcagcattaccgtctgataaatttctgcctcacggaaccaagatctctcatctctggaggagaatattttcacagccacatcttctccacaccatcttccgtgccacacttccccaaaccgaccttttcctacgatttcttgaagtacaattgtccttgcgatggttctttgaaccaaaagaggcaggccagatcctgagcccgaggcagtggcatcataaatcagatctttgagggtttttccagcattgacaaggctgtactctgccagtggttcctccacattgtgtctcttggtcttcctgtatgtgcactggcggtcctggcaggcccatatcgttagcatggctgcgatggacaggaggcaaacaggtacagtgataacaaccgtcagctctgtggggccaagtctaggggcatctggagatgctgtgggaaggtgcagagtgatgttgttgcagaagtctgtgaagcaacattcggtcttggtcacgttgttggaactgtgacagaagacctgagcatttagttccgggagggacacgcacgatttgatcacctgttctttcccgttggttagcatgacagaggcccagcatgctccttcggtttggcaggtaaagtttgaggaatcacacaaaagacacacacacttcagtcctgccgcaaggtcggaggccagtgccaccagcaggagggccaggctcagtgcggagcggcgcgctggggtcatggccaccccgcggcggtgcaaggcttcggggtcccagagcgcagcccgcagcgcgggccgctttgaagttcccggggcgcgggaggggagcgcagccgcgacacccttcggaagtgcgcggttggctctagtggcagcgggcgctccc

SEQ ID NO: 23 - DNA, 3100 bp, Macaca mulatta
  source 1..3100: mol_type = genomic DNA
gctgccccggctgcctcgctctgctctggggcctcgcagccccggcgcggccgcctggtggcgatgacccgggcgctccgctcagcgctccgccaggctctcctgctgctcgccgcggccgccgagctctcggcaggactgaagtgtgtatgtcttttgtgtgattcttcaaactttacctgccaaacagaaggagcatgttgggcatcagtcatgctaaccaatggaaaagaacaggtgatcaaatcctgtgtctcccttccagaactgaatgctcaagtgttctgtcatagttccaacaatgttaccaaaaccgaatgctgcttcacagatttttgcaacaacataacactgcaccttccaacagcatcaccaaatgccccaaaacttggacccatggagctggccatcattattactgtgcctgtttgcctcctgtccatagctgcgatgctgacaatatgggcatgccagggtcgacagtgctcctacaggaagaaaaagagaccgaatgtggaggaaccactctctgagtgcaatctggtaaatgctggaaaaaccctgaaagatctgatttatgatgtaactgcctctggatctggctctggtctacctctgttggttcaaaggacaattgcaaggacgattgtgcttcaggaaatagtaggaaaaggtagatttggtgaggtgtggcatggaagatggtgtggggaagatgtggctgtgaaaatattctcctccagagatgaaagatcttggtttcgtgaggcagaaatttaccagacggtcatgctgcgacatgaaaacatccttggtttcattgctgctgacaacaaagataatggaacctggactcaactttggctggtatctgaatatcatgaacagggctccttatatgactatttgaatagaaatatagtgacggtggctggaatgatcaagctggcgctctcaattgctagtggtctggcacaccttcatatggagattgttgggacacaaggtaaacctgctattgctcatcgagacataaaatcaaagaatatcttagtgaaaaaatgtgaaacttgtgccatagcggacttagggttggctgtgaagcatgattcaatactgaacactatcgacatacctcagaatcctaaagtgggaacgaagaggtatatggctcctgaaatgcttgatgatacaatgaatgtgagtatctttgagtccttcaaacgagcggacatctattctgttggtctggtttactgggaaatagcccggaggtgttcggtcggaggaattgttgaggagtaccaattgccttattatgacatggtgccttcagatccctcgatagaggaaatgagaaaggttgtttgtgaccagaagtttcgaccaagtatcccaaaccagtggcaaagttgtgaagcactccgagtcatggggagaataatgcgtgagtgttggtatgccaacggagcggcccgcctaactgctcttcgtattaagaagactatatctcaactttgtgtcaaagaagactgcaaagcctaatgatgataattatgttaaaaagaaatctctcacagctttcttttccattttcccctttatgtgaatgtttttgccattttttttgttctacctcaaagataagacagtacagtatttaagtgcccataaggccgcgtgaaaagataactctaaagttaagcatgggcaggagttgacttcatccaatctctctgttatgtttaattttattttgaaagcaacacctccactcatctttttatttaataagaaagaaatatattacaaaagtataaaataagctctataaaaatgatatagtcattaagtttttattttacttgaaccaagagcacatgagtgaacaggaaaagatgttaaaacttttttttttttctgagacgaaaacatattaattaaacatgcaaactagaccatgctatcttaaatagaaatttaggtcatgcaatctatgtttccccatttttaagttagcaggactttttaaaaataaatattgctctaaattttaatatatcaaacatgtgaaagtggagctgctcagcggaagatgtgagatcggtgtcccacgtgcttggtctccccttctgctgttctccttcataatccactactgcagcagtcgctgaaccactaaacttgttcctttcctttgcaaaagacatacctgatatcctgagacgctgagaaatgtcccaaagtcacacagctaatggcagaactggcactaggtccacatcttgtgataatgagcactgtagagtcaactagcttcctacttttccttgaatagtgcttttctccgtatgcaatcttttattatgatatttgtggtttagtcatgcagaaggcatattattttgcagaatcatgatggacctgcatgaaatctcagaaccatatctgttgacatttttttctcatagaaatatcatggttatcccattcgttaatgagtattaatgttttctgaacacttccaaagattaatcaaacataaatattcattgtctgaaaatatctttaagatacaattcagaggtccctatttcctttgtacatatacacttagaaagaaaagacagaagaggaagaggaaagaaggaaatattttgagaatatattgagaagaattaagaaaactcttcaatgaagtgtaacaaccaaaccctacagagggtatgagaaacagcaaatacatattcctctaccctttcacaatgagcgagtgagtacagaagaatgctcatgatagttccgccttcattctactttctgtggacacagagtaatgaatatttaatgggacgttaaatatgcccttcaaatctataatgctattttggtaaaggaaatttaacatgatgtcttttattctcctaaaacatcttttgtcaaactccattccatagaactttcttctgctgagatgatccaagaccaaagtgttctttgatattgcttagaaagtgatagtacatgttagcatataatgtattttgaagaatgaaataaatgctattgataacagtaaaaacaaaaaacaaaacaaaac

SEQ ID NO: 24 - DNA, 3100 bp, Macaca mulatta
  source 1..3100: mol_type = genomic DNA
gttttgttttgttttttgtttttactgttatcaatagcatttatttcattcttcaaaatacattatatgctaacatgtactatcactttctaagcaatatcaaagaacactttggtcttggatcatctcagcagaagaaagttctatggaatggagtttgacaaaagatgttttaggagaataaaagacatcatgttaaatttcctttaccaaaatagcattatagatttgaagggcatatttaacgtcccattaaatattcattactctgtgtccacagaaagtagaatgaaggcggaactatcatgagcattcttctgtactcactcgctcattgtgaaagggtagaggaatatgtatttgctgtttctcataccctctgtagggtttggttgttacacttcattgaagagttttcttaattcttctcaatatattctcaaaatatttccttctttcctcttcctcttctgtcttttctttctaagtgtatatgtacaaaggaaatagggacctctgaattgtatcttaaagatattttcagacaatgaatatttatgtttgattaatctttggaagtgttcagaaaacattaatactcattaacgaatgggataaccatgatatttctatgagaaaaaaatgtcaacagatatggttctgagatttcatgcaggtccatcatgattctgcaaaataatatgccttctgcatgactaaaccacaaatatcataataaaagattgcatacggagaaaagcactattcaaggaaaagtaggaagctagttgactctacagtgctcattatcacaagatgtggacctagtgccagttctgccattagctgtgtgactttgggacatttctcagcgtctcaggatatcaggtatgtcttttgcaaaggaaaggaacaagtttagtggttcagcgactgctgcagtagtggattatgaaggagaacagcagaaggggagaccaagcacgtgggacaccgatctcacatcttccgctgagcagctccactttcacatgtttgatatattaaaatttagagcaatatttatttttaaaaagtcctgctaacttaaaaatggggaaacatagattgcatgacctaaatttctatttaagatagcatggtctagtttgcatgtttaattaatatgttttcgtctcagaaaaaaaaaaaagttttaacatcttttcctgttcactcatgtgctcttggttcaagtaaaataaaaacttaatgactatatcatttttatagagcttattttatacttttgtaatatatttctttcttattaaataaaaagatgagtggaggtgttgctttcaaaataaaattaaacataacagagagattggatgaagtcaactcctgcccatgcttaactttagagttatcttttcacgcggccttatgggcacttaaatactgtactgtcttatctttgaggtagaacaaaaaaaatggcaaaaacattcacataaaggggaaaatggaaaagaaagctgtgagagatttctttttaacataattatcatcattaggctttgcagtcttctttgacacaaagttgagatatagtcttcttaatacgaagagcagttaggcgggccgctccgttggcataccaacactcacgcattattctccccatgactcggagtgcttcacaactttgccactggtttgggatacttggtcgaaacttctggtcacaaacaacctttctcatttcctctatcgagggatctgaaggcaccatgtcataataaggcaattggtactcctcaacaattcctccgaccgaacacctccgggctatttcccagtaaaccagaccaacagaatagatgtccgctcgtttgaaggactcaaagatactcacattcattgtatcatcaagcatttcaggagccatatacctcttcgttcccactttaggattctgaggtatgtcgatagtgttcagtattgaatcatgcttcacagccaaccctaagtccgctatggcacaagtttcacattttttcactaagatattctttgattttatgtctcgatgagcaatagcaggtttaccttgtgtcccaacaatctccatatgaaggtgtgccagaccactagcaattgagagcgccagcttgatcattccagccaccgtcactatatttctattcaaatagtcatataaggagccctgttcatgatattcagataccagccaaagttgagtccaggttccattatctttgttgtcagcagcaatgaaaccaaggatgttttcatgtcgcagcatgaccgtctggtaaatttctgcctcacgaaaccaagatctttcatctctggaggagaatattttcacagccacatcttccccacaccatcttccatgccacacctcaccaaatctaccttttcctactatttcctgaagcacaatcgtccttgcaattgtcctttgaaccaacagaggtagaccagagccagatccagaggcagttacatcataaatcagatctttcagggtttttccagcatttaccagattgcactcagagagtggttcctccacattcggtctctttttcttcctgtaggagcactgtcgaccctggcatgcccatattgtcagcatcgcagctatggacaggaggcaaacaggcacagtaataatgatggccagctccatgggtccaagttttggggcatttggtgatgctgttggaaggtgcagtgttatgttgttgcaaaaatctgtgaagcagcattcggttttggtaacattgttggaactatgacagaacacttgagcattcagttctggaagggagacacaggatttgatcacctgttcttttccattggttagcatgactgatgcccaacatgctccttctgtttggcaggtaaagtttgaagaatcacacaaaagacatacacacttcagtcctgccgagagctcggcggccgcggcgagcagcaggagagcctggcggagcgctgagcggagcgcccgggtcatcgccaccaggcggccgcgccggggctgcgaggccccagagcagagcgaggcagccggggcagc

SEQ ID NO: 25 - DNA, 2916 bp, Homo sapiens
  source 1..2916: mol_type = genomic DNA
actctgcagcctgggctctgtgagactgaggtggcggtcagccggagtgagtgttggggtcctggggcacctgccttacatggcttgtttatgaacattaaagggaagaagttgaagcttgaggagcgaggatggcagtcaacaaaggcctcaccttgctggatggagacctccctgagcaggagaatgtgctgcagcgggtcctgcagctgccggtggtgagtggcacctgcgaatgcttccagaagacctacaccagcactaaggaagcccaccccctggtggcctctgtgtgcaatgcctatgagaagggcgtgcagagcgccagtagcttggctgcctggagcatggagccggtggtccgcaggctgtccacccagttcacagctgccaatgagctggcctgccgaggcttggaccacctggaggaaaagatccccgccctccagtacccccctgaaaagattgcttctgagctgaaggacaccatctccacccgcctccgcagtgccagaaacagcatcagcgttcccatcgcgagcacttcagacaaggtcctgggggccgctttggccgggtgcgagcttgcctggggggtggccagagacactgcggaatttgctgccaacactcgagctggccgactggcttctggaggggccgacttggccttgggcagcattgagaaggtggtggagtacctcctccctccagacaaggaagagtcagcccctgctcctggacaccagcaagcccagaagtctcccaaggccaagccaagcctcttgagcagggttggggctctgaccaacaccctctctcgatacaccgtgcagaccatggcccgggccctggagcagggccacaccgtggccatgtggatcccaggcgtggtgcccctgagcagcctggcccagtggggtgcctcagtggccatgcaggcggtgtcccggcggaggagcgaagtgcgggtaccctggctgcacagcctcgcagccgcccaggaggaggatcatgaggaccagacagacacggagggagaggacacggaggaggaggaagaattggagactgaggagaacaagttcagtgaggtagcagccctgccaggccctcgaggcctcctgggtggtgtggcacataccctgcagaagaccctccagaccaccatctcggctgtgacatgggcacctgcagctgtgctgggcatggcagggagggtgctgcacctcacaccagcccctgctgtctcctcaaccaaggggagggccatgtccctatcagatgccctgaagggcgttactgacaacgtggtggacacagtggtgcattacgtgccgctccccaggctgtcgctgatggagcccgagagcgaattccgggacatcgacaacccaccagccgaggtcgagcgccgggaggcggagcgcagagcgtctggggcgccgtccgccggcccggagcccgccccgcgtctcgcacagccccgccgcagcctgcgcagcgcgcagagccccggcgcgccccccggcccgggcctggaggacgaagtcgccacgcccgcagcgccgcgcccgggcttcccggccgtgccccgcgagaagccaaagcgcagggtcagcgacagcttcttccggcccagcgtcatggagcccatcctgggccgcacgcattacagccagctgcgcaagaagagctgagtcgccgcaccagccgccgcgccccgggccggcgggtttctctaacaaataaacagaacccgcactgcccaggcgagcgttgccactttcaaagtggtcccctggggagctcagcctcatcctgatgatgctgccaaggcgcactttttatttttattttatttttattttttttttagcatccttttggggcttcactctcagagccagtttttaagggacaccagagccgcagcctgctctgattctatggcttggttgttactataagagtaattgcctaacttgatttttcatctctttaaccaaacttgtggccaaaagatatttgaccgtttccaaaattcagattctgcctctgcggataaatatttgccacgaatgagtaactcctgtcaccactctgaaggtccagacagaaggttttgacacattcttagcactgaactcctctgtgatctaggatgatctgttccccctctgatgaacatcctctgatgatctaggctcccagcaggctactttgaagggaacaatcagatgcaaaagctcttgggtgtttatttaaaatactagtgtcactttctgagtacccgccgcttcacaggctgagtccaggcctgtgtgctttgtagagccagctgcttgctcacagccacatttccatttgcatcattactgccttcacctgcatagtcactcttttgatgctggggaaccaaaatggtgatgatatatagactttatgtatagccacagttcatccccaaccctagtcttcgaaatgttaatatttgataaatctagaaaatgcattcatacaattacagaattcaaatattgcaaaaggatgtgtgtctttctccccgagctcccctgttccccttcattgaaaaccaccacggtgccatctcttgtgtatgcagggctatgcacctgcaggcacgtgtgtatgcactccccgcttgtgtttacacaagctgtggggtgttacgcatgcctgcttttttcacttaataatacagcttggagagatttttgtatcacattataaatcccactcgctctttttgatggccacataataactactgcataatatggatacgccttatttgatttaactagttccctaatgatggacttttaagttgtttcctttttttttcttttttgctactgcaaacgatgctataataaatgtccttatcaaaaa

SEQ ID NO: 26 - DNA, 2916 bp, Homo sapiens
  source 1..2916: mol_type = genomic DNA
tttttgataaggacatttattatagcatcgtttgcagtagcaaaaaagaaaaaaaaaggaaacaacttaaaagtccatcattagggaactagttaaatcaaataaggcgtatccatattatgcagtagttattatgtggccatcaaaaagagcgagtgggatttataatgtgatacaaaaatctctccaagctgtattattaagtgaaaaaagcaggcatgcgtaacaccccacagcttgtgtaaacacaagcggggagtgcatacacacgtgcctgcaggtgcatagccctgcatacacaagagatggcaccgtggtggttttcaatgaaggggaacaggggagctcggggagaaagacacacatccttttgcaatatttgaattctgtaattgtatgaatgcattttctagatttatcaaatattaacatttcgaagactagggttggggatgaactgtggctatacataaagtctatatatcatcaccattttggttccccagcatcaaaagagtgactatgcaggtgaaggcagtaatgatgcaaatggaaatgtggctgtgagcaagcagctggctctacaaagcacacaggcctggactcagcctgtgaagcggcgggtactcagaaagtgacactagtattttaaataaacacccaagagcttttgcatctgattgttcccttcaaagtagcctgctgggagcctagatcatcagaggatgttcatcagagggggaacagatcatcctagatcacagaggagttcagtgctaagaatgtgtcaaaaccttctgtctggaccttcagagtggtgacaggagttactcattcgtggcaaatatttatccgcagaggcagaatctgaattttggaaacggtcaaatatcttttggccacaagtttggttaaagagatgaaaaatcaagttaggcaattactcttatagtaacaaccaagccatagaatcagagcaggctgcggctctggtgtcccttaaaaactggctctgagagtgaagccccaaaaggatgctaaaaaaaaaataaaaataaaataaaaataaaaagtgcgccttggcagcatcatcaggatgaggctgagctccccaggggaccactttgaaagtggcaacgctcgcctgggcagtgcgggttctgtttatttgttagagaaacccgccggcccggggcgcggcggctggtgcggcgactcagctcttcttgcgcagctggctgtaatgcgtgcggcccaggatgggctccatgacgctgggccggaagaagctgtcgctgaccctgcgctttggcttctcgcggggcacggccgggaagcccgggcgcggcgctgcgggcgtggcgacttcgtcctccaggcccgggccggggggcgcgccggggctctgcgcgctgcgcaggctgcggcggggctgtgcgagacgcggggcgggctccgggccggcggacggcgccccagacgctctgcgctccgcctcccggcgctcgacctcggctggtgggttgtcgatgtcccggaattcgctctcgggctccatcagcgacagcctggggagcggcacgtaatgcaccactgtgtccaccacgttgtcagtaacgcccttcagggcatctgatagggacatggccctccccttggttgaggagacagcaggggctggtgtgaggtgcagcaccctccctgccatgcccagcacagctgcaggtgcccatgtcacagccgagatggtggtctggagggtcttctgcagggtatgtgccacaccacccaggaggcctcgagggcctggcagggctgctacctcactgaacttgttctcctcagtctccaattcttcctcctcctccgtgtcctctccctccgtgtctgtctggtcctcatgatcctcctcctgggcggctgcgaggctgtgcagccagggtacccgcacttcgctcctccgccgggacaccgcctgcatggccactgaggcaccccactgggccaggctgctcaggggcaccacgcctgggatccacatggccacggtgtggccctgctccagggcccgggccatggtctgcacggtgtatcgagagagggtgttggtcagagccccaaccctgctcaagaggcttggcttggccttgggagacttctgggcttgctggtgtccaggagcaggggctgactcttccttgtctggagggaggaggtactccaccaccttctcaatgctgcccaaggccaagtcggcccctccagaagccagtcggccagctcgagtgttggcagcaaattccgcagtgtctctggccaccccccaggcaagctcgcacccggccaaagcggcccccaggaccttgtctgaagtgctcgcgatgggaacgctgatgctgtttctggcactgcggaggcgggtggagatggtgtccttcagctcagaagcaatcttttcaggggggtactggagggcggggatcttttcctccaggtggtccaagcctcggcaggccagctcattggcagctgtgaactgggtggacagcctgcggaccaccggctccatgctccaggcagccaagctactggcgctctgcacgcccttctcataggcattgcacacagaggccaccagggggtgggcttccttagtgctggtgtaggtcttctggaagcattcgcaggtgccactcaccaccggcagctgcaggacccgctgcagcacattctcctgctcagggaggtctccatccagcaaggtgaggcctttgttgactgccatcctcgctcctcaagcttcaacttcttccctttaatgttcataaacaagccatgtaaggcaggtgccccaggaccccaacactcactccggctgaccgccacctcagtctcacagagcccaggctgcagagt

SEQ ID NO: 27 - DNA, 2845 bp, Homo sapiens
  source 1..2845: mol_type = genomic DNA
actctgcagcctgggctctgtgagactgaggtggcggtcagccggacttgaggagcgaggatggcagtcaacaaaggcctcaccttgctggatggagacctccctgagcaggagaatgtgctgcagcgggtcctgcagctgccggtggtgagtggcacctgcgaatgcttccagaagacctacaccagcactaaggaagcccaccccctggtggcctctgtgtgcaatgcctatgagaagggcgtgcagagcgccagtagcttggctgcctggagcatggagccggtggtccgcaggctgtccacccagttcacagctgccaatgagctggcctgccgaggcttggaccacctggaggaaaagatccccgccctccagtacccccctgaaaagattgcttctgagctgaaggacaccatctccacccgcctccgcagtgccagaaacagcatcagcgttcccatcgcgagcacttcagacaaggtcctgggggccgctttggccgggtgcgagcttgcctggggggtggccagagacactgcggaatttgctgccaacactcgagctggccgactggcttctggaggggccgacttggccttgggcagcattgagaaggtggtggagtacctcctccctccagacaaggaagagtcagcccctgctcctggacaccagcaagcccagaagtctcccaaggccaagccaagcctcttgagcagggttggggctctgaccaacaccctctctcgatacaccgtgcagaccatggcccgggccctggagcagggccacaccgtggccatgtggatcccaggcgtggtgcccctgagcagcctggcccagtggggtgcctcagtggccatgcaggcggtgtcccggcggaggagcgaagtgcgggtaccctggctgcacagcctcgcagccgcccaggaggaggatcatgaggaccagacagacacggagggagaggacacggaggaggaggaagaattggagactgaggagaacaagttcagtgaggtagcagccctgccaggccctcgaggcctcctgggtggtgtggcacataccctgcagaagaccctccagaccaccatctcggctgtgacatgggcacctgcagctgtgctgggcatggcagggagggtgctgcacctcacaccagcccctgctgtctcctcaaccaaggggagggccatgtccctatcagatgccctgaagggcgttactgacaacgtggtggacacagtggtgcattacgtgccgctccccaggctgtcgctgatggagcccgagagcgaattccgggacatcgacaacccaccagccgaggtcgagcgccgggaggcggagcgcagagcgtctggggcgccgtccgccggcccggagcccgccccgcgtctcgcacagccccgccgcagcctgcgcagcgcgcagagccccggcgcgccccccggcccgggcctggaggacgaagtcgccacgcccgcagcgccgcgcccgggcttcccggccgtgccccgcgagaagccaaagcgcagggtcagcgacagcttcttccggcccagcgtcatggagcccatcctgggccgcacgcattacagccagctgcgcaagaagagctgagtcgccgcaccagccgccgcgccccgggccggcgggtttctctaacaaataaacagaacccgcactgcccaggcgagcgttgccactttcaaagtggtcccctggggagctcagcctcatcctgatgatgctgccaaggcgcactttttatttttattttatttttattttttttttagcatccttttggggcttcactctcagagccagtttttaagggacaccagagccgcagcctgctctgattctatggcttggttgttactataagagtaattgcctaacttgatttttcatctctttaaccaaacttgtggccaaaagatatttgaccgtttccaaaattcagattctgcctctgcggataaatatttgccacgaatgagtaactcctgtcaccactctgaaggtccagacagaaggttttgacacattcttagcactgaactcctctgtgatctaggatgatctgttccccctctgatgaacatcctctgatgatctaggctcccagcaggctactttgaagggaacaatcagatgcaaaagctcttgggtgtttatttaaaatactagtgtcactttctgagtacccgccgcttcacaggctgagtccaggcctgtgtgctttgtagagccagctgcttgctcacagccacatttccatttgcatcattactgccttcacctgcatagtcactcttttgatgctggggaaccaaaatggtgatgatatatagactttatgtatagccacagttcatccccaaccctagtcttcgaaatgttaatatttgataaatctagaaaatgcattcatacaattacagaattcaaatattgcaaaaggatgtgtgtctttctccccgagctcccctgttccccttcattgaaaaccaccacggtgccatctcttgtgtatgcagggctatgcacctgcaggcacgtgtgtatgcactccccgcttgtgtttacacaagctgtggggtgttacgcatgcctgcttttttcacttaataatacagcttggagagatttttgtatcacattataaatcccactcgctctttttgatggccacataataactactgcataatatggatacgccttatttgatttaactagttccctaatgatggacttttaagttgtttcctttttttttcttttttgctactgcaaacgatgctataataaatgtccttatcaaaaa

SEQ ID NO: 28 - DNA, 2845 bp, Homo sapiens
  source 1..2845: mol_type = genomic DNA
tttttgataaggacatttattatagcatcgtttgcagtagcaaaaaagaaaaaaaaaggaaacaacttaaaagtccatcattagggaactagttaaatcaaataaggcgtatccatattatgcagtagttattatgtggccatcaaaaagagcgagtgggatttataatgtgatacaaaaatctctccaagctgtattattaagtgaaaaaagcaggcatgcgtaacaccccacagcttgtgtaaacacaagcggggagtgcatacacacgtgcctgcaggtgcatagccctgcatacacaagagatggcaccgtggtggttttcaatgaaggggaacaggggagctcggggagaaagacacacatccttttgcaatatttgaattctgtaattgtatgaatgcattttctagatttatcaaatattaacatttcgaagactagggttggggatgaactgtggctatacataaagtctatatatcatcaccattttggttccccagcatcaaaagagtgactatgcaggtgaaggcagtaatgatgcaaatggaaatgtggctgtgagcaagcagctggctctacaaagcacacaggcctggactcagcctgtgaagcggcgggtactcagaaagtgacactagtattttaaataaacacccaagagcttttgcatctgattgttcccttcaaagtagcctgctgggagcctagatcatcagaggatgttcatcagagggggaacagatcatcctagatcacagaggagttcagtgctaagaatgtgtcaaaaccttctgtctggaccttcagagtggtgacaggagttactcattcgtggcaaatatttatccgcagaggcagaatctgaattttggaaacggtcaaatatcttttggccacaagtttggttaaagagatgaaaaatcaagttaggcaattactcttatagtaacaaccaagccatagaatcagagcaggctgcggctctggtgtcccttaaaaactggctctgagagtgaagccccaaaaggatgctaaaaaaaaaataaaaataaaataaaaataaaaagtgcgccttggcagcatcatcaggatgaggctgagctccccaggggaccactttgaaagtggcaacgctcgcctgggcagtgcgggttctgtttatttgttagagaaacccgccggcccggggcgcggcggctggtgcggcgactcagctcttcttgcgcagctggctgtaatgcgtgcggcccaggatgggctccatgacgctgggccggaagaagctgtcgctgaccctgcgctttggcttctcgcggggcacggccgggaagcccgggcgcggcgctgcgggcgtggcgacttcgtcctccaggcccgggccggggggcgcgccggggctctgcgcgctgcgcaggctgcggcggggctgtgcgagacgcggggcgggctccgggccggcggacggcgccccagacgctctgcgctccgcctcccggcgctcgacctcggctggtgggttgtcgatgtcccggaattcgctctcgggctccatcagcgacagcctggggagcggcacgtaatgcaccactgtgtccaccacgttgtcagtaacgcccttcagggcatctgatagggacatggccctccccttggttgaggagacagcaggggctggtgtgaggtgcagcaccctccctgccatgcccagcacagctgcaggtgcccatgtcacagccgagatggtggtctggagggtcttctgcagggtatgtgccacaccacccaggaggcctcgagggcctggcagggctgctacctcactgaacttgttctcctcagtctccaattcttcctcctcctccgtgtcctctccctccgtgtctgtctggtcctcatgatcctcctcctgggcggctgcgaggctgtgcagccagggtacccgcacttcgctcctccgccgggacaccgcctgcatggccactgaggcaccccactgggccaggctgctcaggggcaccacgcctgggatccacatggccacggtgtggccctgctccagggcccgggccatggtctgcacggtgtatcgagagagggtgttggtcagagccccaaccctgctcaagaggcttggcttggccttgggagacttctgggcttgctggtgtccaggagcaggggctgactcttccttgtctggagggaggaggtactccaccaccttctcaatgctgcccaaggccaagtcggcccctccagaagccagtcggccagctcgagtgttggcagcaaattccgcagtgtctctggccaccccccaggcaagctcgcacccggccaaagcggcccccaggaccttgtctgaagtgctcgcgatgggaacgctgatgctgtttctggcactgcggaggcgggtggagatggtgtccttcagctcagaagcaatcttttcaggggggtactggagggcggggatcttttcctccaggtggtccaagcctcggcaggccagctcattggcagctgtgaactgggtggacagcctgcggaccaccggctccatgctccaggcagccaagctactggcgctctgcacgcccttctcataggcattgcacacagaggccaccagggggtgggcttccttagtgctggtgtaggtcttctggaagcattcgcaggtgccactcaccaccggcagctgcaggacccgctgcagcacattctcctgctcagggaggtctccatccagcaaggtgaggcctttgttgactgccatcctcgctcctcaagtccggctgaccgccacctcagtctcacagagcccaggctgcagagt

SEQ ID NO: 29 - DNA, 1935 bp, Mus musculus
  source 1..1935: mol_type = genomic DNA
tgggctgtctgagactgaggtggcggtctgctgcagtgagtgtggggtccttgggcgtctgccttacctagctgctttctcggtgttacagcgtggagagtaaggatgtcaatgaacaagggcccaaccctgctggatggagacctccctgagcaggagaacgtgctccagagagttctgcagctgcctgtggtgagcgggacctgtgagtgcttccagaagacctacaacagcaccaaagaagcccaccccctggtggcctctgtgtgcaatgcctatgagaagggtgtacagggtgccagcaacctggctgcctggagcatggagccggtggtccgtcggctgtccacccagttcacagctgccaatgagttggcctgcagaggcctggaccacctggaggaaaagatcccggctcttcaataccctccagaaaagatcgcctctgaactgaagggcaccatctctacccgccttcgaagcgccaggaacagcatcagtgtgcccattgcaagcacctctgacaaggttctgggggccactctggccggctgcgagcttgccttggggatggccaaagagacagcagaatatgccgccaacacccgggttggccgactggcctctggaggggctgatctggctctgggaagcatcgagaaggtggtagagttcctcctgccaccagacaaggagtcagccccttcttccggacggcagaggacccagaaggctcccaaggccaaaccaagccttgtgaggagggtcagcaccctggccaacactctttctcgacacaccatgcaaaccacagcatgggccctgaagcagggccactctctggccatgtggatcccgggtgtggcacccctgagcagcctggcccagtggggcgcatcggcagccatgcaggtggtgtcccggcggcagagtgaggtgcgggtgccctggctgcacaacctggcagcctctcaggatgagagccatgacgaccagacagacacagagggagaggagacagacgacgaggaggaggaagaagagtccgaggctgaggagaacgtgctcagagaggttacagccctgcccaacccgagaggcctcctgggtggtgtggtacacaccgtgcagaacactctccggaacaccatctccgcagtgacctgggcacctgcggctgtgctgggcacggtgggaaggatcctgcacctcacaccagcccaggctgtctcctctaccaaagggagggccatgtccctatccgatgccctgaagggtgttacggataacgtggtagacactgtggtacactatgtgccgcttcccaggctgtccctgatggagcccgagagcgaattccgagacatcgataacccttcagcagaggcggagcgcaaagggtccggggcgcggcccgccagcccggagtccaccccgcgcccgggccagccccgcggcagcttgcgcagcgtgcggggtctcagcgcgccctcctgccccggcctggacgacaaaaccgaggcgtcagcgcgtcccggcttcctggctatgcccagagagaagcctgcgcgcagagtcagcgacagcttcttccggcccagcgtcatggagcccatcctgggccgcgcgcagtacagccagctgcgcaagaagagctgagcagactgcgcccctgctcgccccacgggaaggtcgcttctcgtcaagggcctttcctttagggtggcctgagccacgaccccacgatgctctcgaggcacacatcatgtctaaagcatcctttgggggcttgaccatcagaaccaatttttaaggggcaccagagccgcggtcgactctcctttctcgtgggcagattctctcatggcttcttcttcctcttctttttttaaaaactataaaagcaattgattgttaaaaaaaaaaaaaaaaaaa

SEQ ID NO: 30 - DNA, 1935 bp, Mus musculus
  source 1..1935: mol_type = genomic DNA
tttttttttttttttttttaacaatcaattgcttttatagtttttaaaaaaagaagaggaagaagaagccatgagagaatctgcccacgagaaaggagagtcgaccgcggctctggtgccccttaaaaattggttctgatggtcaagcccccaaaggatgctttagacatgatgtgtgcctcgagagcatcgtggggtcgtggctcaggccaccctaaaggaaaggcccttgacgagaagcgaccttcccgtggggcgagcaggggcgcagtctgctcagctcttcttgcgcagctggctgtactgcgcgcggcccaggatgggctccatgacgctgggccggaagaagctgtcgctgactctgcgcgcaggcttctctctgggcatagccaggaagccgggacgcgctgacgcctcggttttgtcgtccaggccggggcaggagggcgcgctgagaccccgcacgctgcgcaagctgccgcggggctggcccgggcgcggggtggactccgggctggcgggccgcgccccggaccctttgcgctccgcctctgctgaagggttatcgatgtctcggaattcgctctcgggctccatcagggacagcctgggaagcggcacatagtgtaccacagtgtctaccacgttatccgtaacacccttcagggcatcggatagggacatggccctccctttggtagaggagacagcctgggctggtgtgaggtgcaggatccttcccaccgtgcccagcacagccgcaggtgcccaggtcactgcggagatggtgttccggagagtgttctgcacggtgtgtaccacaccacccaggaggcctctcgggttgggcagggctgtaacctctctgagcacgttctcctcagcctcggactcttcttcctcctcctcgtcgtctgtctcctctccctctgtgtctgtctggtcgtcatggctctcatcctgagaggctgccaggttgtgcagccagggcacccgcacctcactctgccgccgggacaccacctgcatggctgccgatgcgccccactgggccaggctgctcaggggtgccacacccgggatccacatggccagagagtggccctgcttcagggcccatgctgtggtttgcatggtgtgtcgagaaagagtgttggccagggtgctgaccctcctcacaaggcttggtttggccttgggagccttctgggtcctctgccgtccggaagaaggggctgactccttgtctggtggcaggaggaactctaccaccttctcgatgcttcccagagccagatcagcccctccagaggccagtcggccaacccgggtgttggcggcatattctgctgtctctttggccatccccaaggcaagctcgcagccggccagagtggcccccagaaccttgtcagaggtgcttgcaatgggcacactgatgctgttcctggcgcttcgaaggcgggtagagatggtgcccttcagttcagaggcgatcttttctggagggtattgaagagccgggatcttttcctccaggtggtccaggcctctgcaggccaactcattggcagctgtgaactgggtggacagccgacggaccaccggctccatgctccaggcagccaggttgctggcaccctgtacacccttctcataggcattgcacacagaggccaccagggggtgggcttctttggtgctgttgtaggtcttctggaagcactcacaggtcccgctcaccacaggcagctgcagaactctctggagcacgttctcctgctcagggaggtctccatccagcagggttgggcccttgttcattgacatccttactctccacgctgtaacaccgagaaagcagctaggtaaggcagacgcccaaggaccccacactcactgcagcagaccgccacctcagtctcagacagccca

SEQ ID NO: 31 - DNA, 1879 bp, Mus musculus
  source 1..1879: mol_type = genomic DNA
tgggctgtctgagactgaggtggcggtctgctgcacgtggagagtaaggatgtcaatgaacaagggcccaaccctgctggatggagacctccctgagcaggagaacgtgctccagagagttctgcagctgcctgtggtgagcgggacctgtgagtgcttccagaagacctacaacagcaccaaagaagcccaccccctggtggcctctgtgtgcaatgcctatgagaagggtgtacagggtgccagcaacctggctgcctggagcatggagccggtggtccgtcggctgtccacccagttcacagctgccaatgagttggcctgcagaggcctggaccacctggaggaaaagatcccggctcttcaataccctccagaaaagatcgcctctgaactgaagggcaccatctctacccgccttcgaagcgccaggaacagcatcagtgtgcccattgcaagcacctctgacaaggttctgggggccactctggccggctgcgagcttgccttggggatggccaaagagacagcagaatatgccgccaacacccgggttggccgactggcctctggaggggctgatctggctctgggaagcatcgagaaggtggtagagttcctcctgccaccagacaaggagtcagccccttcttccggacggcagaggacccagaaggctcccaaggccaaaccaagccttgtgaggagggtcagcaccctggccaacactctttctcgacacaccatgcaaaccacagcatgggccctgaagcagggccactctctggccatgtggatcccgggtgtggcacccctgagcagcctggcccagtggggcgcatcggcagccatgcaggtggtgtcccggcggcagagtgaggtgcgggtgccctggctgcacaacctggcagcctctcaggatgagagccatgacgaccagacagacacagagggagaggagacagacgacgaggaggaggaagaagagtccgaggctgaggagaacgtgctcagagaggttacagccctgcccaacccgagaggcctcctgggtggtgtggtacacaccgtgcagaacactctccggaacaccatctccgcagtgacctgggcacctgcggctgtgctgggcacggtgggaaggatcctgcacctcacaccagcccaggctgtctcctctaccaaagggagggccatgtccctatccgatgccctgaagggtgttacggataacgtggtagacactgtggtacactatgtgccgcttcccaggctgtccctgatggagcccgagagcgaattccgagacatcgataacccttcagcagaggcggagcgcaaagggtccggggcgcggcccgccagcccggagtccaccccgcgcccgggccagccccgcggcagcttgcgcagcgtgcggggtctcagcgcgccctcctgccccggcctggacgacaaaaccgaggcgtcagcgcgtcccggcttcctggctatgcccagagagaagcctgcgcgcagagtcagcgacagcttcttccggcccagcgtcatggagcccatcctgggccgcgcgcagtacagccagctgcgcaagaagagctgagcagactgcgcccctgctcgccccacgggaaggtcgcttctcgtcaagggcctttcctttagggtggcctgagccacgaccccacgatgctctcgaggcacacatcatgtctaaagcatcctttgggggcttgaccatcagaaccaatttttaaggggcaccagagccgcggtcgactctcctttctcgtgggcagattctctcatggcttcttcttcctcttctttttttaaaaactataaaagcaattgattgttaaaaaaaaaaaaaaaaaaa

SEQ ID NO: 32 - DNA, 1879 bp, Mus musculus
  source 1..1879: mol_type = genomic DNA
tttttttttttttttttttaacaatcaattgcttttatagtttttaaaaaaagaagaggaagaagaagccatgagagaatctgcccacgagaaaggagagtcgaccgcggctctggtgccccttaaaaattggttctgatggtcaagcccccaaaggatgctttagacatgatgtgtgcctcgagagcatcgtggggtcgtggctcaggccaccctaaaggaaaggcccttgacgagaagcgaccttcccgtggggcgagcaggggcgcagtctgctcagctcttcttgcgcagctggctgtactgcgcgcggcccaggatgggctccatgacgctgggccggaagaagctgtcgctgactctgcgcgcaggcttctctctgggcatagccaggaagccgggacgcgctgacgcctcggttttgtcgtccaggccggggcaggagggcgcgctgagaccccgcacgctgcgcaagctgccgcggggctggcccgggcgcggggtggactccgggctggcgggccgcgccccggaccctttgcgctccgcctctgctgaagggttatcgatgtctcggaattcgctctcgggctccatcagggacagcctgggaagcggcacatagtgtaccacagtgtctaccacgttatccgtaacacccttcagggcatcggatagggacatggccctccctttggtagaggagacagcctgggctggtgtgaggtgcaggatccttcccaccgtgcccagcacagccgcaggtgcccaggtcactgcggagatggtgttccggagagtgttctgcacggtgtgtaccacaccacccaggaggcctctcgggttgggcagggctgtaacctctctgagcacgttctcctcagcctcggactcttcttcctcctcctcgtcgtctgtctcctctccctctgtgtctgtctggtcgtcatggctctcatcctgagaggctgccaggttgtgcagccagggcacccgcacctcactctgccgccgggacaccacctgcatggctgccgatgcgccccactgggccaggctgctcaggggtgccacacccgggatccacatggccagagagtggccctgcttcagggcccatgctgtggtttgcatggtgtgtcgagaaagagtgttggccagggtgctgaccctcctcacaaggcttggtttggccttgggagccttctgggtcctctgccgtccggaagaaggggctgactccttgtctggtggcaggaggaactctaccaccttctcgatgcttcccagagccagatcagcccctccagaggccagtcggccaacccgggtgttggcggcatattctgctgtctctttggccatccccaaggcaagctcgcagccggccagagtggcccccagaaccttgtcagaggtgcttgcaatgggcacactgatgctgttcctggcgcttcgaaggcgggtagagatggtgcccttcagttcagaggcgatcttttctggagggtattgaagagccgggatcttttcctccaggtggtccaggcctctgcaggccaactcattggcagctgtgaactgggtggacagccgacggaccaccggctccatgctccaggcagccaggttgctggcaccctgtacacccttctcataggcattgcacacagaggccaccagggggtgggcttctttggtgctgttgtaggtcttctggaagcactcacaggtcccgctcaccacaggcagctgcagaactctctggagcacgttctcctgctcagggaggtctccatccagcagggttgggcccttgttcattgacatccttactctccacgtgcagcagaccgccacctcagtctcagacagccca

SEQ ID NO: 33 - DNA, 2025 bp, Rattus norvegicus
  source 1..2025: mol_type = genomic DNA
gtggctctcagctgcatgtgaagagtaaggatgtccatgaacaagggcccgaccctgctggatggagacctccctgaacaggagaatgtgctccagagagtcctgcagctgcctgtggtgagcgggacctgtgagtgcttccagaagacctataacagcaccaaagaagcccaccccctggtggcctctgtgtgcaatgcctatgagaagggtgtacagggtgccagcaacctggctgcctggagcatggagccggtggtccgccggctctccacccagttcacagctgctaatgagttggcctgcagaggcctggaccacctggaggaaaagatcccggctcttcaataccctccggaaaagatcgcctctgaactgaagggcaccatctctacccgcctccgaagcgccaggaacagcatcagcgtgcccattgcaagcacttctgacaaggttctgggggccactctggccggctgtgagcttgccttggggatggccaaggagacagcggaatatgctgccaacacccgagttggccgactggcctctggaggggctgatctggctttgggaagcatcgagaaggtggtagaatatctcctgccaccagacaaggtggagtcagccccttcttcaggacggcaaaagatgcagaaggctcccaaggccaaaccaagccttttgaggagggtcagcaccctggccaacactctttctcgacacaccatgcagaccacagcacgggccctgaagcggggtcactctctggccatgtggatcccgggtgtggcacccctgagcagcctggcccagtggggtgcatcggcagccatgcaggtggtgtcccggcggcagagtgaggtacgggtgccctggttgcacaacctggcagcctccaaggatgagaaccatgaagaccagacagacacagagggagaggagacagatgaggaggaagaagaagaagagtcagaggccgaggagaacgtgctcagagaggtaacagccctgcccacccctctcggcttcctgggtggtgtggtacacaccgtgcagaagactctgcagaacaccatctcggcggtgacatgggcacctgcggctgtgctgggcacggtgggaaggatcctacacctcacaccagcccaggctgtctcctccaccaaagggagggccatgtccctatccgatgccctgaagggtgttacggataacgtggtagacactgtggtacactatgtcccgcttcccaggctgtccctgatggagcccgagagcgaattccaagacatcgataatcctccagcagaggtggagcgcaaagggtcggggtcgcggcccgccagcccagagtccacggcgcgcccgggccagccccgcggcagcttgcgcagcgtgcggggtctcagcgcgccctcttgccccgatctggatgacaaaaccgagacatcagcgcgtcctggcttcctggctatgcccagagagaagcctgcgcgcagggtcagcgacagcttcttccggcccagcgtcatggagcccatcctgggccgcacgcagtacagccagctgcgcaagaagagctgagtagcctgcgcccctaaccgccctggcgccaccctcaccggaaggtcgcttctctccccaaggaaacagaaaccacacttccaagtgggccactccttcagggtggcctcttgggagcccgagtcacaaccccacgatgttctcgagacccacatcatttctaaggcatccttggggcttgaccatcacagtcaggttttaaggggcacccgagcggctgtcgactctttcctctctcgtgggctgaatctctcatggcttttttttttttttaactataaaagcaattgcttaattggatttctcacttctttaacaaaacttggcctgactagttctaaaaatgtagatcccttctctgtggacacgtatttattgccaaaaagtagtgcgtcagttgactgttttctcttctttcttttctcttgtttttctcct

SEQ ID NO: 34 - DNA, 2025 bp, Rattus norvegicus
  source 1..2025: mol_type = genomic DNA
aggagaaaaacaagagaaaagaaagaagagaaaacagtcaactgacgcactactttttggcaataaatacgtgtccacagagaagggatctacatttttagaactagtcaggccaagttttgttaaagaagtgagaaatccaattaagcaattgcttttatagttaaaaaaaaaaaaaagccatgagagattcagcccacgagagaggaaagagtcgacagccgctcgggtgccccttaaaacctgactgtgatggtcaagccccaaggatgccttagaaatgatgtgggtctcgagaacatcgtggggttgtgactcgggctcccaagaggccaccctgaaggagtggcccacttggaagtgtggtttctgtttccttggggagagaagcgaccttccggtgagggtggcgccagggcggttaggggcgcaggctactcagctcttcttgcgcagctggctgtactgcgtgcggcccaggatgggctccatgacgctgggccggaagaagctgtcgctgaccctgcgcgcaggcttctctctgggcatagccaggaagccaggacgcgctgatgtctcggttttgtcatccagatcggggcaagagggcgcgctgagaccccgcacgctgcgcaagctgccgcggggctggcccgggcgcgccgtggactctgggctggcgggccgcgaccccgaccctttgcgctccacctctgctggaggattatcgatgtcttggaattcgctctcgggctccatcagggacagcctgggaagcgggacatagtgtaccacagtgtctaccacgttatccgtaacacccttcagggcatcggatagggacatggccctccctttggtggaggagacagcctgggctggtgtgaggtgtaggatccttcccaccgtgcccagcacagccgcaggtgcccatgtcaccgccgagatggtgttctgcagagtcttctgcacggtgtgtaccacaccacccaggaagccgagaggggtgggcagggctgttacctctctgagcacgttctcctcggcctctgactcttcttcttcttcctcctcatctgtctcctctccctctgtgtctgtctggtcttcatggttctcatccttggaggctgccaggttgtgcaaccagggcacccgtacctcactctgccgccgggacaccacctgcatggctgccgatgcaccccactgggccaggctgctcaggggtgccacacccgggatccacatggccagagagtgaccccgcttcagggcccgtgctgtggtctgcatggtgtgtcgagaaagagtgttggccagggtgctgaccctcctcaaaaggcttggtttggccttgggagccttctgcatcttttgccgtcctgaagaaggggctgactccaccttgtctggtggcaggagatattctaccaccttctcgatgcttcccaaagccagatcagcccctccagaggccagtcggccaactcgggtgttggcagcatattccgctgtctccttggccatccccaaggcaagctcacagccggccagagtggcccccagaaccttgtcagaagtgcttgcaatgggcacgctgatgctgttcctggcgcttcggaggcgggtagagatggtgcccttcagttcagaggcgatcttttccggagggtattgaagagccgggatcttttcctccaggtggtccaggcctctgcaggccaactcattagcagctgtgaactgggtggagagccggcggaccaccggctccatgctccaggcagccaggttgctggcaccctgtacacccttctcataggcattgcacacagaggccaccagggggtgggcttctttggtgctgttataggtcttctggaagcactcacaggtcccgctcaccacaggcagctgcaggactctctggagcacattctcctgttcagggaggtctccatccagcagggtcgggcccttgttcatggacatccttactcttcacatgcagctgagagccac

SEQ ID NO: 35 - DNA, 2108 bp, Macaca mulatta
  source 1..2108: mol_type = genomic DNA
ctgggaggcgttagtagcattgcccaagactcccaggagtggtaggaattgtttctgcctgaggagacgctctgcagcctgggctctgtgagactgacgtggcggtcagctggagtgagtgttggggtcctggggcacctgccttacatggcttgtttatgaacattaaagggaagaagttgaagcttgaagagctaggatggcagtcaacaaaggccccaccttgctggatggagacctccctgagcaggagaatgtgctacagcgggtcctgcagctgccggtggtgagtggcacctgcgaatgcttccagaagacctataccagcactaaggaagcccaccccctggtggcctctgtgtgcaatgcctatgagaagggcgtgcagagcgccagtaacttggctgcctggagcatggagccggtggtgcgcaggctgtccacccagttcacagctgccaatgagctggcctgccgaggcttggaccacctggaggaaaagatcccagccctccagtaccctccggaaaagattgcttctgagctgaaggacaccatctccacccgcctccgcagtgccagaaacagcatcagcattcccatcgcgagcacttcagacaaggtcctgggggccgctttggctgggtgcgagctcgcctggggagtggccagagacactgcggaatttgctgccaacactcgagctggccgactggcttctggaggggccgacttggccttgggcagcattgagaaggtggtggagtacctcctccctccagacaaggaagagtcagcccctgctcctggacaccagcaagcccagaagtctcctaaggccaagccgagcctcatgagcagggttggggctctgaccaacaccctctctcgacacaccatgcagaccatggcccgggccctggagcagggccacaccctggctatgtggatcccaggagtggcgcccctgagcagcctggcccagtggggtgcctcagtggccatgcaggcggtgtcccggcggaggagtgaagtgcgggtgccctggttacacagcctcgcagccgcccaggaggaggatcatgaggaccagacagacacggagggagaggacgtggaggaggaggaagaattggagacagaggagaacaagttcagtgaggtagcagccctgccaggccctcaagggctcctgggcggtgtggcacataacctgcagaaggccctccagaccaccatctcggctgtgacatgggcacctgcagctgtgctgggcatggcagggagggtgctgcacctcacaccagctcctgctgtctcctcgaccaaggggagggccatgtctctatcagatgccctgaagggtgttactgacaatgtggtggacacggtggtgcattatgtgccgctccccaggctgtcgctgatggagcccgagagcgaattccgggacatcgacaacccgcccgccgaggtcgagcgccgggaggcggagcgcagggcgtcagcggcgccctccgccggcccggagcccgccccgcgcgccgcacagccccgccgcagcctgcggagcgcgcagagccccggcgcgccccccggcccgggcctggaggacaaggtcgccacgcccgcagcgccgcgcccggccttcccggccgtgccccgcgagaagccgaagcgcagggtcagcgacagcttcttccggcccagcgtcatggagcccatcctgggccgcgcgcagtacagccagctgcgcaagaagagctgagtcgccgcatccgtcgccgcaccccgggcgggcgggtttctctaacaaacagaacccgcacagcccaggcgagcgttgccgctttcaaaatggtcccctggggaccccagcctcattccgatgatgctgccgaggcacacgtttttttttttttttttttttttttttaagcatccttttggggctttaccctcagagccagtttttaagggacaccagagccgcagcctgctctgattctatggctcggtttttactaaaagagtaattgcctaacttgatttttcatctctttaaccaaacttgtggccaaaagacatttgactgtttccaaaattca

SEQ ID NO: 36 - DNA, 2108 bp, Macaca mulatta
  source 1..2108: mol_type = genomic DNA
tgaattttggaaacagtcaaatgtcttttggccacaagtttggttaaagagatgaaaaatcaagttaggcaattactcttttagtaaaaaccgagccatagaatcagagcaggctgcggctctggtgtcccttaaaaactggctctgagggtaaagccccaaaaggatgcttaaaaaaaaaaaaaaaaaaaaaaaaaaacgtgtgcctcggcagcatcatcggaatgaggctggggtccccaggggaccattttgaaagcggcaacgctcgcctgggctgtgcgggttctgtttgttagagaaacccgcccgcccggggtgcggcgacggatgcggcgactcagctcttcttgcgcagctggctgtactgcgcgcggcccaggatgggctccatgacgctgggccggaagaagctgtcgctgaccctgcgcttcggcttctcgcggggcacggccgggaaggccgggcgcggcgctgcgggcgtggcgaccttgtcctccaggcccgggccggggggcgcgccggggctctgcgcgctccgcaggctgcggcggggctgtgcggcgcgcggggcgggctccgggccggcggagggcgccgctgacgccctgcgctccgcctcccggcgctcgacctcggcgggcgggttgtcgatgtcccggaattcgctctcgggctccatcagcgacagcctggggagcggcacataatgcaccaccgtgtccaccacattgtcagtaacacccttcagggcatctgatagagacatggccctccccttggtcgaggagacagcaggagctggtgtgaggtgcagcaccctccctgccatgcccagcacagctgcaggtgcccatgtcacagccgagatggtggtctggagggccttctgcaggttatgtgccacaccgcccaggagcccttgagggcctggcagggctgctacctcactgaacttgttctcctctgtctccaattcttcctcctcctccacgtcctctccctccgtgtctgtctggtcctcatgatcctcctcctgggcggctgcgaggctgtgtaaccagggcacccgcacttcactcctccgccgggacaccgcctgcatggccactgaggcaccccactgggccaggctgctcaggggcgccactcctgggatccacatagccagggtgtggccctgctccagggcccgggccatggtctgcatggtgtgtcgagagagggtgttggtcagagccccaaccctgctcatgaggctcggcttggccttaggagacttctgggcttgctggtgtccaggagcaggggctgactcttccttgtctggagggaggaggtactccaccaccttctcaatgctgcccaaggccaagtcggcccctccagaagccagtcggccagctcgagtgttggcagcaaattccgcagtgtctctggccactccccaggcgagctcgcacccagccaaagcggcccccaggaccttgtctgaagtgctcgcgatgggaatgctgatgctgtttctggcactgcggaggcgggtggagatggtgtccttcagctcagaagcaatcttttccggagggtactggagggctgggatcttttcctccaggtggtccaagcctcggcaggccagctcattggcagctgtgaactgggtggacagcctgcgcaccaccggctccatgctccaggcagccaagttactggcgctctgcacgcccttctcataggcattgcacacagaggccaccagggggtgggcttccttagtgctggtataggtcttctggaagcattcgcaggtgccactcaccaccggcagctgcaggacccgctgtagcacattctcctgctcagggaggtctccatccagcaaggtggggcctttgttgactgccatcctagctcttcaagcttcaacttcttccctttaatgttcataaacaagccatgtaaggcaggtgccccaggaccccaacactcactccagctgaccgccacgtcagtctcacagagcccaggctgcagagcgtctcctcaggcagaaacaattcctaccactcctgggagtcttgggcaatgctactaacgcctcccag

SEQ ID NO: 37 - DNA, 6229 bp, Homo sapiens
  source 1..6229: mol_type = genomic DNA
agtcccgagaggtgcccgagggaaaaggaggcggcagctaaactggtcctggagagaagccccttccgcccctctcctcagccagcatgtcccggactccgccgctcctcagtccgcgcggtggggaccccgggccgtggcggccggcgcagccctgacgggttgcgaaccagggggcgccccgaacgcgggggttggggtctgggagcgcgagcggccgctacggtacgagcggggtgtgctgagtcccgtggccacccccggccccagccatgaggagggacgagcgagacgccaaagccatgcggtccctgcagccgccggatggggccggctcgccccccgagagtctgaggaacggctacgtgaagagctgcgtgagccccttgcggcaggaccctccgcgcggcttcttcttccacctctgccgcttctgcaacgtggagctgcggccgccgccggcctctccccagcagccgcggcgctgctcccccttctgccgggcgcgcctctcgctgggcgccctggctgcctttgtcctcgccctgctgctgggcgcggaacccgagagctgggctgccggggccgcctggctgcggacgctgctgagcgtgtgttcgcacagcttgagccccctcttcagcatcgcctgtgccttcttcttcctcacctgcttcctcacccggaccaagcggggacccggcccgggccggagctgcggctcctggtggctgctggcgctgcccgcctgctgttacctgggggacttcttggtgtggcagtggtggtcttggccttggggggatggcgacgcagggtccgcggccccgcacacgcccccggaggcggcagcgggcaggttgctgctggtgctgagctgcgtagggctgctgctgacgctcgcgcacccgctgcggctccggcactgcgttctggtgctgctcctggccagcttcgtctggtgggtctccttcaccagcctcgggtcgctgccctccgccctcaggccgctgctctccggcctggtggggggcgctggctgcctgctggccctggggttggatcacttctttcaaatcagggaagcgcctcttcatcctcgactgtccagtgccgccgaagaaaaagtgcctgtgatccgaccccggaggaggtccagctgcgtgtcgttaggagaaactgcagccagttactatggcagttgcaaaatattcaggagaccgtcgttgccttgtatttccagagaacagatgattctttgggattgggacttaaaacaatggtataagcctcattatcaagctggagtgcagtggcatgatctcggctcaccgcaacctccagctccctggttcaagcgattctcctgcctcagcctccggagtagctgggattacaggcatgtgccaccacacctggctaattttgtatttttagtagagatgggatttctccatgttggtcaggctggtcttgaactcccgacctcaggtgatctgcccacctcggcctcccaaagtgctgggattacagggaattctggaggtggaaatggagttgatctttcagtgctaaatgaggctcgcaatatggtgtcagatcttctgactgatccaagccttccaccacaagtcatttcctctctacggagtattagtagcttaatgggtgctttctcaggttcctgtaggccaaagattaatcctctcacaccatttcctggattttacccctgttctgaaatagaggacccagctgagaaaggggatagaaaacttaacaagggactaaataggaatagtttgccaactccacagctgaggagaagctcaggaacttcaggattgctacctgttgaacagtcttcaaggtgggatcgtaataatggcaaaagacctcaccaagaatttggcatttcaagtcaaggatgctatctaaatgggccttttaattcaaatctactgactatcccgaagcaaaggtcatcttctgtatcactgactcaccatgtaggtctcagaagagctggtgttttgtccagtctgagtcctgtgaattcttccaaccatggaccagtgtctactggctctctaactaatcgatcacccatagaatttcctgatactgctgattttcttaataagccaagcgttatcttgcagagatctctgggcaatgcacctaatactccagatttttatcagcaacttagaaattctgatagcaatctgtgtaacagctgtggacatcaaatgctgaaatatgtttcaacatctgaatcagatggtacagattgctgcagtggaaaatcaggtgaagaagaaaacattttctcgaaagaatcattcaaacttatggaaactcaacaagaagaggaaacagagaagaaagacagcagaaaattatttcaggaaggtgataagtggctaacagaagaggcacagagtgaacagcaaacaaatattgaacaggaagtatcactggacctgattttagtagaagagtatgactcattaatagaaaagatgagcaactggaattttccaatttttgaacttgtagaaaagatgggagagaaatcaggaaggattctcagtcaggttatgtataccttatttcaagacactggtttattggaaatatttaaaattcccactcaacaatttatgaactattttcgtgcattagaaaatggctatcgagacattccttatcacaatcgtatacatgccacagatgtgctacatgcagtttggtatctgacaacacggccagttcctggcttacagcagatccacaatggttgtggaacaggaaatgaaacagattctgatggtagaattaaccatgggcgaattgcttatatttcttcgaagagctgctctaatcctgatgagagttatggctgcctgtcttcaaacattcctgcattagaattgatggctctatacgtggcagctgccatgcatgattatgatcacccagggaggacaaatgcatttctagtggctacaaatgcccctcaggcagttttatacaatgacagatctgttctggaaaatcatcatgctgcgtcagcttggaatctatatctttctcgcccagaatacaacttccttcttcatcttgatcatgtggaattcaagcgctttcgttttttagtcattgaagcaatccttgctacggatcttaaaaagcattttgattttctcgcagaattcaatgccaaggcaaatgatgtaaatagtaatggcatagaatggagtaatgaaaatgatcgcctcttggtatgccaggtgtgcatcaaactggcagatataaatggcccagcaaaagttcgagacttgcatttgaaatggacagaaggcattgtcaatgaattttatgagcagggagatgaagaagcaaatcttggtctgcccatcagtccattcatggatcgttcttctcctcaactagcaaaactccaagaatcttttatcacccacatagtgggtcccctgtgtaactcctatgatgctgctggtttgctaccaggtcagtggttagaagcagaagaggataatgatactgaaagtggtgatgatgaagacggtgaagaattagatacagaagatgaagaaatggaaaacaatctaaatccaaaaccaccaagaaggaaaagcagacggcgaatattttgtcagctaatgcaccacctcactgaaaaccacaagatatggaaggaaatcgtagaggaagaagaaaaatgtaaagctgatgggaataaactgcaggtggagaattcctccttacctcaagcagatgagattcaggtaattgaagaggcagatgaagaggaatagcgacagtttgagtaaaagaaaagtcatattgaagaagcccagagggttgtgcccaggggcagaaatcattgcctagtgttcaccggctgactctcaactgaccattcccatgtggacaggccttaatactgtgagaggatccttgctctgctggcagtttcccactcctatgcactttcacaggaactagaaaactattcttaaaccaaaaataccatccgtgttgacccatgttgcagagcccttacttaaatccttcactggtgtatgaatactttgtcataatgctgctttgctgggtagtgagctcttatttttcactgggggtcagctataactaaaaactcaagtgacatatttcagttaccaaagtggccaggaactttttgcttttatgaaaatagattcatattgtatttcccagtgtgtcttttatgtctttgaatgttttggagaaaagtctatgcctgtctaaaaatgaatccagtgttgcctttctgagggatttctgctcaatgcaatacactgttcagtgctattctcccagctaggtttatccatgaaggactgagtgacctttgttgtatttaacaaaatccaggtgcatcaatttctgatgctttttactattgtgtattatctactatgtgtgttttatttctgctgagagtattcaggtttgccatggacatcagaagtttgaattccagtcttatcttatgttccatggctgaattttaaagctgtttaggtttaacaatgaagggatttattctttagtcaaaattgttgtttttactctagctcaggattcgtatttttaaagatttagttaatatgaacacagcacagatttgttagaagaaaaaaaatttgctgtaataccaaaactaacctcatcaaagatacagaaaaaaagaaatatagtgagccctaaaggacacatacattgaataaataattggaacatgtggttatctttagatccacatcttagctgtcatttgttcactctaaaactgatgttcatctttctgttaatttccctctgcctaaagactacatgacagaaatgacctatcactacttattatttctgaagcctaactgcaagactgatttctgagaacaagtaaagaactggaatacttatttttcatataaaaatctaaatgtgttaataaatcatttcatacaaaagtacattattaaataaccacattattaaaataattgcaagaaaatggaccatatttacaatgttttgtaaacttgctagtgtgtggatatgtaccctacttgtgaaatacatttgaagatataaagagcagccaaaatgatggcaaaatggtaggctaatattttctattattattggagaacatatcatattttggaatcatgcaattttgcacacagtgaaaccattaattttccaaggtaattcctttagaatatggtattggcatgcagtttcttacttatctagaatatttggcttatctgaaagatatcaatttaagatctctggaagtgttagaatttttgatccttcacagtgtcaatatttaatgaatcactaagctttatttattagacgtgttgagtgagtgctgagttccttgctgccacttttgttaccattgtcacacactatgtgtaaaccagtcccaccacttattactaataaaattttgactgataatttatatttgcacttacaatatatatatcctgtccttatatttctctagagtacattttccatcatgtttaagtgtatttctgctattatttcctctcctgcagaatacatacaagtgtatgtgtataaagtcatacatgtacaagcatgcatattgagattgaatcacatttccatactgtctgttattttattgggttttatattgggtttctttagtttatgttgttttctcaaaagcagcattttaaattacgaatactggacttattggatttaattataaatccaattactactggaaactcatttttacataatatagtccttaaattatttaacccttgctaagtaattgacatatgtaacaataactagcctaaagaaacccaaaaaagtatctctcccgagctgaaacttaaaaattcgtaagtgtaagaaagaatgtgagaatatattaaatgcacactgtaccattagatgaaatcttacttgagaaattgccataagccatattacagatcttactttgttactgaatcagattaatttcttgttataataattttcatcataaattttctatttttaaagccgctggtactagaaatattcttttaatgctatatctatgtacctactgacacatttttctccataaaagtacttttaaaaatta

SEQ ID NO: 38 - DNA, 6229 bp, Homo sapiens
  source 1..6229: mol_type = genomic DNA
taatttttaaaagtacttttatggagaaaaatgtgtcagtaggtacatagatatagcattaaaagaatatttctagtaccagcggctttaaaaatagaaaatttatgatgaaaattattataacaagaaattaatctgattcagtaacaaagtaagatctgtaatatggcttatggcaatttctcaagtaagatttcatctaatggtacagtgtgcatttaatatattctcacattctttcttacacttacgaatttttaagtttcagctcgggagagatacttttttgggtttctttaggctagttattgttacatatgtcaattacttagcaagggttaaataatttaaggactatattatgtaaaaatgagtttccagtagtaattggatttataattaaatccaataagtccagtattcgtaatttaaaatgctgcttttgagaaaacaacataaactaaagaaacccaatataaaacccaataaaataacagacagtatggaaatgtgattcaatctcaatatgcatgcttgtacatgtatgactttatacacatacacttgtatgtattctgcaggagaggaaataatagcagaaatacacttaaacatgatggaaaatgtactctagagaaatataaggacaggatatatatattgtaagtgcaaatataaattatcagtcaaaattttattagtaataagtggtgggactggtttacacatagtgtgtgacaatggtaacaaaagtggcagcaaggaactcagcactcactcaacacgtctaataaataaagcttagtgattcattaaatattgacactgtgaaggatcaaaaattctaacacttccagagatcttaaattgatatctttcagataagccaaatattctagataagtaagaaactgcatgccaataccatattctaaaggaattaccttggaaaattaatggtttcactgtgtgcaaaattgcatgattccaaaatatgatatgttctccaataataatagaaaatattagcctaccattttgccatcattttggctgctctttatatcttcaaatgtatttcacaagtagggtacatatccacacactagcaagtttacaaaacattgtaaatatggtccattttcttgcaattattttaataatgtggttatttaataatgtacttttgtatgaaatgatttattaacacatttagatttttatatgaaaaataagtattccagttctttacttgttctcagaaatcagtcttgcagttaggcttcagaaataataagtagtgataggtcatttctgtcatgtagtctttaggcagagggaaattaacagaaagatgaacatcagttttagagtgaacaaatgacagctaagatgtggatctaaagataaccacatgttccaattatttattcaatgtatgtgtcctttagggctcactatatttctttttttctgtatctttgatgaggttagttttggtattacagcaaattttttttcttctaacaaatctgtgctgtgttcatattaactaaatctttaaaaatacgaatcctgagctagagtaaaaacaacaattttgactaaagaataaatcccttcattgttaaacctaaacagctttaaaattcagccatggaacataagataagactggaattcaaacttctgatgtccatggcaaacctgaatactctcagcagaaataaaacacacatagtagataatacacaatagtaaaaagcatcagaaattgatgcacctggattttgttaaatacaacaaaggtcactcagtccttcatggataaacctagctgggagaatagcactgaacagtgtattgcattgagcagaaatccctcagaaaggcaacactggattcatttttagacaggcatagacttttctccaaaacattcaaagacataaaagacacactgggaaatacaatatgaatctattttcataaaagcaaaaagttcctggccactttggtaactgaaatatgtcacttgagtttttagttatagctgacccccagtgaaaaataagagctcactacccagcaaagcagcattatgacaaagtattcatacaccagtgaaggatttaagtaagggctctgcaacatgggtcaacacggatggtatttttggtttaagaatagttttctagttcctgtgaaagtgcataggagtgggaaactgccagcagagcaaggatcctctcacagtattaaggcctgtccacatgggaatggtcagttgagagtcagccggtgaacactaggcaatgatttctgcccctgggcacaaccctctgggcttcttcaatatgacttttcttttactcaaactgtcgctattcctcttcatctgcctcttcaattacctgaatctcatctgcttgaggtaaggaggaattctccacctgcagtttattcccatcagctttacatttttcttcttcctctacgatttccttccatatcttgtggttttcagtgaggtggtgcattagctgacaaaatattcgccgtctgcttttccttcttggtggttttggatttagattgttttccatttcttcatcttctgtatctaattcttcaccgtcttcatcatcaccactttcagtatcattatcctcttctgcttctaaccactgacctggtagcaaaccagcagcatcataggagttacacaggggacccactatgtgggtgataaaagattcttggagttttgctagttgaggagaagaacgatccatgaatggactgatgggcagaccaagatttgcttcttcatctccctgctcataaaattcattgacaatgccttctgtccatttcaaatgcaagtctcgaacttttgctgggccatttatatctgccagtttgatgcacacctggcataccaagaggcgatcattttcattactccattctatgccattactatttacatcatttgccttggcattgaattctgcgagaaaatcaaaatgctttttaagatccgtagcaaggattgcttcaatgactaaaaaacgaaagcgcttgaattccacatgatcaagatgaagaaggaagttgtattctgggcgagaaagatatagattccaagctgacgcagcatgatgattttccagaacagatctgtcattgtataaaactgcctgaggggcatttgtagccactagaaatgcatttgtcctccctgggtgatcataatcatgcatggcagctgccacgtatagagccatcaattctaatgcaggaatgtttgaagacaggcagccataactctcatcaggattagagcagctcttcgaagaaatataagcaattcgcccatggttaattctaccatcagaatctgtttcatttcctgttccacaaccattgtggatctgctgtaagccaggaactggccgtgttgtcagataccaaactgcatgtagcacatctgtggcatgtatacgattgtgataaggaatgtctcgatagccattttctaatgcacgaaaatagttcataaattgttgagtgggaattttaaatatttccaataaaccagtgtcttgaaataaggtatacataacctgactgagaatccttcctgatttctctcccatcttttctacaagttcaaaaattggaaaattccagttgctcatcttttctattaatgagtcatactcttctactaaaatcaggtccagtgatacttcctgttcaatatttgtttgctgttcactctgtgcctcttctgttagccacttatcaccttcctgaaataattttctgctgtctttcttctctgtttcctcttcttgttgagtttccataagtttgaatgattctttcgagaaaatgttttcttcttcacctgattttccactgcagcaatctgtaccatctgattcagatgttgaaacatatttcagcatttgatgtccacagctgttacacagattgctatcagaatttctaagttgctgataaaaatctggagtattaggtgcattgcccagagatctctgcaagataacgcttggcttattaagaaaatcagcagtatcaggaaattctatgggtgatcgattagttagagagccagtagacactggtccatggttggaagaattcacaggactcagactggacaaaacaccagctcttctgagacctacatggtgagtcagtgatacagaagatgacctttgcttcgggatagtcagtagatttgaattaaaaggcccatttagatagcatccttgacttgaaatgccaaattcttggtgaggtcttttgccattattacgatcccaccttgaagactgttcaacaggtagcaatcctgaagttcctgagcttctcctcagctgtggagttggcaaactattcctatttagtcccttgttaagttttctatcccctttctcagctgggtcctctatttcagaacaggggtaaaatccaggaaatggtgtgagaggattaatctttggcctacaggaacctgagaaagcacccattaagctactaatactccgtagagaggaaatgacttgtggtggaaggcttggatcagtcagaagatctgacaccatattgcgagcctcatttagcactgaaagatcaactccatttccacctccagaattccctgtaatcccagcactttgggaggccgaggtgggcagatcacctgaggtcgggagttcaagaccagcctgaccaacatggagaaatcccatctctactaaaaatacaaaattagccaggtgtggtggcacatgcctgtaatcccagctactccggaggctgaggcaggagaatcgcttgaaccagggagctggaggttgcggtgagccgagatcatgccactgcactccagcttgataatgaggcttataccattgttttaagtcccaatcccaaagaatcatctgttctctggaaatacaaggcaacgacggtctcctgaatattttgcaactgccatagtaactggctgcagtttctcctaacgacacgcagctggacctcctccggggtcggatcacaggcactttttcttcggcggcactggacagtcgaggatgaagaggcgcttccctgatttgaaagaagtgatccaaccccagggccagcaggcagccagcgccccccaccaggccggagagcagcggcctgagggcggagggcagcgacccgaggctggtgaaggagacccaccagacgaagctggccaggagcagcaccagaacgcagtgccggagccgcagcgggtgcgcgagcgtcagcagcagccctacgcagctcagcaccagcagcaacctgcccgctgccgcctccgggggcgtgtgcggggccgcggaccctgcgtcgccatccccccaaggccaagaccaccactgccacaccaagaagtcccccaggtaacagcaggcgggcagcgccagcagccaccaggagccgcagctccggcccgggccgggtccccgcttggtccgggtgaggaagcaggtgaggaagaagaaggcacaggcgatgctgaagagggggctcaagctgtgcgaacacacgctcagcagcgtccgcagccaggcggccccggcagcccagctctcgggttccgcgcccagcagcagggcgaggacaaaggcagccagggcgcccagcgagaggcgcgcccggcagaagggggagcagcgccgcggctgctggggagaggccggcggcggccgcagctccacgttgcagaagcggcagaggtggaagaagaagccgcgcggagggtcctgccgcaaggggctcacgcagctcttcacgtagccgttcctcagactctcggggggcgagccggccccatccggcggctgcagggaccgcatggctttggcgtctcgctcgtccctcctcatggctggggccgggggtggccacgggactcagcacaccccgctcgtaccgtagcggccgctcgcgctcccagaccccaacccccgcgttcggggcgccccctggttcgcaacccgtcagggctgcgccggccgccacggcccggggtccccaccgcgcggactgaggagcggcggagtccgggacatgctggctgaggagaggggcggaaggggcttctctccaggaccagtttagctgccgcctccttttccctcgggcacctctcgggact

SEQ ID NO: 39 - DNA, 5995 bp, Homo sapiens
  source 1..5995: mol_type = genomic DNA
agtcccgagaggtgcccgagggaaaaggaggcggcagctaaactggtcctggagagaagccccttccgcccctctcctcagccagcatgtcccggactccgccgctcctcagtccgcgcggtggggaccccgggccgtggcggccggcgcagccctgacgggttgcgaaccagggggcgccccgaacgcgggggttggggtctgggagcgcgagcggccgctacggtacgagcggggtgtgctgagtcccgtggccacccccggccccagccatgaggagggacgagcgagacgccaaagccatgcggtccctgcagccgccggatggggccggctcgccccccgagagtctgaggaacggctacgtgaagagctgcgtgagccccttgcggcaggaccctccgcgcggcttcttcttccacctctgccgcttctgcaacgtggagctgcggccgccgccggcctctccccagcagccgcggcgctgctcccccttctgccgggcgcgcctctcgctgggcgccctggctgcctttgtcctcgccctgctgctgggcgcggaacccgagagctgggctgccggggccgcctggctgcggacgctgctgagcgtgtgttcgcacagcttgagccccctcttcagcatcgcctgtgccttcttcttcctcacctgcttcctcacccggaccaagcggggacccggcccgggccggagctgcggctcctggtggctgctggcgctgcccgcctgctgttacctgggggacttcttggtgtggcagtggtggtcttggccttggggggatggcgacgcagggtccgcggccccgcacacgcccccggaggcggcagcgggcaggttgctgctggtgctgagctgcgtagggctgctgctgacgctcgcgcacccgctgcggctccggcactgcgttctggtgctgctcctggccagcttcgtctggtgggtctccttcaccagcctcgggtcgctgccctccgccctcaggccgctgctctccggcctggtggggggcgctggctgcctgctggccctggggttggatcacttctttcaaatcagggaagcgcctcttcatcctcgactgtccagtgccgccgaagaaaaagtgcctgtgatccgaccccggaggaggtccagctgcgtgtcgttaggagaaactgcagccagttactatggcagttgcaaaatattcaggagaccgtcgttgccttgtatttccagagaacagatgattctttgggattgggacttaaaacaatggtataagcctcattatcaaaattctggaggtggaaatggagttgatctttcagtgctaaatgaggctcgcaatatggtgtcagatcttctgactgatccaagccttccaccacaagtcatttcctctctacggagtattagtagcttaatgggtgctttctcaggttcctgtaggccaaagattaatcctctcacaccatttcctggattttacccctgttctgaaatagaggacccagctgagaaaggggatagaaaacttaacaagggactaaataggaatagtttgccaactccacagctgaggagaagctcaggaacttcaggattgctacctgttgaacagtcttcaaggtgggatcgtaataatggcaaaagacctcaccaagaatttggcatttcaagtcaaggatgctatctaaatgggccttttaattcaaatctactgactatcccgaagcaaaggtcatcttctgtatcactgactcaccatgtaggtctcagaagagctggtgttttgtccagtctgagtcctgtgaattcttccaaccatggaccagtgtctactggctctctaactaatcgatcacccatagaatttcctgatactgctgattttcttaataagccaagcgttatcttgcagagatctctgggcaatgcacctaatactccagatttttatcagcaacttagaaattctgatagcaatctgtgtaacagctgtggacatcaaatgctgaaatatgtttcaacatctgaatcagatggtacagattgctgcagtggaaaatcaggtgaagaagaaaacattttctcgaaagaatcattcaaacttatggaaactcaacaagaagaggaaacagagaagaaagacagcagaaaattatttcaggaaggtgataagtggctaacagaagaggcacagagtgaacagcaaacaaatattgaacaggaagtatcactggacctgattttagtagaagagtatgactcattaatagaaaagatgagcaactggaattttccaatttttgaacttgtagaaaagatgggagagaaatcaggaaggattctcagtcaggttatgtataccttatttcaagacactggtttattggaaatatttaaaattcccactcaacaatttatgaactattttcgtgcattagaaaatggctatcgagacattccttatcacaatcgtatacatgccacagatgtgctacatgcagtttggtatctgacaacacggccagttcctggcttacagcagatccacaatggttgtggaacaggaaatgaaacagattctgatggtagaattaaccatgggcgaattgcttatatttcttcgaagagctgctctaatcctgatgagagttatggctgcctgtcttcaaacattcctgcattagaattgatggctctatacgtggcagctgccatgcatgattatgatcacccagggaggacaaatgcatttctagtggctacaaatgcccctcaggcagttttatacaatgacagatctgttctggaaaatcatcatgctgcgtcagcttggaatctatatctttctcgcccagaatacaacttccttcttcatcttgatcatgtggaattcaagcgctttcgttttttagtcattgaagcaatccttgctacggatcttaaaaagcattttgattttctcgcagaattcaatgccaaggcaaatgatgtaaatagtaatggcatagaatggagtaatgaaaatgatcgcctcttggtatgccaggtgtgcatcaaactggcagatataaatggcccagcaaaagttcgagacttgcatttgaaatggacagaaggcattgtcaatgaattttatgagcagggagatgaagaagcaaatcttggtctgcccatcagtccattcatggatcgttcttctcctcaactagcaaaactccaagaatcttttatcacccacatagtgggtcccctgtgtaactcctatgatgctgctggtttgctaccaggtcagtggttagaagcagaagaggataatgatactgaaagtggtgatgatgaagacggtgaagaattagatacagaagatgaagaaatggaaaacaatctaaatccaaaaccaccaagaaggaaaagcagacggcgaatattttgtcagctaatgcaccacctcactgaaaaccacaagatatggaaggaaatcgtagaggaagaagaaaaatgtaaagctgatgggaataaactgcaggtggagaattcctccttacctcaagcagatgagattcaggtaattgaagaggcagatgaagaggaatagcgacagtttgagtaaaagaaaagtcatattgaagaagcccagagggttgtgcccaggggcagaaatcattgcctagtgttcaccggctgactctcaactgaccattcccatgtggacaggccttaatactgtgagaggatccttgctctgctggcagtttcccactcctatgcactttcacaggaactagaaaactattcttaaaccaaaaataccatccgtgttgacccatgttgcagagcccttacttaaatccttcactggtgtatgaatactttgtcataatgctgctttgctgggtagtgagctcttatttttcactgggggtcagctataactaaaaactcaagtgacatatttcagttaccaaagtggccaggaactttttgcttttatgaaaatagattcatattgtatttcccagtgtgtcttttatgtctttgaatgttttggagaaaagtctatgcctgtctaaaaatgaatccagtgttgcctttctgagggatttctgctcaatgcaatacactgttcagtgctattctcccagctaggtttatccatgaaggactgagtgacctttgttgtatttaacaaaatccaggtgcatcaatttctgatgctttttactattgtgtattatctactatgtgtgttttatttctgctgagagtattcaggtttgccatggacatcagaagtttgaattccagtcttatcttatgttccatggctgaattttaaagctgtttaggtttaacaatgaagggatttattctttagtcaaaattgttgtttttactctagctcaggattcgtatttttaaagatttagttaatatgaacacagcacagatttgttagaagaaaaaaaatttgctgtaataccaaaactaacctcatcaaagatacagaaaaaaagaaatatagtgagccctaaaggacacatacattgaataaataattggaacatgtggttatctttagatccacatcttagctgtcatttgttcactctaaaactgatgttcatctttctgttaatttccctctgcctaaagactacatgacagaaatgacctatcactacttattatttctgaagcctaactgcaagactgatttctgagaacaagtaaagaactggaatacttatttttcatataaaaatctaaatgtgttaataaatcatttcatacaaaagtacattattaaataaccacattattaaaataattgcaagaaaatggaccatatttacaatgttttgtaaacttgctagtgtgtggatatgtaccctacttgtgaaatacatttgaagatataaagagcagccaaaatgatggcaaaatggtaggctaatattttctattattattggagaacatatcatattttggaatcatgcaattttgcacacagtgaaaccattaattttccaaggtaattcctttagaatatggtattggcatgcagtttcttacttatctagaatatttggcttatctgaaagatatcaatttaagatctctggaagtgttagaatttttgatccttcacagtgtcaatatttaatgaatcactaagctttatttattagacgtgttgagtgagtgctgagttccttgctgccacttttgttaccattgtcacacactatgtgtaaaccagtcccaccacttattactaataaaattttgactgataatttatatttgcacttacaatatatatatcctgtccttatatttctctagagtacattttccatcatgtttaagtgtatttctgctattatttcctctcctgcagaatacatacaagtgtatgtgtataaagtcatacatgtacaagcatgcatattgagattgaatcacatttccatactgtctgttattttattgggttttatattgggtttctttagtttatgttgttttctcaaaagcagcattttaaattacgaatactggacttattggatttaattataaatccaattactactggaaactcatttttacataatatagtccttaaattatttaacccttgctaagtaattgacatatgtaacaataactagcctaaagaaacccaaaaaagtatctctcccgagctgaaacttaaaaattcgtaagtgtaagaaagaatgtgagaatatattaaatgcacactgtaccattagatgaaatcttacttgagaaattgccataagccatattacagatcttactttgttactgaatcagattaatttcttgttataataattttcatcataaattttctatttttaaagccgctggtactagaaatattcttttaatgctatatctatgtacctactgacacatttttctccataaaagtacttttaaaaatta

SEQ ID NO: 40 - DNA, 5995 bp, Homo sapiens
  source 1..5995: mol_type = genomic DNA
taatttttaaaagtacttttatggagaaaaatgtgtcagtaggtacatagatatagcattaaaagaatatttctagtaccagcggctttaaaaatagaaaatttatgatgaaaattattataacaagaaattaatctgattcagtaacaaagtaagatctgtaatatggcttatggcaatttctcaagtaagatttcatctaatggtacagtgtgcatttaatatattctcacattctttcttacacttacgaatttttaagtttcagctcgggagagatacttttttgggtttctttaggctagttattgttacatatgtcaattacttagcaagggttaaataatttaaggactatattatgtaaaaatgagtttccagtagtaattggatttataattaaatccaataagtccagtattcgtaatttaaaatgctgcttttgagaaaacaacataaactaaagaaacccaatataaaacccaataaaataacagacagtatggaaatgtgattcaatctcaatatgcatgcttgtacatgtatgactttatacacatacacttgtatgtattctgcaggagaggaaataatagcagaaatacacttaaacatgatggaaaatgtactctagagaaatataaggacaggatatatatattgtaagtgcaaatataaattatcagtcaaaattttattagtaataagtggtgggactggtttacacatagtgtgtgacaatggtaacaaaagtggcagcaaggaactcagcactcactcaacacgtctaataaataaagcttagtgattcattaaatattgacactgtgaaggatcaaaaattctaacacttccagagatcttaaattgatatctttcagataagccaaatattctagataagtaagaaactgcatgccaataccatattctaaaggaattaccttggaaaattaatggtttcactgtgtgcaaaattgcatgattccaaaatatgatatgttctccaataataatagaaaatattagcctaccattttgccatcattttggctgctctttatatcttcaaatgtatttcacaagtagggtacatatccacacactagcaagtttacaaaacattgtaaatatggtccattttcttgcaattattttaataatgtggttatttaataatgtacttttgtatgaaatgatttattaacacatttagatttttatatgaaaaataagtattccagttctttacttgttctcagaaatcagtcttgcagttaggcttcagaaataataagtagtgataggtcatttctgtcatgtagtctttaggcagagggaaattaacagaaagatgaacatcagttttagagtgaacaaatgacagctaagatgtggatctaaagataaccacatgttccaattatttattcaatgtatgtgtcctttagggctcactatatttctttttttctgtatctttgatgaggttagttttggtattacagcaaattttttttcttctaacaaatctgtgctgtgttcatattaactaaatctttaaaaatacgaatcctgagctagagtaaaaacaacaattttgactaaagaataaatcccttcattgttaaacctaaacagctttaaaattcagccatggaacataagataagactggaattcaaacttctgatgtccatggcaaacctgaatactctcagcagaaataaaacacacatagtagataatacacaatagtaaaaagcatcagaaattgatgcacctggattttgttaaatacaacaaaggtcactcagtccttcatggataaacctagctgggagaatagcactgaacagtgtattgcattgagcagaaatccctcagaaaggcaacactggattcatttttagacaggcatagacttttctccaaaacattcaaagacataaaagacacactgggaaatacaatatgaatctattttcataaaagcaaaaagttcctggccactttggtaactgaaatatgtcacttgagtttttagttatagctgacccccagtgaaaaataagagctcactacccagcaaagcagcattatgacaaagtattcatacaccagtgaaggatttaagtaagggctctgcaacatgggtcaacacggatggtatttttggtttaagaatagttttctagttcctgtgaaagtgcataggagtgggaaactgccagcagagcaaggatcctctcacagtattaaggcctgtccacatgggaatggtcagttgagagtcagccggtgaacactaggcaatgatttctgcccctgggcacaaccctctgggcttcttcaatatgacttttcttttactcaaactgtcgctattcctcttcatctgcctcttcaattacctgaatctcatctgcttgaggtaaggaggaattctccacctgcagtttattcccatcagctttacatttttcttcttcctctacgatttccttccatatcttgtggttttcagtgaggtggtgcattagctgacaaaatattcgccgtctgcttttccttcttggtggttttggatttagattgttttccatttcttcatcttctgtatctaattcttcaccgtcttcatcatcaccactttcagtatcattatcctcttctgcttctaaccactgacctggtagcaaaccagcagcatcataggagttacacaggggacccactatgtgggtgataaaagattcttggagttttgctagttgaggagaagaacgatccatgaatggactgatgggcagaccaagatttgcttcttcatctccctgctcataaaattcattgacaatgccttctgtccatttcaaatgcaagtctcgaacttttgctgggccatttatatctgccagtttgatgcacacctggcataccaagaggcgatcattttcattactccattctatgccattactatttacatcatttgccttggcattgaattctgcgagaaaatcaaaatgctttttaagatccgtagcaaggattgcttcaatgactaaaaaacgaaagcgcttgaattccacatgatcaagatgaagaaggaagttgtattctgggcgagaaagatatagattccaagctgacgcagcatgatgattttccagaacagatctgtcattgtataaaactgcctgaggggcatttgtagccactagaaatgcatttgtcctccctgggtgatcataatcatgcatggcagctgccacgtatagagccatcaattctaatgcaggaatgtttgaagacaggcagccataactctcatcaggattagagcagctcttcgaagaaatataagcaattcgcccatggttaattctaccatcagaatctgtttcatttcctgttccacaaccattgtggatctgctgtaagccaggaactggccgtgttgtcagataccaaactgcatgtagcacatctgtggcatgtatacgattgtgataaggaatgtctcgatagccattttctaatgcacgaaaatagttcataaattgttgagtgggaattttaaatatttccaataaaccagtgtcttgaaataaggtatacataacctgactgagaatccttcctgatttctctcccatcttttctacaagttcaaaaattggaaaattccagttgctcatcttttctattaatgagtcatactcttctactaaaatcaggtccagtgatacttcctgttcaatatttgtttgctgttcactctgtgcctcttctgttagccacttatcaccttcctgaaataattttctgctgtctttcttctctgtttcctcttcttgttgagtttccataagtttgaatgattctttcgagaaaatgttttcttcttcacctgattttccactgcagcaatctgtaccatctgattcagatgttgaaacatatttcagcatttgatgtccacagctgttacacagattgctatcagaatttctaagttgctgataaaaatctggagtattaggtgcattgcccagagatctctgcaagataacgcttggcttattaagaaaatcagcagtatcaggaaattctatgggtgatcgattagttagagagccagtagacactggtccatggttggaagaattcacaggactcagactggacaaaacaccagctcttctgagacctacatggtgagtcagtgatacagaagatgacctttgcttcgggatagtcagtagatttgaattaaaaggcccatttagatagcatccttgacttgaaatgccaaattcttggtgaggtcttttgccattattacgatcccaccttgaagactgttcaacaggtagcaatcctgaagttcctgagcttctcctcagctgtggagttggcaaactattcctatttagtcccttgttaagttttctatcccctttctcagctgggtcctctatttcagaacaggggtaaaatccaggaaatggtgtgagaggattaatctttggcctacaggaacctgagaaagcacccattaagctactaatactccgtagagaggaaatgacttgtggtggaaggcttggatcagtcagaagatctgacaccatattgcgagcctcatttagcactgaaagatcaactccatttccacctccagaattttgataatgaggcttataccattgttttaagtcccaatcccaaagaatcatctgttctctggaaatacaaggcaacgacggtctcctgaatattttgcaactgccatagtaactggctgcagtttctcctaacgacacgcagctggacctcctccggggtcggatcacaggcactttttcttcggcggcactggacagtcgaggatgaagaggcgcttccctgatttgaaagaagtgatccaaccccagggccagcaggcagccagcgccccccaccaggccggagagcagcggcctgagggcggagggcagcgacccgaggctggtgaaggagacccaccagacgaagctggccaggagcagcaccagaacgcagtgccggagccgcagcgggtgcgcgagcgtcagcagcagccctacgcagctcagcaccagcagcaacctgcccgctgccgcctccgggggcgtgtgcggggccgcggaccctgcgtcgccatccccccaaggccaagaccaccactgccacaccaagaagtcccccaggtaacagcaggcgggcagcgccagcagccaccaggagccgcagctccggcccgggccgggtccccgcttggtccgggtgaggaagcaggtgaggaagaagaaggcacaggcgatgctgaagagggggctcaagctgtgcgaacacacgctcagcagcgtccgcagccaggcggccccggcagcccagctctcgggttccgcgcccagcagcagggcgaggacaaaggcagccagggcgcccagcgagaggcgcgcccggcagaagggggagcagcgccgcggctgctggggagaggccggcggcggccgcagctccacgttgcagaagcggcagaggtggaagaagaagccgcgcggagggtcctgccgcaaggggctcacgcagctcttcacgtagccgttcctcagactctcggggggcgagccggccccatccggcggctgcagggaccgcatggctttggcgtctcgctcgtccctcctcatggctggggccgggggtggccacgggactcagcacaccccgctcgtaccgtagcggccgctcgcgctcccagaccccaacccccgcgttcggggcgccccctggttcgcaacccgtcagggctgcgccggccgccacggcccggggtccccaccgcgcggactgaggagcggcggagtccgggacatgctggctgaggagaggggcggaaggggcttctctccaggaccagtttagctgccgcctccttttccctcgggcacctctcgggact

SEQ ID NO: 41 - DNA, 5842 bp, Homo sapiens
  source 1..5842: mol_type = genomic DNA
agtcccgagaggtgcccgagggaaaaggaggcggcagctaaactggtcctggagagaagccccttccgcccctctcctcagccagcatgtcccggactccgccgctcctcagtccgcgcggtggggaccccgggccgtggcggccggcgcagccctgacgggttgcgaaccagggggcgccccgaacgcgggggttggggtctgggagcgcgagcggccgctacggtacgagcggggtgtgctgagtcccgtggccacccccggccccagccatgaggagggacgagcgagacgccaaagccatgcggtccctgcagccgccggatggggccggctcgccccccgagagtctgaggaacggctacgtgaagagctgcgtgagccccttgcggcaggaccctccgcgcggcttcttcttccacctctgccgcttctgcaacgtggagctgcggccgccgccggcctctccccagcagccgcggcgctgctcccccttctgccgggcgcgcctctcgctgggcgccctggctgcctttgtcctcgccctgctgctgggcgcggaacccgagagctgggctgccggggccgcctggctgcggacgctgctgagcgtgtgttcgcacagcttgagccccctcttcagcatcgcctgtgccttcttcttcctcacctgcttcctcacccggaccaagcggggacccggcccgggccggagctgcggctcctggtggctgctggcgctgcccgcctgctgttacctgggggacttcttggtgtggcagtggtggtcttggccttggggggatggcgacgcagggtccgcggccccgcacacgcccccggaggcggcagcgggcaggttgctgctggtgctgagctgcgtagggctgctgctgacgctcgcgcacccgctgcggctccggcactgcgttctggtgctgctcctggccagcttcgtctggtgggtctccttcaccagcctcgggtcgctgccctccgccctcaggccgctgctctccggcctggtggggggcgctggctgcctgctggccctggggttggatcacttctttcaaatcagggaagcgcctcttcatcctcgactgtccagtgccgccgaagaaaaagtgcctgtgatccgaccccggaggaggtccagctgcgtgtcgttaggagaaactgcagccagttactatggcagttgcaaaatattcaggagaccgtcgttgccttgtatttccagagaacagatgattctttgggattgggacttaaaacaatggtataagcctcattatcaaaattctggaggtggaaatggagttgatctttcagtgctaaatgaggctcgcaatatggtgtcagatcttctgactgatccaagccttccaccacaaggactaaataggaatagtttgccaactccacagctgaggagaagctcaggaacttcaggattgctacctgttgaacagtcttcaaggtgggatcgtaataatggcaaaagacctcaccaagaatttggcatttcaagtcaaggatgctatctaaatgggccttttaattcaaatctactgactatcccgaagcaaaggtcatcttctgtatcactgactcaccatgtaggtctcagaagagctggtgttttgtccagtctgagtcctgtgaattcttccaaccatggaccagtgtctactggctctctaactaatcgatcacccatagaatttcctgatactgctgattttcttaataagccaagcgttatcttgcagagatctctgggcaatgcacctaatactccagatttttatcagcaacttagaaattctgatagcaatctgtgtaacagctgtggacatcaaatgctgaaatatgtttcaacatctgaatcagatggtacagattgctgcagtggaaaatcaggtgaagaagaaaacattttctcgaaagaatcattcaaacttatggaaactcaacaagaagaggaaacagagaagaaagacagcagaaaattatttcaggaaggtgataagtggctaacagaagaggcacagagtgaacagcaaacaaatattgaacaggaagtatcactggacctgattttagtagaagagtatgactcattaatagaaaagatgagcaactggaattttccaatttttgaacttgtagaaaagatgggagagaaatcaggaaggattctcagtcaggttatgtataccttatttcaagacactggtttattggaaatatttaaaattcccactcaacaatttatgaactattttcgtgcattagaaaatggctatcgagacattccttatcacaatcgtatacatgccacagatgtgctacatgcagtttggtatctgacaacacggccagttcctggcttacagcagatccacaatggttgtggaacaggaaatgaaacagattctgatggtagaattaaccatgggcgaattgcttatatttcttcgaagagctgctctaatcctgatgagagttatggctgcctgtcttcaaacattcctgcattagaattgatggctctatacgtggcagctgccatgcatgattatgatcacccagggaggacaaatgcatttctagtggctacaaatgcccctcaggcagttttatacaatgacagatctgttctggaaaatcatcatgctgcgtcagcttggaatctatatctttctcgcccagaatacaacttccttcttcatcttgatcatgtggaattcaagcgctttcgttttttagtcattgaagcaatccttgctacggatcttaaaaagcattttgattttctcgcagaattcaatgccaaggcaaatgatgtaaatagtaatggcatagaatggagtaatgaaaatgatcgcctcttggtatgccaggtgtgcatcaaactggcagatataaatggcccagcaaaagttcgagacttgcatttgaaatggacagaaggcattgtcaatgaattttatgagcagggagatgaagaagcaaatcttggtctgcccatcagtccattcatggatcgttcttctcctcaactagcaaaactccaagaatcttttatcacccacatagtgggtcccctgtgtaactcctatgatgctgctggtttgctaccaggtcagtggttagaagcagaagaggataatgatactgaaagtggtgatgatgaagacggtgaagaattagatacagaagatgaagaaatggaaaacaatctaaatccaaaaccaccaagaaggaaaagcagacggcgaatattttgtcagctaatgcaccacctcactgaaaaccacaagatatggaaggaaatcgtagaggaagaagaaaaatgtaaagctgatgggaataaactgcaggtggagaattcctccttacctcaagcagatgagattcaggtaattgaagaggcagatgaagaggaatagcgacagtttgagtaaaagaaaagtcatattgaagaagcccagagggttgtgcccaggggcagaaatcattgcctagtgttcaccggctgactctcaactgaccattcccatgtggacaggccttaatactgtgagaggatccttgctctgctggcagtttcccactcctatgcactttcacaggaactagaaaactattcttaaaccaaaaataccatccgtgttgacccatgttgcagagcccttacttaaatccttcactggtgtatgaatactttgtcataatgctgctttgctgggtagtgagctcttatttttcactgggggtcagctataactaaaaactcaagtgacatatttcagttaccaaagtggccaggaactttttgcttttatgaaaatagattcatattgtatttcccagtgtgtcttttatgtctttgaatgttttggagaaaagtctatgcctgtctaaaaatgaatccagtgttgcctttctgagggatttctgctcaatgcaatacactgttcagtgctattctcccagctaggtttatccatgaaggactgagtgacctttgttgtatttaacaaaatccaggtgcatcaatttctgatgctttttactattgtgtattatctactatgtgtgttttatttctgctgagagtattcaggtttgccatggacatcagaagtttgaattccagtcttatcttatgttccatggctgaattttaaagctgtttaggtttaacaatgaagggatttattctttagtcaaaattgttgtttttactctagctcaggattcgtatttttaaagatttagttaatatgaacacagcacagatttgttagaagaaaaaaaatttgctgtaataccaaaactaacctcatcaaagatacagaaaaaaagaaatatagtgagccctaaaggacacatacattgaataaataattggaacatgtggttatctttagatccacatcttagctgtcatttgttcactctaaaactgatgttcatctttctgttaatttccctctgcctaaagactacatgacagaaatgacctatcactacttattatttctgaagcctaactgcaagactgatttctgagaacaagtaaagaactggaatacttatttttcatataaaaatctaaatgtgttaataaatcatttcatacaaaagtacattattaaataaccacattattaaaataattgcaagaaaatggaccatatttacaatgttttgtaaacttgctagtgtgtggatatgtaccctacttgtgaaatacatttgaagatataaagagcagccaaaatgatggcaaaatggtaggctaatattttctattattattggagaacatatcatattttggaatcatgcaattttgcacacagtgaaaccattaattttccaaggtaattcctttagaatatggtattggcatgcagtttcttacttatctagaatatttggcttatctgaaagatatcaatttaagatctctggaagtgttagaatttttgatccttcacagtgtcaatatttaatgaatcactaagctttatttattagacgtgttgagtgagtgctgagttccttgctgccacttttgttaccattgtcacacactatgtgtaaaccagtcccaccacttattactaataaaattttgactgataatttatatttgcacttacaatatatatatcctgtccttatatttctctagagtacattttccatcatgtttaagtgtatttctgctattatttcctctcctgcagaatacatacaagtgtatgtgtataaagtcatacatgtacaagcatgcatattgagattgaatcacatttccatactgtctgttattttattgggttttatattgggtttctttagtttatgttgttttctcaaaagcagcattttaaattacgaatactggacttattggatttaattataaatccaattactactggaaactcatttttacataatatagtccttaaattatttaacccttgctaagtaattgacatatgtaacaataactagcctaaagaaacccaaaaaagtatctctcccgagctgaaacttaaaaattcgtaagtgtaagaaagaatgtgagaatatattaaatgcacactgtaccattagatgaaatcttacttgagaaattgccataagccatattacagatcttactttgttactgaatcagattaatttcttgttataataattttcatcataaattttctatttttaaagccgctggtactagaaatattcttttaatgctatatctatgtacctactgacacatttttctccataaaagtacttttaaaaatta

SEQ ID NO: 42 - DNA, 5842 bp, Homo sapiens
  source 1..5842: mol_type = genomic DNA
taatttttaaaagtacttttatggagaaaaatgtgtcagtaggtacatagatatagcattaaaagaatatttctagtaccagcggctttaaaaatagaaaatttatgatgaaaattattataacaagaaattaatctgattcagtaacaaagtaagatctgtaatatggcttatggcaatttctcaagtaagatttcatctaatggtacagtgtgcatttaatatattctcacattctttcttacacttacgaatttttaagtttcagctcgggagagatacttttttgggtttctttaggctagttattgttacatatgtcaattacttagcaagggttaaataatttaaggactatattatgtaaaaatgagtttccagtagtaattggatttataattaaatccaataagtccagtattcgtaatttaaaatgctgcttttgagaaaacaacataaactaaagaaacccaatataaaacccaataaaataacagacagtatggaaatgtgattcaatctcaatatgcatgcttgtacatgtatgactttatacacatacacttgtatgtattctgcaggagaggaaataatagcagaaatacacttaaacatgatggaaaatgtactctagagaaatataaggacaggatatatatattgtaagtgcaaatataaattatcagtcaaaattttattagtaataagtggtgggactggtttacacatagtgtgtgacaatggtaacaaaagtggcagcaaggaactcagcactcactcaacacgtctaataaataaagcttagtgattcattaaatattgacactgtgaaggatcaaaaattctaacacttccagagatcttaaattgatatctttcagataagccaaatattctagataagtaagaaactgcatgccaataccatattctaaaggaattaccttggaaaattaatggtttcactgtgtgcaaaattgcatgattccaaaatatgatatgttctccaataataatagaaaatattagcctaccattttgccatcattttggctgctctttatatcttcaaatgtatttcacaagtagggtacatatccacacactagcaagtttacaaaacattgtaaatatggtccattttcttgcaattattttaataatgtggttatttaataatgtacttttgtatgaaatgatttattaacacatttagatttttatatgaaaaataagtattccagttctttacttgttctcagaaatcagtcttgcagttaggcttcagaaataataagtagtgataggtcatttctgtcatgtagtctttaggcagagggaaattaacagaaagatgaacatcagttttagagtgaacaaatgacagctaagatgtggatctaaagataaccacatgttccaattatttattcaatgtatgtgtcctttagggctcactatatttctttttttctgtatctttgatgaggttagttttggtattacagcaaattttttttcttctaacaaatctgtgctgtgttcatattaactaaatctttaaaaatacgaatcctgagctagagtaaaaacaacaattttgactaaagaataaatcccttcattgttaaacctaaacagctttaaaattcagccatggaacataagataagactggaattcaaacttctgatgtccatggcaaacctgaatactctcagcagaaataaaacacacatagtagataatacacaatagtaaaaagcatcagaaattgatgcacctggattttgttaaatacaacaaaggtcactcagtccttcatggataaacctagctgggagaatagcactgaacagtgtattgcattgagcagaaatccctcagaaaggcaacactggattcatttttagacaggcatagacttttctccaaaacattcaaagacataaaagacacactgggaaatacaatatgaatctattttcataaaagcaaaaagttcctggccactttggtaactgaaatatgtcacttgagtttttagttatagctgacccccagtgaaaaataagagctcactacccagcaaagcagcattatgacaaagtattcatacaccagtgaaggatttaagtaagggctctgcaacatgggtcaacacggatggtatttttggtttaagaatagttttctagttcctgtgaaagtgcataggagtgggaaactgccagcagagcaaggatcctctcacagtattaaggcctgtccacatgggaatggtcagttgagagtcagccggtgaacactaggcaatgatttctgcccctgggcacaaccctctgggcttcttcaatatgacttttcttttactcaaactgtcgctattcctcttcatctgcctcttcaattacctgaatctcatctgcttgaggtaaggaggaattctccacctgcagtttattcccatcagctttacatttttcttcttcctctacgatttccttccatatcttgtggttttcagtgaggtggtgcattagctgacaaaatattcgccgtctgcttttccttcttggtggttttggatttagattgttttccatttcttcatcttctgtatctaattcttcaccgtcttcatcatcaccactttcagtatcattatcctcttctgcttctaaccactgacctggtagcaaaccagcagcatcataggagttacacaggggacccactatgtgggtgataaaagattcttggagttttgctagttgaggagaagaacgatccatgaatggactgatgggcagaccaagatttgcttcttcatctccctgctcataaaattcattgacaatgccttctgtccatttcaaatgcaagtctcgaacttttgctgggccatttatatctgccagtttgatgcacacctggcataccaagaggcgatcattttcattactccattctatgccattactatttacatcatttgccttggcattgaattctgcgagaaaatcaaaatgctttttaagatccgtagcaaggattgcttcaatgactaaaaaacgaaagcgcttgaattccacatgatcaagatgaagaaggaagttgtattctgggcgagaaagatatagattccaagctgacgcagcatgatgattttccagaacagatctgtcattgtataaaactgcctgaggggcatttgtagccactagaaatgcatttgtcctccctgggtgatcataatcatgcatggcagctgccacgtatagagccatcaattctaatgcaggaatgtttgaagacaggcagccataactctcatcaggattagagcagctcttcgaagaaatataagcaattcgcccatggttaattctaccatcagaatctgtttcatttcctgttccacaaccattgtggatctgctgtaagccaggaactggccgtgttgtcagataccaaactgcatgtagcacatctgtggcatgtatacgattgtgataaggaatgtctcgatagccattttctaatgcacgaaaatagttcataaattgttgagtgggaattttaaatatttccaataaaccagtgtcttgaaataaggtatacataacctgactgagaatccttcctgatttctctcccatcttttctacaagttcaaaaattggaaaattccagttgctcatcttttctattaatgagtcatactcttctactaaaatcaggtccagtgatacttcctgttcaatatttgtttgctgttcactctgtgcctcttctgttagccacttatcaccttcctgaaataattttctgctgtctttcttctctgtttcctcttcttgttgagtttccataagtttgaatgattctttcgagaaaatgttttcttcttcacctgattttccactgcagcaatctgtaccatctgattcagatgttgaaacatatttcagcatttgatgtccacagctgttacacagattgctatcagaatttctaagttgctgataaaaatctggagtattaggtgcattgcccagagatctctgcaagataacgcttggcttattaagaaaatcagcagtatcaggaaattctatgggtgatcgattagttagagagccagtagacactggtccatggttggaagaattcacaggactcagactggacaaaacaccagctcttctgagacctacatggtgagtcagtgatacagaagatgacctttgcttcgggatagtcagtagatttgaattaaaaggcccatttagatagcatccttgacttgaaatgccaaattcttggtgaggtcttttgccattattacgatcccaccttgaagactgttcaacaggtagcaatcctgaagttcctgagcttctcctcagctgtggagttggcaaactattcctatttagtccttgtggtggaaggcttggatcagtcagaagatctgacaccatattgcgagcctcatttagcactgaaagatcaactccatttccacctccagaattttgataatgaggcttataccattgttttaagtcccaatcccaaagaatcatctgttctctggaaatacaaggcaacgacggtctcctgaatattttgcaactgccatagtaactggctgcagtttctcctaacgacacgcagctggacctcctccggggtcggatcacaggcactttttcttcggcggcactggacagtcgaggatgaagaggcgcttccctgatttgaaagaagtgatccaaccccagggccagcaggcagccagcgccccccaccaggccggagagcagcggcctgagggcggagggcagcgacccgaggctggtgaaggagacccaccagacgaagctggccaggagcagcaccagaacgcagtgccggagccgcagcgggtgcgcgagcgtcagcagcagccctacgcagctcagcaccagcagcaacctgcccgctgccgcctccgggggcgtgtgcggggccgcggaccctgcgtcgccatccccccaaggccaagaccaccactgccacaccaagaagtcccccaggtaacagcaggcgggcagcgccagcagccaccaggagccgcagctccggcccgggccgggtccccgcttggtccgggtgaggaagcaggtgaggaagaagaaggcacaggcgatgctgaagagggggctcaagctgtgcgaacacacgctcagcagcgtccgcagccaggcggccccggcagcccagctctcgggttccgcgcccagcagcagggcgaggacaaaggcagccagggcgcccagcgagaggcgcgcccggcagaagggggagcagcgccgcggctgctggggagaggccggcggcggccgcagctccacgttgcagaagcggcagaggtggaagaagaagccgcgcggagggtcctgccgcaaggggctcacgcagctcttcacgtagccgttcctcagactctcggggggcgagccggccccatccggcggctgcagggaccgcatggctttggcgtctcgctcgtccctcctcatggctggggccgggggtggccacgggactcagcacaccccgctcgtaccgtagcggccgctcgcgctcccagaccccaacccccgcgttcggggcgccccctggttcgcaacccgtcagggctgcgccggccgccacggcccggggtccccaccgcgcggactgaggagcggcggagtccgggacatgctggctgaggagaggggcggaaggggcttctctccaggaccagtttagctgccgcctccttttccctcgggcacctctcgggact

SEQ ID NO: 43 - DNA, 5314 bp, Mus musculus
  source 1..5314: mol_type = genomic DNA
aactgttgcagcgcgcgggagctgggaggcgacgccgccgtctcccgtcccgagccgcgcttgagggaaaagggaagaggcgtccgcggcggtcccgggacaccaagaagcccttctcgccgctctcagtggccggcatgaggcggacgccgccgcccctcagcccgcgcgccggggatcccggccggtggcggcggcgggcgcagccgtgaccgctctgcgaagctcggggcgcccagaacgcggagggcggcgcggggtcggcaagcgccagcggccccccggcggcccggggccatgaggaaagacgagcgcgagcgggacgcgccagccatgaggtccccgccgccgccgccagcctcggccgcctcgccccccgagagcctgcgcaacggctacgtgaagagctgcgtgagcccgctgcggcaggaccctccgcgcagcttcttcttccacctctgccgcttctgcaacgtggagccgccggcggcctcgctccgcgccggggcacgcctctcgctcggcgtcctggccgcctttgtcctggccgcgctgctgggcgcgaggcccgagcgctgggcggccgcggcagccgggctccggacgctgctgagcgcctgctcgctcagcctcagcccgctcttcagcatcgcctgtgccttcttcttcctcacctgtttcctgacgcgcgcgcagcgcggcccgggccgcggcgccggctcctggtggctgctggcgctgcccgcctgctgctacctgggcgacttcgcggcgtggcagtggtggtcgtggctgcgtggggagccggcggcggcgggccggctctgcctggtgctgagctgcgtggggctgctgacgctcgcgccccgcgtgaggctgcggcacggcgtcctggtgctgctcttcgccggcctggtgtggtgggtgtccttctccggcctcggggctctgccgcccgcgctcaggcctctgctgtcgtgcctggtcgggggcgcgggatgcctgctagccctgggcttggaccacttctttcacgtccggggagcctcccctccgccgcgctcggcgagtaccgcggaggaaaaagtgcctgtgatcagaccccggaggaggtccagctgcgtgtcgctgggagaaagcgcagccggttactatggcagtggcaagatgttcaggagaccgtcgttgccttgtatttcccgagaacagatgatcctctgggactgggacttgaagcagtggtgtaaacctcattaccagaattctggaggtggaaatggagttgatctttcagtgctaaatgaagctcgcaatatggtgtcagacctgctgattgacccaagccttcccccacaagtcatttcttctctgcggagtatcagtagcttgatgggtgctttctcaggttcctgtaggccaaagattaattcttttacaccatttcctggattttatccctgctctgaagtagaagatccagttgagaaaggagatcgaaaacttcacaagggattgagtggcagaaccagtttcccaactccacagctgaggaggagctctggagcctcatcgttgctgactaatgagcactgttcaaggtgggatcgcagcagtggtaagaggtcttaccaagaactcagtgtttcaagtcatggatgccacctaaatgggccttttagttcaaatctttttacaattccaaagcagaggtcatcgtctgtgtcactgacgcaccatgcaggtctgagaagagctggtgctttgcccagccacagtcttctgaattcttcaagccatgtaccagtgtctgctggctctctaactaatcgatcacccataggatttcctgataccactgattttcttactaagccaaatattattttacatagatcactgggcagtgtatcaagtgcagcagatttccatcagtaccttaggaactctgacagcaatctgtgtagcagctgtggacaccaaatactcaaatatgtttcaacatgtgaacccgatggtacagaccaccccagtgaaaaatcaggtgaagaagacagcagtgttttctcaaaagaaccattgaacattgtggaaacccaagaagaagagaccatgaagaaagcctgcagggagttatttttggaaggtgatagtcacctgatggaagaggcacagcaaccaaatatcgatcaggaagtgtcactggatccaatgttagtagaagattatgattcattaatagaaaagatgaacaactggaattttcagatttttgagcttgtagaaaagatgggagaaaaatcaggaaggattctcagtcaggttatgtatactttatttcaagatactggtttattggaaacatttaaaattcccactcaagaatttatgaattattttcgtgccttagaaaatggctaccgggacattccatatcacaatcgtgtgcatgccacagatgtcctacatgctgtttggtatttgacaacccgaccaattcctggcttacctcagatccataataaccatgaaacggaaaccaaagcagattcagatggtagacttggttctggacagattgcttacatttcttcgaagagttgctgtattccagatatgagttatggctgcctatcttcaaacatccctgcattagaattgatggctttgtatgtggcagctgccatgcacgattacgatcacccaggaagaacaaatgcgtttctagtggctacaaatgcacctcaggcagttttatacaatgacagatctgttctagagaatcatcatgctgcatcagcttggaatctgtatctttctcgcccagagtacaacttcctccttaaccttgatcacatggaattcaagcggtttcgatttttagttatagaagcaatccttgctacagatctcaaaaaacattttgatttccttgcagaattcaatgccaaggccaatgatgtaaatagtaacggtatagaatggagcagtgaaaacgatcgcctcttggtctgccaggtgtgcatcaaattagcagatatcaatggcccagcaaaagatcgggacctacatttgagatggacagaaggcattgtgaatgaattttatgagcagggagatgaagaagcaaccctgggtctacctattagtcccttcatggatcgttcttctcctcaactagcaaaactccaagaatcttttatcacccacattgtgggccccctgtgcaactcctatgatgctgctggcttgctgccgggtcagtggatagaaacagaagagggtgatgatacagaaagtgatgatgatgatgatgatgatgatggtggtggtgaagaattagattcagatgatgaagaaacagaagacaatctaaatcctaaaccacaaagaaggaaaggcaggcggcgaatattttgccaactaatgcaccacctcactgaaaaccacaagatatggaaggaaatcatagaagaagaagaagaaaaatgtaaagctgaggggaacaaactgcaggtggataatgcctccttacctcaggcagatgagattcaggttattgaagaagcagatgaagaggaagaacaaatgtttgaatgagaagagaactcatgctgaaggagcctggggtgctgttcccagggtcattacctaatgctcactgtactgattctcaactgaccattcccatgtgggcacgccttaatactgtgagaggatcctggctaccctggcagttctcactcctaagcactttcattacaaacaagaaactgattcttagagcttgctgcagttgactcatgctgcaaagccttcctcaaagccttcactggtgtgtaaatagtgtgtcataatgctgctttgctgggtagtgagctcttatttctcatgatgagggagggaaggctaaaactgaaaagtcaagtgacttcggtttttgaagtaaccatatttcttttatgaaaacaggattcatcttgtatttccaaatatatcttttatgtctttgtttgggggtggggtggtgcaagaaacagacctctatgcttaatacaaaaatgaattcatggtggcctttctgagtgatttctgctcgtggcagcacactgttcagtgtggttctcctggcttcatcgaggaaggactgaggacctttgttatacttagcaaaacccagatgcatcaatttctgatgctttttattgttgtgtataatctatttacttgttttatttctgcctaaagtattcaggtttgctgtggacatcagaggtctgaattctgttcttactgattttgttccatggttgaatttaaaagtatataataatgaaggagctttattctttattcaaatctgttcttattcttattctttctcaggataagtaattttaaacaattattataaatattgcatagatttgccagagaaaaaaacattgtcctgatattgatgttatcttttatgaaatgagcaccattttattttaattagagtcaagaaaaaggagctggccatcttttgccttaatggaaaatcaatgaaaccaatcccatcgaagatattgcctaaatatttagttatctttagatatatgtcttaggtgtctagtaaaattgacattttttattgttaatatctttctgcttcaagagtacatggcagagatgacacatcactatttagtaatattacagccccacagacagaattttgaagtaaagtacataatgggaatgcatattaatttttaataaagtgctataaaataaatatgctatgaatagttcaataaataattccataaatgcttataaataaataatttactaagaaaacaggacacatttatgtttatataatctcattagagtgtggctatgtgccccagttgtgaaaaattattgaagttatacaaagcaaccaaaataataccaaaatggtaaactggtttcttcttatcctttatacattattttgaagccattgaactttgtgcacagttaactgtcagtttccacagtatttcctatatagtgtgatgctggaatttcttacctacctaagatatttgggttgtctacaaggccacagttaaagattgattggagtactggtatttttgatcctgtaggtaccatatttaatgaatcactacactttatttattaaacatgttgagtgctgagttccttcctgtcacttttgctaccacaactacatcatttgtaaactggtcccaccatatattactaagtaataaaattttaactgataatctaaaaaaaaaaaaaaaaaaaaaaaaaaaaa

SEQ ID NO: 44 - DNA, 5314 bp, Mus musculus
  source 1..5314: mol_type = genomic DNA
tttttttttttttttttttttttttttttagattatcagttaaaattttattacttagtaatatatggtgggaccagtttacaaatgatgtagttgtggtagcaaaagtgacaggaaggaactcagcactcaacatgtttaataaataaagtgtagtgattcattaaatatggtacctacaggatcaaaaataccagtactccaatcaatctttaactgtggccttgtagacaacccaaatatcttaggtaggtaagaaattccagcatcacactatataggaaatactgtggaaactgacagttaactgtgcacaaagttcaatggcttcaaaataatgtataaaggataagaagaaaccagtttaccattttggtattattttggttgctttgtataacttcaataatttttcacaactggggcacatagccacactctaatgagattatataaacataaatgtgtcctgttttcttagtaaattatttatttataagcatttatggaattatttattgaactattcatagcatatttattttatagcactttattaaaaattaatatgcattcccattatgtactttacttcaaaattctgtctgtggggctgtaatattactaaatagtgatgtgtcatctctgccatgtactcttgaagcagaaagatattaacaataaaaaatgtcaattttactagacacctaagacatatatctaaagataactaaatatttaggcaatatcttcgatgggattggtttcattgattttccattaaggcaaaagatggccagctcctttttcttgactctaattaaaataaaatggtgctcatttcataaaagataacatcaatatcaggacaatgtttttttctctggcaaatctatgcaatatttataataattgtttaaaattacttatcctgagaaagaataagaataagaacagatttgaataaagaataaagctccttcattattatatacttttaaattcaaccatggaacaaaatcagtaagaacagaattcagacctctgatgtccacagcaaacctgaatactttaggcagaaataaaacaagtaaatagattatacacaacaataaaaagcatcagaaattgatgcatctgggttttgctaagtataacaaaggtcctcagtccttcctcgatgaagccaggagaaccacactgaacagtgtgctgccacgagcagaaatcactcagaaaggccaccatgaattcatttttgtattaagcatagaggtctgtttcttgcaccaccccacccccaaacaaagacataaaagatatatttggaaatacaagatgaatcctgttttcataaaagaaatatggttacttcaaaaaccgaagtcacttgacttttcagttttagccttccctccctcatcatgagaaataagagctcactacccagcaaagcagcattatgacacactatttacacaccagtgaaggctttgaggaaggctttgcagcatgagtcaactgcagcaagctctaagaatcagtttcttgtttgtaatgaaagtgcttaggagtgagaactgccagggtagccaggatcctctcacagtattaaggcgtgcccacatgggaatggtcagttgagaatcagtacagtgagcattaggtaatgaccctgggaacagcaccccaggctccttcagcatgagttctcttctcattcaaacatttgttcttcctcttcatctgcttcttcaataacctgaatctcatctgcctgaggtaaggaggcattatccacctgcagtttgttcccctcagctttacatttttcttcttcttcttctatgatttccttccatatcttgtggttttcagtgaggtggtgcattagttggcaaaatattcgccgcctgcctttccttctttgtggtttaggatttagattgtcttctgtttcttcatcatctgaatctaattcttcaccaccaccatcatcatcatcatcatcatcatcactttctgtatcatcaccctcttctgtttctatccactgacccggcagcaagccagcagcatcataggagttgcacagggggcccacaatgtgggtgataaaagattcttggagttttgctagttgaggagaagaacgatccatgaagggactaataggtagacccagggttgcttcttcatctccctgctcataaaattcattcacaatgccttctgtccatctcaaatgtaggtcccgatcttttgctgggccattgatatctgctaatttgatgcacacctggcagaccaagaggcgatcgttttcactgctccattctataccgttactatttacatcattggccttggcattgaattctgcaaggaaatcaaaatgttttttgagatctgtagcaaggattgcttctataactaaaaatcgaaaccgcttgaattccatgtgatcaaggttaaggaggaagttgtactctgggcgagaaagatacagattccaagctgatgcagcatgatgattctctagaacagatctgtcattgtataaaactgcctgaggtgcatttgtagccactagaaacgcatttgttcttcctgggtgatcgtaatcgtgcatggcagctgccacatacaaagccatcaattctaatgcagggatgtttgaagataggcagccataactcatatctggaatacagcaactcttcgaagaaatgtaagcaatctgtccagaaccaagtctaccatctgaatctgctttggtttccgtttcatggttattatggatctgaggtaagccaggaattggtcgggttgtcaaataccaaacagcatgtaggacatctgtggcatgcacacgattgtgatatggaatgtcccggtagccattttctaaggcacgaaaataattcataaattcttgagtgggaattttaaatgtttccaataaaccagtatcttgaaataaagtatacataacctgactgagaatccttcctgatttttctcccatcttttctacaagctcaaaaatctgaaaattccagttgttcatcttttctattaatgaatcataatcttctactaacattggatccagtgacacttcctgatcgatatttggttgctgtgcctcttccatcaggtgactatcaccttccaaaaataactccctgcaggctttcttcatggtctcttcttcttgggtttccacaatgttcaatggttcttttgagaaaacactgctgtcttcttcacctgatttttcactggggtggtctgtaccatcgggttcacatgttgaaacatatttgagtatttggtgtccacagctgctacacagattgctgtcagagttcctaaggtactgatggaaatctgctgcacttgatacactgcccagtgatctatgtaaaataatatttggcttagtaagaaaatcagtggtatcaggaaatcctatgggtgatcgattagttagagagccagcagacactggtacatggcttgaagaattcagaagactgtggctgggcaaagcaccagctcttctcagacctgcatggtgcgtcagtgacacagacgatgacctctgctttggaattgtaaaaagatttgaactaaaaggcccatttaggtggcatccatgacttgaaacactgagttcttggtaagacctcttaccactgctgcgatcccaccttgaacagtgctcattagtcagcaacgatgaggctccagagctcctcctcagctgtggagttgggaaactggttctgccactcaatcccttgtgaagttttcgatctcctttctcaactggatcttctacttcagagcagggataaaatccaggaaatggtgtaaaagaattaatctttggcctacaggaacctgagaaagcacccatcaagctactgatactccgcagagaagaaatgacttgtgggggaaggcttgggtcaatcagcaggtctgacaccatattgcgagcttcatttagcactgaaagatcaactccatttccacctccagaattctggtaatgaggtttacaccactgcttcaagtcccagtcccagaggatcatctgttctcgggaaatacaaggcaacgacggtctcctgaacatcttgccactgccatagtaaccggctgcgctttctcccagcgacacgcagctggacctcctccggggtctgatcacaggcactttttcctccgcggtactcgccgagcgcggcggaggggaggctccccggacgtgaaagaagtggtccaagcccagggctagcaggcatcccgcgcccccgaccaggcacgacagcagaggcctgagcgcgggcggcagagccccgaggccggagaaggacacccaccacaccaggccggcgaagagcagcaccaggacgccgtgccgcagcctcacgcggggcgcgagcgtcagcagccccacgcagctcagcaccaggcagagccggcccgccgccgccggctccccacgcagccacgaccaccactgccacgccgcgaagtcgcccaggtagcagcaggcgggcagcgccagcagccaccaggagccggcgccgcggcccgggccgcgctgcgcgcgcgtcaggaaacaggtgaggaagaagaaggcacaggcgatgctgaagagcgggctgaggctgagcgagcaggcgctcagcagcgtccggagcccggctgccgcggccgcccagcgctcgggcctcgcgcccagcagcgcggccaggacaaaggcggccaggacgccgagcgagaggcgtgccccggcgcggagcgaggccgccggcggctccacgttgcagaagcggcagaggtggaagaagaagctgcgcggagggtcctgccgcagcgggctcacgcagctcttcacgtagccgttgcgcaggctctcggggggcgaggcggccgaggctggcggcggcggcggggacctcatggctggcgcgtcccgctcgcgctcgtctttcctcatggccccgggccgccggggggccgctggcgcttgccgaccccgcgccgccctccgcgttctgggcgccccgagcttcgcagagcggtcacggctgcgcccgccgccgccaccggccgggatccccggcgcgcgggctgaggggcggcggcgtccgcctcatgccggccactgagagcggcgagaagggcttcttggtgtcccgggaccgccgcggacgcctcttcccttttccctcaagcgcggctcgggacgggagacggcggcgtcgcctcccagctcccgcgcgctgcaacagtt

SEQ ID NO: 45 - DNA, 5368 bp, Rattus norvegicus
  source 1..5368: mol_type = genomic DNA
aactgttgcagcgcgcgggagctgggaggcgacgcagccgtctcccgtcccgagccgtgcctgaggggaaagggaaaaggcgtccgcggcagccggccctgggacaccgagaatcccctctcgccgctctccactgcgggcatgaggcggacgccgccgcccctcagcccgcgcgccggggatccggggcggcggcggcggcaggcgcagccgtgaccgctctgcgaagctcggggcgcccggaacggggagggcgcggggtcggcgagcgccagcggcctcccggcagcccggggctatgaggaaggacgagcgcgagcgggacacgccagccatgaggtccccgccgccgccgccgccgccggccacggccacggccgcctcgccccccgagagcctgcgcaacggctacgtgaagagctgcgtgagcccgctgcggcaggaccctccgcgcagcttcttcttccacctctgccgcttctgcaacgtggagccgccggcggcctcgctccgcgccggggcacgcctctcgctcgccgctctggccgcctttgtcctggccgcgctgctgggcgcggggcccgagcgctgggcggccgcggcgaccgggcttcggacgctgctgagcgcttgctcgctcagcctcagcccgctcttcagcatcgcctgtgccttcttcttcctcacctgcttcctgacgcgcgcgcagcgcggcccggaccgcggcgccggctcctggtggctgctggcgctgcctgcctgctgctacctgggcgacttcgcggcgtggcagtggtggtcgtggctgcgcggggagccggcggcggcggcggccggccggctctgcctggtgctgagctgcgtggggctgctgacgctcgcgcctcgcgtgaggctgcggcacggagtcctggtgctgctcttcgccggcctggtgtggtgggtgtccttctccggcctcggggctctgccgcccgcgctcaggcctctgctgtcgtgcctggtcgggggcgcgggatgcctgctagccctgggcttggaccacttctttcacgtccggggagcctcacctcccccgcgctcggcgagtaccgcggatgaaaaagtgcctgtgatcagaccccggaggaggtccagctgcgtgtcgctgggagaaagcgcggccggttactatggcagtggcaagatgttcaggagaccgtcgttgccttgtatttctcgagaacagatgattctctgggactgggacttgaagcagtggtgtaaacctcattaccagaattctggaggtggaaatggagttgatctttcagtgctaaatgaagctcgcaatatggtgtcagaccttctgattgacccaagccttcccccacaagtcatttcttctttgcggagtatcagtagcttgatgggtgctttctcaggttcctgtaggccaaagattaattctttcacaccatttcctggattttatccctgttctgaagtagaagatccagtagagaaaggcgatcgaaaacttcacaaggggttgagtagcaaacccagtttcccgactgcacagctgaggaggagctcaggagcgtcaggattgctgaccagtgagcaccactcacggtgggatcgcagcggtggcaaaaggccttaccaagaactcagtgtttcaagtcatggatgccacctaaatgggccttttagttcaaatcttatgacaattccaaagcagaggtcatcatctgtgtcgctgacgcaccatgcaggtctgagaagagctggtgctttgcccagccccagtcttctgaattcttcaagccatgtacccgtgtctgctggctgtctaactaatcgatcacccgtaggatttcttgataccagtgattttcttactaagccaagtgttactttacatagatcactgggcagtgtatccagtgcagcagatttccatcagtaccttaggaactctgacagcagtctgtgtagcagctgtggacaccaaatactcaagtatgtttcgacatgtgaacctgatggtacagaccaccacaatgaaaaatcaggtgaagaagacagcactgttttctcaaaagaacgattgaacattgtggaaactcaagaagaagagacagtgaaggaagactgcagggaattatttttggaaggtgatgatcacctaatggaagaggcccagcaaccgaatattgaccaggaagtgttattggacccgatgttagtggaagattatgattcattaatagaaaagatgagcaactggaactttcagatttttgagcttgtagaaaaaatgggagaaaaatcaggaaggattctcagccaggttatgtatactttatttcaagatactggtttattggaaacatttaaaattcccactcaagaatttatgaattattttcgtgcactagaaaatggctaccgagatattccatatcacaatcgtgtgcatgccacagatgtcctacatgctgtttggtatttgacaacacgaccaattcctggcttacagcagctccataataaccatgaaacagaaaccaaagcagattcagatgctagacttagttctggacagattgcttacctttcttcgaagagttgctgtattccagataagagttatggctgcctgtcttcaaacattcctgcgttagaactgatggctttatatgtggcagctgccatgcacgattatgatcacccaggaagaacaaatgcattcctagtggctacaaatgcacctcaggcagttttatacaatgacagatctgttctagaaaatcatcatgccgcatcagcgtggaatctgtatctttctcgcccagaatacaacttcctccttaaccttgatcacatggaattcaagcgttttcgatttttagtcatagaagcaatccttgctacagatctcaaaaaacattttgagttccttgctgaattcaatgccaaggccaatgatgtaaatagtaacggtatagaatggagcagtgaaaacgatcgactcttagtctgccaggtgtgcatcaaattagcagacatcaacggcccagcaaaagatcgggatcttcatttgagatggacagaaggcattgtgaatgagttttatgagcagggagatgaagaagcaaccctgggtctacctattagtcccttcatggatcgttcttctcctcaactagcaaaactccaagagtcatttatcacccacattgtgggccccctgtgcaactcctatgatgctgctggcttgctgcctggtcagtggatagaagcagaagagggtgacgatacagaaagtgatgatgatgatgatgatgatgatgatgatgatgatgatgatgatgatgatgatgaagagttagattcagatgatgaagaaacagaagacaatctaaatcctaaaccacaaagaaggaaaggcaggcggcgaatattttgccaactaatgcaccacctcactgaaaaccacaagatctggaaggaaatcatagaagaggaagaaaaatgtaaagctgaggggaacaaactgcaggtggataatgcctccttacctcaggcagatgagattcaggtcattgaagaagcagatgaagaggaagaacaaatgtttgaatgagaagaaaactcatgctgaagaagcctggggtgctcttcccagggtcgttacctagtgctcaccgtactgattctcaactgaccattcccatgtggacaggccttaatactgtgaggggatccttgctaccttggtagttctcactcctaagcactttgattacagactagagactgaccttagagctttctgcagttgagtgatgctgcagagccttctccaagccttcactggtgtgtaaatagtgtgtcataatgctgctttgctgggtagtgagctctcgtttgtcatggtgagggagggaggtagggagggagggagggatggagggatggagggaaggagggagggctaacacagaaaagtcaagtgaccttggttttcaaagtgaccataattcttttatgaaaacaggatacctcgggtatttccaaatatatcttctatgtctttgtttgggggtgggatggggcaagaaacaaacttctatgcttaatccaaaaaggaatttatcacggcctttctgagtgatttctgctcgtggcagtacactgttccatgtggttctcctagcttcatccgtgaaggactgaggacctttgttatacttaacaaaacccagatgcatcaatttctgatgctttttactgttgtgtataatctacttaagtgttttatttctgccgaaagtattcaggtttgctgtggacatcaggagtctgaattctgttcttactgattttgttccatggttgaattttaaaagtgtttaacaatgaaggaactttattctttagtcaaaactgttatttttattcttgctcaggatacataattttaaacattaattattataaacgtggcatagatttgccagaaaaaaaacattgtcctaatattgatgttaccttttatgaaatgagcaccattttcttttaattaaagccaagaaaaaggagatgactatcttttgccttagtggaaaatcaaatgaaaacaaaacccattgaaggtattgcctaaataattagttatctttaaatatgtgtcttaggtgtcttgtattcttgtgtctggttatagtaaaactgacaatttttgttactacctttctgcttcaaggggacaatggcagagatgacacatcactatgtagtaatactacagccccacagaaagactgaattttgaagtaatgtatatgatgggaattcatattaatttttacattaaaatgctatgaatagttcaataaacaattccataaagtacatataaataatttactaagaaaaagacaacatttatgtttacataacctcattagagtacagcaattgtggaaaattactgaagttatacaaagcaaccaaaatgataccaagatggttaactgatttctcaagtgatactttaagaccatacaatattttggagccattgaactttgtgcacagttaactgttagtttctacagtggttcctatatagtatgatgctagaatttcttgcctgcctagttatttaggttgtctataagaccgcagttaaagttggattggaatactggtatttttgaccctgcaggtaccatatttaatgaatcactacactttatttattaaacatttgagggttgagttccttcatgtcacttttgctaccacaaccacatgatttgtaaactggttccagcatctattactaagtaataaaattttaactgataatcta

SEQ ID NO: 46 - DNA, 5368 bp, Rattus norvegicus
  source 1..5368: mol_type = genomic DNA
tagattatcagttaaaattttattacttagtaatagatgctggaaccagtttacaaatcatgtggttgtggtagcaaaagtgacatgaaggaactcaaccctcaaatgtttaataaataaagtgtagtgattcattaaatatggtacctgcagggtcaaaaataccagtattccaatccaactttaactgcggtcttatagacaacctaaataactaggcaggcaagaaattctagcatcatactatataggaaccactgtagaaactaacagttaactgtgcacaaagttcaatggctccaaaatattgtatggtcttaaagtatcacttgagaaatcagttaaccatcttggtatcattttggttgctttgtataacttcagtaattttccacaattgctgtactctaatgaggttatgtaaacataaatgttgtctttttcttagtaaattatttatatgtactttatggaattgtttattgaactattcatagcattttaatgtaaaaattaatatgaattcccatcatatacattacttcaaaattcagtctttctgtggggctgtagtattactacatagtgatgtgtcatctctgccattgtccccttgaagcagaaaggtagtaacaaaaattgtcagttttactataaccagacacaagaatacaagacacctaagacacatatttaaagataactaattatttaggcaataccttcaatgggttttgttttcatttgattttccactaaggcaaaagatagtcatctcctttttcttggctttaattaaaagaaaatggtgctcatttcataaaaggtaacatcaatattaggacaatgttttttttctggcaaatctatgccacgtttataataattaatgtttaaaattatgtatcctgagcaagaataaaaataacagttttgactaaagaataaagttccttcattgttaaacacttttaaaattcaaccatggaacaaaatcagtaagaacagaattcagactcctgatgtccacagcaaacctgaatactttcggcagaaataaaacacttaagtagattatacacaacagtaaaaagcatcagaaattgatgcatctgggttttgttaagtataacaaaggtcctcagtccttcacggatgaagctaggagaaccacatggaacagtgtactgccacgagcagaaatcactcagaaaggccgtgataaattcctttttggattaagcatagaagtttgtttcttgccccatcccacccccaaacaaagacatagaagatatatttggaaatacccgaggtatcctgttttcataaaagaattatggtcactttgaaaaccaaggtcacttgacttttctgtgttagccctccctccttccctccatccctccatccctccctccctccctacctccctccctcaccatgacaaacgagagctcactacccagcaaagcagcattatgacacactatttacacaccagtgaaggcttggagaaggctctgcagcatcactcaactgcagaaagctctaaggtcagtctctagtctgtaatcaaagtgcttaggagtgagaactaccaaggtagcaaggatcccctcacagtattaaggcctgtccacatgggaatggtcagttgagaatcagtacggtgagcactaggtaacgaccctgggaagagcaccccaggcttcttcagcatgagttttcttctcattcaaacatttgttcttcctcttcatctgcttcttcaatgacctgaatctcatctgcctgaggtaaggaggcattatccacctgcagtttgttcccctcagctttacatttttcttcctcttctatgatttccttccagatcttgtggttttcagtgaggtggtgcattagttggcaaaatattcgccgcctgcctttccttctttgtggtttaggatttagattgtcttctgtttcttcatcatctgaatctaactcttcatcatcatcatcatcatcatcatcatcatcatcatcatcatcatcatcatcatcactttctgtatcgtcaccctcttctgcttctatccactgaccaggcagcaagccagcagcatcataggagttgcacagggggcccacaatgtgggtgataaatgactcttggagttttgctagttgaggagaagaacgatccatgaagggactaataggtagacccagggttgcttcttcatctccctgctcataaaactcattcacaatgccttctgtccatctcaaatgaagatcccgatcttttgctgggccgttgatgtctgctaatttgatgcacacctggcagactaagagtcgatcgttttcactgctccattctataccgttactatttacatcattggccttggcattgaattcagcaaggaactcaaaatgttttttgagatctgtagcaaggattgcttctatgactaaaaatcgaaaacgcttgaattccatgtgatcaaggttaaggaggaagttgtattctgggcgagaaagatacagattccacgctgatgcggcatgatgattttctagaacagatctgtcattgtataaaactgcctgaggtgcatttgtagccactaggaatgcatttgttcttcctgggtgatcataatcgtgcatggcagctgccacatataaagccatcagttctaacgcaggaatgtttgaagacaggcagccataactcttatctggaatacagcaactcttcgaagaaaggtaagcaatctgtccagaactaagtctagcatctgaatctgctttggtttctgtttcatggttattatggagctgctgtaagccaggaattggtcgtgttgtcaaataccaaacagcatgtaggacatctgtggcatgcacacgattgtgatatggaatatctcggtagccattttctagtgcacgaaaataattcataaattcttgagtgggaattttaaatgtttccaataaaccagtatcttgaaataaagtatacataacctggctgagaatccttcctgatttttctcccattttttctacaagctcaaaaatctgaaagttccagttgctcatcttttctattaatgaatcataatcttccactaacatcgggtccaataacacttcctggtcaatattcggttgctgggcctcttccattaggtgatcatcaccttccaaaaataattccctgcagtcttccttcactgtctcttcttcttgagtttccacaatgttcaatcgttcttttgagaaaacagtgctgtcttcttcacctgatttttcattgtggtggtctgtaccatcaggttcacatgtcgaaacatacttgagtatttggtgtccacagctgctacacagactgctgtcagagttcctaaggtactgatggaaatctgctgcactggatacactgcccagtgatctatgtaaagtaacacttggcttagtaagaaaatcactggtatcaagaaatcctacgggtgatcgattagttagacagccagcagacacgggtacatggcttgaagaattcagaagactggggctgggcaaagcaccagctcttctcagacctgcatggtgcgtcagcgacacagatgatgacctctgctttggaattgtcataagatttgaactaaaaggcccatttaggtggcatccatgacttgaaacactgagttcttggtaaggccttttgccaccgctgcgatcccaccgtgagtggtgctcactggtcagcaatcctgacgctcctgagctcctcctcagctgtgcagtcgggaaactgggtttgctactcaaccccttgtgaagttttcgatcgcctttctctactggatcttctacttcagaacagggataaaatccaggaaatggtgtgaaagaattaatctttggcctacaggaacctgagaaagcacccatcaagctactgatactccgcaaagaagaaatgacttgtgggggaaggcttgggtcaatcagaaggtctgacaccatattgcgagcttcatttagcactgaaagatcaactccatttccacctccagaattctggtaatgaggtttacaccactgcttcaagtcccagtcccagagaatcatctgttctcgagaaatacaaggcaacgacggtctcctgaacatcttgccactgccatagtaaccggccgcgctttctcccagcgacacgcagctggacctcctccggggtctgatcacaggcactttttcatccgcggtactcgccgagcgcgggggaggtgaggctccccggacgtgaaagaagtggtccaagcccagggctagcaggcatcccgcgcccccgaccaggcacgacagcagaggcctgagcgcgggcggcagagccccgaggccggagaaggacacccaccacaccaggccggcgaagagcagcaccaggactccgtgccgcagcctcacgcgaggcgcgagcgtcagcagccccacgcagctcagcaccaggcagagccggccggccgccgccgccgccggctccccgcgcagccacgaccaccactgccacgccgcgaagtcgcccaggtagcagcaggcaggcagcgccagcagccaccaggagccggcgccgcggtccgggccgcgctgcgcgcgcgtcaggaagcaggtgaggaagaagaaggcacaggcgatgctgaagagcgggctgaggctgagcgagcaagcgctcagcagcgtccgaagcccggtcgccgcggccgcccagcgctcgggccccgcgcccagcagcgcggccaggacaaaggcggccagagcggcgagcgagaggcgtgccccggcgcggagcgaggccgccggcggctccacgttgcagaagcggcagaggtggaagaagaagctgcgcggagggtcctgccgcagcgggctcacgcagctcttcacgtagccgttgcgcaggctctcggggggcgaggcggccgtggccgtggccggcggcggcggcggcggcggggacctcatggctggcgtgtcccgctcgcgctcgtccttcctcatagccccgggctgccgggaggccgctggcgctcgccgaccccgcgccctccccgttccgggcgccccgagcttcgcagagcggtcacggctgcgcctgccgccgccgccgccccggatccccggcgcgcgggctgaggggcggcggcgtccgcctcatgcccgcagtggagagcggcgagaggggattctcggtgtcccagggccggctgccgcggacgccttttccctttcccctcaggcacggctcgggacgggagacggctgcgtcgcctcccagctcccgcgcgctgcaacagtt

SEQ ID NO: 47 - DNA, 7484 bp, Macaca mulatta
  source 1..7484: mol_type = genomic DNA
gctcgcgcgcccaacggaccaggctggggccgtgaggtaactgttgcagccagcggagctgggaggcgacaccgagtctccagtcccgagaggtgcccaagggaaaaggaggcggcagccaaactggtcctggagagaagccccttctgcccctctcctcagccagcatgtcccggactccgccgctcctcagtccgcgaggtggggacctcaggccgtggcggcgggcgcagccctgacgggttgtgagtcggggggcgccccgaacgcaggggctggggtctgggaacgcgagcggccgctgcggtaggagcggggtgtgctgagtcccgtggccacccccggcctcagccatgaggagggacgagcgagacgccaaagccatgcggtccctgcagcagccagatggggccggctcgccccccgagagtctgaggaacggctacgtgaagagttgcgtgagccccttgcggcaggaccctccgcgcggcttcttcttccacctctgccgcttctgcaacgtggagctgcggccgccgccggcctccccccagcagccgcggcgcggctcccccttctgccgggcgcgcctctcgctgggcgccctggctgcctttgtcctcgccctgctgctgggcgcggaacccgagagctgggctgccggggccgcctggctgcggacgctgctgagcgtgtgttcgcacagcctcagccccctctttagcatcgcctgtgccttcttcttcctcacctgcttcctcacccggaccaagcggggacccggcccgggccggagcggcggctcctggtggctgctggcgctgcccgcctgctgttacctgggggacttcttggtgtggcagtggtggtcctggccttggggggatggcgacgcagggtccccggccacgcacacgcccccggaggcggcggccggcaggttgctgctggtgctgagctgcgtggggctgctgctgacgctcgcgcaccctctgcggctccggcactgcctcctggtgctgctcctggccagcttcgtctggtgggtctccttcaccagcctcgggtcgctgccctccgccctcaggccgctgctctccggcctggtggggggcgctggctgcctgctggccctggcgttggatcacttctttcaaatcagggaagcgcctcttcatcctcggctgtccagtgccgccgaagaaaaagtgcctgtgatccgaccccggaggaggtccagctgcgtgtcgctaggagaaactgcagccagttactacggcagttgcaaaatattcaggagaccttcgttgccttgtatttcgagagagcagatgattctttgggattgggacttaaagcaatggtataagcctcattatcaaaattctggaggcggaaatggagttgatcttgcagtgctaaatgaggctcgcaatatggtttcagatcttctgattgatccaagccttcctccacaagtcatttcctctctacggagtatcagtagcttaatgggtgctttctcaggttcctgtaggccaaagattaatcctctcacaccatttcctggattttacccctgctctgaaatagaggacccagctgagaaaggggatagaaaacttaacaagggactaaataggaatagttcgccaactccacagctgaggaggagctcaggaacttcaggattgctacctgttgaacagtcttcaaggtgggaacgtaataatggcaaaaggcctcaccaagaatttggcatttcaagtcaaggatgctatctaaatgggccttttaattcaaatctactgactatcccgaagcaaaggtcatcttctgtatcactgactcaccatgtaggtctgagaagagctggtgttttatccagtctgagtcctgtgaattctcccaactatggaccaatggctgctggctctctaactaatcgatcacccatagaatttcctgatactgctgattttcttaataagccaagcattattttacagagatctctgggcaatgcacctaatacaccagatttttatcagcatcttagaaattctgatagcaatctgtgtaacaactgtggacatcaaatactgaaatatgtttcaacatctgaatcagacagtacagattgctgcagtggaaaatcaggtgaagaagaaaacattttctcaaaagaatcattcaaacttatggaaactcaacaagaagagaaaacagagaagaaagacagcagaaaattatttcaggaaggtgataattggctaacagaagagtcacagaatgaacagcaaacaaatattgaacaggaagtatcactggacctgattttagtagaagagtatgactcattaatagagaagatgagcaactggaattttccaatttttgaacttgtagaaaagatgggagagaaatcaggaaggattctcagtcaggttatgtataccttatttcaagacactggtttattggaaatatttaaaattcccactcaacaatttatgaactattttcgtgcattagaaaatggctatcgagacattccttatcacaatcgtatacatgccacagatgtcctacatgcagtttggtatctgacaacacggccagttcctggcttacagcagatccacaatggttgtggaacaggaaatgaaacagattctgatggtagaattaaccgtgggcgaattgcttatatttcttcgaagagctgctctattccagatgagagttatggctgcctgtcttcaaacatccctgcattagaattgatggctctatacgtggcagctgccatgcatgattatgaccacccagggaggacaaatgcatttctagtggctacaaatgcccctcaggcagttttatacaatgacagatctgttctggaaaatcatcatgctgcgtcagcttggaatctgtatctttctcgcccagaatacaacttccttcttcatcttgatcatgtggaattcaagcgctttcgttttttagtcatcgaagcaatccttgccacagatcttaaaaaacattttgattttcttgcagaattcaatgccaaggcaaatgatgtaaatagtaatggcatagaatggagtaatgaaaatgatcgcctcttggtatgccaggtgtgcatcaaactggcagatataaatggcccagcaaaagttcgagacttgcatttgaaatggacagaaggcattgtcaatgaattttatgagcagggagatgaagaagcaaatcttggtctgcccatcagtccattcatggatcgttcttctcctcaactagcaaaactccaagaatcttttatcacccacatagtgggtcccctgtgtaactcctatgatgctgctggtttgctaccaggtcagtggatagaagcagaagaggataatgatactgaaagtggtgatgatgaagatggtgaagaattagatacagatgatgaagaaatggaaaacaatctaaatccaaaaccaccaagaaggaaaagcagacggcaaatattttgtcagctaatgcaccacctcaccgaaaaccacaagatatggaaggaaatcatagaggaagaagaaaaatgtaaagctgatgggaataaactgcaggtggagaactcctccttacctcaagcagatgagattcaggtcattgaagaagcagatgaagaggaagagcgacagtttgagtaaaagaaaagtcatattgaagaagcccagagggctgtgcccaggggcagaaatcattgcctagtgtccaccggctgactctcaactgaccattcccacatggacaagccttaatactgtgagaggatccttgctctgctggcagtttcccactcctatgcactttcacaggaactagaaaactattcttaaaccaagaataccatccatgttgacccatattgcagagcccttacttaaatccttcactattgtatgaatactttgtcataatgctgctttgctgggtagtgagctcttatttttcattgggggtcagctataactaaaaactcaagtgacttatttcagttaccaaagtggccagaactttcgcttttatgaaaatagattcatattgtatttcccaatgtgtcttttatgtctttgaatgttttggaaaaaagtctatgcctgtctaaaaatgaatccagtgttgcctttctgagggatttcttctcaatgcaatacactgttaagttctattctcccagctaggtttatccatgaaggactgagtgacctttgttatatttaacaaaatccaggtgcatcaatttctgatgctttttactattgtgtattatctactatgtgtgttttatttctgctgagagtattcaggtttgccatggacatcagaagtttgaattccagtcttaccttctttatgttccatggctgaattttaaagctgtttaggcttaacaatgaagggatttattctttagtcaaaattgttatttttactctagctcaggatttgtatttttaaagatttagttaatataaacacagcacagatttgtcagaagaaaaaaaatttgccgtaataccaaggttcaccttttatgaaatgagcaacattttctgttcttagatgaatttgaaactaattaaaaccaaagaaaaggagatgtctgtcttttgccttaatgcaaaatcaaatgaaactaatctcattaaagataaagaaaaaaggaatatagtgagccctaaaggacacgtacattgaataaataattggaatatgtggttatctttagatccatatcttagttgtcatttgtttactctcaaactgatgttcatctttctgttaatttccctctgcctcaagactacatgacagaaatgacctatcactacttattatttctgaagcccaactgcaagactgatttctgagatcaagtaaagaattggaatacttatttttcatataaaaaatctaaatatgttaataaatcatttcatacaaaagtacattattaaataaccatattatcaaaataatcacaagaaaatggaccatatttacaatgttttgtaaacttgccagtgtgtggatatgtaccctacttgtgaaatacatttgaagatataaagatcagccaaaatgatggcaaaatggtaggctaatatcttctattattattggagaccatatcatattttggattcatgcaattttgcacacagtgaaaccattaattttccaaggtaatttctttagaatatggtattggcatgcagtttcttacttatctagaatatttggcttatctgaaagataccaatttaagatctctggaagtgttagaatttttgatccttcacagtatcaatatttaatcactaagctttatttattagacatgttgagtgagtgctgagttccttgctgccacttttgttaccattgccacacactatttgtaaaccagtcccaccacttattactgattaataaaattttaactgataattatttgcacttaaaatgtatatatcctgtccttatatttctctagagtacattttccatcatgtttacgtgtatttctgttattacttcctctcctgcagaatacatacaagtgtatgtgtataaattcatacatgtgcaagcatgcatattgagattcaatcacatttccatactgtcttttattgggttttatatatatatattttttttagtttatgttattttctcaaaagcagcatttttaattacaaatactggatttactggatttaattataaatccaattactattgggaactcatttttacataatatagtccttaaattatttaacccttgctaagtaattgacatatgtcaaaataactagcctaaagaaacccaaaaaagtatctctcccgagctgaaacttaaaaattcataagtgtaagaaagaatgtgagagtatattaaatgcacaccgtactattagatgaaatcttacttgagaaattgccataagccatattgcagatcctattttgactgctactgaatcagattaatttcttgttaaaataattttcatcataaatctcctatttttaaagccactggtattagaaatattcttttagtgctgtatatatgtatctactgacacatttttctccataaaagtacttttagaaattatttcatgatttgaaagctgtttcctgctgttatttcattacttactttgttggtgctattggctttttctacttattttacaagaaacctggagtttctggcttacttaagtcatcagaaattccctgtatctagattgcatcatctcatagaaacaaacttcacaaaagagatgaatagatacaactctggttccttcattataattgccagattaatataagctcttctagtgtgtaggggataggagtggcaggtggagcagagatgcatcacttctcaaaggaatgtgacttttaagctcagaactgaagaattaagagttagctcagaaatgactgcttgtagagagagaataacagtgtgtacagaggccagaagacaaagcatccctacactggatgagccaaagagatttagggtggctggaagatagagcacaagaagagggagtggtagagagatggtggttaatgaagggccttgtaaaacatgacgtgccactttaaactttattcctaaaggaaatgggaaacaatgaaaaagtttcaatcggaagaataacatgattagatttacattttacgaggatcaaatagcatacttcagttgtcctttgttatatgtgggggattggttctaggacctcctcagctataaaaattgtcacatattcaagtctcacagtcaaccctgtggaacccgcagatacaaaaagttggccctttctatacgagggttacacatcccactaatactatattttcatctgcatttagttgcggatgcagaacctgccaatacagggccaactatatttactgaaaaactccacatataagtggacccatggagttcgaacccatgttgttcaagggtcaactgtattttgaatggtttaaaactattgttttggactgagttcctgcacctaggccccaatagaccagaccaaagcaaaatggagtcattcatactaaatgccacacaatcaaactgaaactttaaggaaatacattgatccccagactagttttttctcaaaacaggagattccagtctatctgagcataatgaaggaagtccccgctgctttaacctgtacaaagaagacgtaatctgaagtaacctagtgataactgatcagtttttatttttctattattctgtttccttgttcccatccttacaaaacccactgttctgccattacccagtgggaatttcattctattttgtagaatgcaagttacctgatacatgaatctagaataaaagccaattatatctgtaa

SEQ ID NO: 48 - DNA, 7484 bp, Macaca mulatta
  source 1..7484: mol_type = genomic DNA
ttacagatataattggcttttattctagattcatgtatcaggtaacttgcattctacaaaatagaatgaaattcccactgggtaatggcagaacagtgggttttgtaaggatgggaacaaggaaacagaataatagaaaaataaaaactgatcagttatcactaggttacttcagattacgtcttctttgtacaggttaaagcagcggggacttccttcattatgctcagatagactggaatctcctgttttgagaaaaaactagtctggggatcaatgtatttccttaaagtttcagtttgattgtgtggcatttagtatgaatgactccattttgctttggtctggtctattggggcctaggtgcaggaactcagtccaaaacaatagttttaaaccattcaaaatacagttgacccttgaacaacatgggttcgaactccatgggtccacttatatgtggagtttttcagtaaatatagttggccctgtattggcaggttctgcatccgcaactaaatgcagatgaaaatatagtattagtgggatgtgtaaccctcgtatagaaagggccaactttttgtatctgcgggttccacagggttgactgtgagacttgaatatgtgacaatttttatagctgaggaggtcctagaaccaatcccccacatataacaaaggacaactgaagtatgctatttgatcctcgtaaaatgtaaatctaatcatgttattcttccgattgaaactttttcattgtttcccatttcctttaggaataaagtttaaagtggcacgtcatgttttacaaggcccttcattaaccaccatctctctaccactccctcttcttgtgctctatcttccagccaccctaaatctctttggctcatccagtgtagggatgctttgtcttctggcctctgtacacactgttattctctctctacaagcagtcatttctgagctaactcttaattcttcagttctgagcttaaaagtcacattcctttgagaagtgatgcatctctgctccacctgccactcctatcccctacacactagaagagcttatattaatctggcaattataatgaaggaaccagagttgtatctattcatctcttttgtgaagtttgtttctatgagatgatgcaatctagatacagggaatttctgatgacttaagtaagccagaaactccaggtttcttgtaaaataagtagaaaaagccaatagcaccaacaaagtaagtaatgaaataacagcaggaaacagctttcaaatcatgaaataatttctaaaagtacttttatggagaaaaatgtgtcagtagatacatatatacagcactaaaagaatatttctaataccagtggctttaaaaataggagatttatgatgaaaattattttaacaagaaattaatctgattcagtagcagtcaaaataggatctgcaatatggcttatggcaatttctcaagtaagatttcatctaatagtacggtgtgcatttaatatactctcacattctttcttacacttatgaatttttaagtttcagctcgggagagatacttttttgggtttctttaggctagttattttgacatatgtcaattacttagcaagggttaaataatttaaggactatattatgtaaaaatgagttcccaatagtaattggatttataattaaatccagtaaatccagtatttgtaattaaaaatgctgcttttgagaaaataacataaactaaaaaaaatatatatatataaaacccaataaaagacagtatggaaatgtgattgaatctcaatatgcatgcttgcacatgtatgaatttatacacatacacttgtatgtattctgcaggagaggaagtaataacagaaatacacgtaaacatgatggaaaatgtactctagagaaatataaggacaggatatatacattttaagtgcaaataattatcagttaaaattttattaatcagtaataagtggtgggactggtttacaaatagtgtgtggcaatggtaacaaaagtggcagcaaggaactcagcactcactcaacatgtctaataaataaagcttagtgattaaatattgatactgtgaaggatcaaaaattctaacacttccagagatcttaaattggtatctttcagataagccaaatattctagataagtaagaaactgcatgccaataccatattctaaagaaattaccttggaaaattaatggtttcactgtgtgcaaaattgcatgaatccaaaatatgatatggtctccaataataatagaagatattagcctaccattttgccatcattttggctgatctttatatcttcaaatgtatttcacaagtagggtacatatccacacactggcaagtttacaaaacattgtaaatatggtccattttcttgtgattattttgataatatggttatttaataatgtacttttgtatgaaatgatttattaacatatttagattttttatatgaaaaataagtattccaattctttacttgatctcagaaatcagtcttgcagttgggcttcagaaataataagtagtgataggtcatttctgtcatgtagtcttgaggcagagggaaattaacagaaagatgaacatcagtttgagagtaaacaaatgacaactaagatatggatctaaagataaccacatattccaattatttattcaatgtacgtgtcctttagggctcactatattccttttttctttatctttaatgagattagtttcatttgattttgcattaaggcaaaagacagacatctccttttctttggttttaattagtttcaaattcatctaagaacagaaaatgttgctcatttcataaaaggtgaaccttggtattacggcaaattttttttcttctgacaaatctgtgctgtgtttatattaactaaatctttaaaaatacaaatcctgagctagagtaaaaataacaattttgactaaagaataaatcccttcattgttaagcctaaacagctttaaaattcagccatggaacataaagaaggtaagactggaattcaaacttctgatgtccatggcaaacctgaatactctcagcagaaataaaacacacatagtagataatacacaatagtaaaaagcatcagaaattgatgcacctggattttgttaaatataacaaaggtcactcagtccttcatggataaacctagctgggagaatagaacttaacagtgtattgcattgagaagaaatccctcagaaaggcaacactggattcatttttagacaggcatagacttttttccaaaacattcaaagacataaaagacacattgggaaatacaatatgaatctattttcataaaagcgaaagttctggccactttggtaactgaaataagtcacttgagtttttagttatagctgacccccaatgaaaaataagagctcactacccagcaaagcagcattatgacaaagtattcatacaatagtgaaggatttaagtaagggctctgcaatatgggtcaacatggatggtattcttggtttaagaatagttttctagttcctgtgaaagtgcataggagtgggaaactgccagcagagcaaggatcctctcacagtattaaggcttgtccatgtgggaatggtcagttgagagtcagccggtggacactaggcaatgatttctgcccctgggcacagccctctgggcttcttcaatatgacttttcttttactcaaactgtcgctcttcctcttcatctgcttcttcaatgacctgaatctcatctgcttgaggtaaggaggagttctccacctgcagtttattcccatcagctttacatttttcttcttcctctatgatttccttccatatcttgtggttttcggtgaggtggtgcattagctgacaaaatatttgccgtctgcttttccttcttggtggttttggatttagattgttttccatttcttcatcatctgtatctaattcttcaccatcttcatcatcaccactttcagtatcattatcctcttctgcttctatccactgacctggtagcaaaccagcagcatcataggagttacacaggggacccactatgtgggtgataaaagattcttggagttttgctagttgaggagaagaacgatccatgaatggactgatgggcagaccaagatttgcttcttcatctccctgctcataaaattcattgacaatgccttctgtccatttcaaatgcaagtctcgaacttttgctgggccatttatatctgccagtttgatgcacacctggcataccaagaggcgatcattttcattactccattctatgccattactatttacatcatttgccttggcattgaattctgcaagaaaatcaaaatgttttttaagatctgtggcaaggattgcttcgatgactaaaaaacgaaagcgcttgaattccacatgatcaagatgaagaaggaagttgtattctgggcgagaaagatacagattccaagctgacgcagcatgatgattttccagaacagatctgtcattgtataaaactgcctgaggggcatttgtagccactagaaatgcatttgtcctccctgggtggtcataatcatgcatggcagctgccacgtatagagccatcaattctaatgcagggatgtttgaagacaggcagccataactctcatctggaatagagcagctcttcgaagaaatataagcaattcgcccacggttaattctaccatcagaatctgtttcatttcctgttccacaaccattgtggatctgctgtaagccaggaactggccgtgttgtcagataccaaactgcatgtaggacatctgtggcatgtatacgattgtgataaggaatgtctcgatagccattttctaatgcacgaaaatagttcataaattgttgagtgggaattttaaatatttccaataaaccagtgtcttgaaataaggtatacataacctgactgagaatccttcctgatttctctcccatcttttctacaagttcaaaaattggaaaattccagttgctcatcttctctattaatgagtcatactcttctactaaaatcaggtccagtgatacttcctgttcaatatttgtttgctgttcattctgtgactcttctgttagccaattatcaccttcctgaaataattttctgctgtctttcttctctgttttctcttcttgttgagtttccataagtttgaatgattcttttgagaaaatgttttcttcttcacctgattttccactgcagcaatctgtactgtctgattcagatgttgaaacatatttcagtatttgatgtccacagttgttacacagattgctatcagaatttctaagatgctgataaaaatctggtgtattaggtgcattgcccagagatctctgtaaaataatgcttggcttattaagaaaatcagcagtatcaggaaattctatgggtgatcgattagttagagagccagcagccattggtccatagttgggagaattcacaggactcagactggataaaacaccagctcttctcagacctacatggtgagtcagtgatacagaagatgacctttgcttcgggatagtcagtagatttgaattaaaaggcccatttagatagcatccttgacttgaaatgccaaattcttggtgaggccttttgccattattacgttcccaccttgaagactgttcaacaggtagcaatcctgaagttcctgagctcctcctcagctgtggagttggcgaactattcctatttagtcccttgttaagttttctatcccctttctcagctgggtcctctatttcagagcaggggtaaaatccaggaaatggtgtgagaggattaatctttggcctacaggaacctgagaaagcacccattaagctactgatactccgtagagaggaaatgacttgtggaggaaggcttggatcaatcagaagatctgaaaccatattgcgagcctcatttagcactgcaagatcaactccatttccgcctccagaattttgataatgaggcttataccattgctttaagtcccaatcccaaagaatcatctgctctctcgaaatacaaggcaacgaaggtctcctgaatattttgcaactgccgtagtaactggctgcagtttctcctagcgacacgcagctggacctcctccggggtcggatcacaggcactttttcttcggcggcactggacagccgaggatgaagaggcgcttccctgatttgaaagaagtgatccaacgccagggccagcaggcagccagcgccccccaccaggccggagagcagcggcctgagggcggagggcagcgacccgaggctggtgaaggagacccaccagacgaagctggccaggagcagcaccaggaggcagtgccggagccgcagagggtgcgcgagcgtcagcagcagccccacgcagctcagcaccagcagcaacctgccggccgccgcctccgggggcgtgtgcgtggccggggaccctgcgtcgccatccccccaaggccaggaccaccactgccacaccaagaagtcccccaggtaacagcaggcgggcagcgccagcagccaccaggagccgccgctccggcccgggccgggtccccgcttggtccgggtgaggaagcaggtgaggaagaagaaggcacaggcgatgctaaagagggggctgaggctgtgcgaacacacgctcagcagcgtccgcagccaggcggccccggcagcccagctctcgggttccgcgcccagcagcagggcgaggacaaaggcagccagggcgcccagcgagaggcgcgcccggcagaagggggagccgcgccgcggctgctggggggaggccggcggcggccgcagctccacgttgcagaagcggcagaggtggaagaagaagccgcgcggagggtcctgccgcaaggggctcacgcaactcttcacgtagccgttcctcagactctcggggggcgagccggccccatctggctgctgcagggaccgcatggctttggcgtctcgctcgtccctcctcatggctgaggccgggggtggccacgggactcagcacaccccgctcctaccgcagcggccgctcgcgttcccagaccccagcccctgcgttcggggcgccccccgactcacaacccgtcagggctgcgcccgccgccacggcctgaggtccccacctcgcggactgaggagcggcggagtccgggacatgctggctgaggagaggggcagaaggggcttctctccaggaccagtttggctgccgcctccttttcccttgggcacctctcgggactggagactcggtgtcgcctcccagctccgctggctgcaacagttacctcacggccccagcctggtccgttgggcgcgcgagc

SEQ ID NO: 49 - DNA, 3202 bp, Homo sapiens
  source 1..3202: mol_type = genomic DNA
acacttcttccagggcctctggcagccaggacagagttgagaccacagctgttgagaccctgagccctgagtctgtattgctcaagaagggccttccccagcaatgacctcctcattgcttctggcctttctcctcctggctccaaccacagtggccactcccagagctggcggtcagtgtccagcatgtggggggcccaccttggaactggagagccagcgggagctgcttcttgatctggccaagagaagcatcttggacaagctgcacctcacccagcgcccaacactgaaccgccctgtgtccagagctgctttgaggactgcactgcagcacctccacggggtcccacagggggcacttctagaggacaacagggaacaggaatgtgaaatcatcagctttgctgagacaggcctctccaccatcaaccagactcgtcttgattttcacttctcctctgatagaactgctggtgacagggaggtccagcaggccagtctcatgttctttgtgcagctcccttccaataccacttggaccttgaaagtgagagtccttgtgctgggtccacataataccaacctcaccttggctactcagtacctgctggaggtggatgccagtggctggcatcaactccccctagggcctgaagctcaagctgcctgcagccaggggcacctgaccctggagctggtacttgaaggccaggtagcccagagctcagtcatcctgggtggagctgcccataggccttttgtggcagcccgggtgagagttgggggcaaacaccagattcaccgacgaggcatcgactgccaaggagggtccaggatgtgctgtcgacaagagttttttgtggacttccgtgagattggctggcacgactggatcatccagcctgagggctacgccatgaacttctgcatagggcagtgcccactacacatagcaggcatgcctggtattgctgcctcctttcacactgcagtgctcaatcttctcaaggccaacacagctgcaggcaccactggagggggctcatgctgtgtacccacggcccggcgccccctgtctctgctctattatgacagggacagcaacattgtcaagactgacatacctgacatggtagtagaggcctgtgggtgcagttagtctatgtgtggtatgggcagcccaaggttgcatgggaaaacacgcccctacagaagtgcacttccttgagaggagggaatgacctcattctctgtccagaatgtggactccctcttcctgagcatcttatggaaattaccccacctttgacttgaagaaaccttcatctaaagcaagtcactgtgccatcttcctgaccactaccctctttcctagggcatagtccatcccgctagtccatcccgctagccccactccagggactcagacccatctccaaccatgagcaatgccatctggttcccaggcaaagacacccttagctcacctttaatagaccccataacccactatgccttcctgtcctttctactcaatggtccccactccaagatgagttgacacaaccccttcccccaatttttgtggatctccagagaggcccttctttggattcaccaaagtttagatcactgctgcccaaaatagaggcttacctacccccctctttgttgtgagcccctgtccttcttagttgtccaggtgaactactaaagctctctttgcataccttcatccattttttgtccttctctgcctttctctatgcccttaagggctgacttgcctgagctctatcacctgagctcccctgccctctggcttcctgctgaggtcagggcatttcttatccctgttccctctctgtctaggtgtcatggttctgtgtaactgtggctattctgtgtccctacactacctggctacccccttccatggccccagctctgcctacattctgatataactgcttcaacactagggggtcctaaaggctttctatcttgctagtccctggggcctcaacatctcatactggttcccttaactctgcctatacctctgtaaataattccttcactaagttctcttgatgaagcaaaaacagacagctgaaaagtcctctatctcctacaagggccctaactggcaccccagatgacacagagcctgcctgcttatgctgtagtctgcctactctgctgtctcttcacatggtctcctcagaactgaactattgtatccatctcacactttatgcctcttctttcttaggcaccccgtccctccatccttccagaaccatctttgaggtctcatggctaataaaaacctaggctttacctgttccctctgtaatccctccaaaagatgagacagatctatgcttggtcatccagtaaactgaccagctgtgggcacgcaagtgtgggaggcagaggcatgctcagagctggctgccaggacctctgacttgccttcctttcacccacccccagtgctccacccaggagtcctgcctggaagctggaatgggcaagggctgctggagtgggacagggagaagaggaaggcctggatgaggagagggtggcatttgctctgagactgggtcctttttagacctttgcccgtcctcccccacatctcctccctttggctggacagtcctgaaccatgaggtcgataatgtctgcagcccaaggccgagtttgcgcaaaacccatgtgttctttggtaaacgtgatgtctgtgtttgctcagtttatgaccccctcctatgagggtaagaggtccctgaaataggaaccctagaggagaaagtctgaaaaggactgcctgggggactgtaaatctgagcttgagggcttcctgagcaacccatggaagttatcccacctttgacttgaggagaccttcatctaaggagaatctaaggaggccttctggtgtctcccccacacatccccgacccccagatctaacctccttcccaattacagcttagtctccagggctaggactggggtaaagcaaagtgagtcattcacctgggggggctaaattttaagggggtggtgaacaatttattaatcaagataggactttaatgcaatattattttaaagtcaaaattaatgcaaaaaatccatgatgaacaaaatagcctacttttaaataaaaacaggatcagcatta

SEQ ID NO: 50 - DNA, 3202 bp, Homo sapiens
  source 1..3202: mol_type = genomic DNA
taatgctgatcctgtttttatttaaaagtaggctattttgttcatcatggattttttgcattaattttgactttaaaataatattgcattaaagtcctatcttgattaataaattgttcaccacccccttaaaatttagcccccccaggtgaatgactcactttgctttaccccagtcctagccctggagactaagctgtaattgggaaggaggttagatctgggggtcggggatgtgtgggggagacaccagaaggcctccttagattctccttagatgaaggtctcctcaagtcaaaggtgggataacttccatgggttgctcaggaagccctcaagctcagatttacagtcccccaggcagtccttttcagactttctcctctagggttcctatttcagggacctcttaccctcataggagggggtcataaactgagcaaacacagacatcacgtttaccaaagaacacatgggttttgcgcaaactcggccttgggctgcagacattatcgacctcatggttcaggactgtccagccaaagggaggagatgtgggggaggacgggcaaaggtctaaaaaggacccagtctcagagcaaatgccaccctctcctcatccaggccttcctcttctccctgtcccactccagcagcccttgcccattccagcttccaggcaggactcctgggtggagcactgggggtgggtgaaaggaaggcaagtcagaggtcctggcagccagctctgagcatgcctctgcctcccacacttgcgtgcccacagctggtcagtttactggatgaccaagcatagatctgtctcatcttttggagggattacagagggaacaggtaaagcctaggtttttattagccatgagacctcaaagatggttctggaaggatggagggacggggtgcctaagaaagaagaggcataaagtgtgagatggatacaatagttcagttctgaggagaccatgtgaagagacagcagagtaggcagactacagcataagcaggcaggctctgtgtcatctggggtgccagttagggcccttgtaggagatagaggacttttcagctgtctgtttttgcttcatcaagagaacttagtgaaggaattatttacagaggtataggcagagttaagggaaccagtatgagatgttgaggccccagggactagcaagatagaaagcctttaggaccccctagtgttgaagcagttatatcagaatgtaggcagagctggggccatggaagggggtagccaggtagtgtagggacacagaatagccacagttacacagaaccatgacacctagacagagagggaacagggataagaaatgccctgacctcagcaggaagccagagggcaggggagctcaggtgatagagctcaggcaagtcagcccttaagggcatagagaaaggcagagaaggacaaaaaatggatgaaggtatgcaaagagagctttagtagttcacctggacaactaagaaggacaggggctcacaacaaagaggggggtaggtaagcctctattttgggcagcagtgatctaaactttggtgaatccaaagaagggcctctctggagatccacaaaaattgggggaaggggttgtgtcaactcatcttggagtggggaccattgagtagaaaggacaggaaggcatagtgggttatggggtctattaaaggtgagctaagggtgtctttgcctgggaaccagatggcattgctcatggttggagatgggtctgagtccctggagtggggctagcgggatggactagcgggatggactatgccctaggaaagagggtagtggtcaggaagatggcacagtgacttgctttagatgaaggtttcttcaagtcaaaggtggggtaatttccataagatgctcaggaagagggagtccacattctggacagagaatgaggtcattccctcctctcaaggaagtgcacttctgtaggggcgtgttttcccatgcaaccttgggctgcccataccacacatagactaactgcacccacaggcctctactaccatgtcaggtatgtcagtcttgacaatgttgctgtccctgtcataatagagcagagacagggggcgccgggccgtgggtacacagcatgagccccctccagtggtgcctgcagctgtgttggccttgagaagattgagcactgcagtgtgaaaggaggcagcaataccaggcatgcctgctatgtgtagtgggcactgccctatgcagaagttcatggcgtagccctcaggctggatgatccagtcgtgccagccaatctcacggaagtccacaaaaaactcttgtcgacagcacatcctggaccctccttggcagtcgatgcctcgtcggtgaatctggtgtttgcccccaactctcacccgggctgccacaaaaggcctatgggcagctccacccaggatgactgagctctgggctacctggccttcaagtaccagctccagggtcaggtgcccctggctgcaggcagcttgagcttcaggccctagggggagttgatgccagccactggcatccacctccagcaggtactgagtagccaaggtgaggttggtattatgtggacccagcacaaggactctcactttcaaggtccaagtggtattggaagggagctgcacaaagaacatgagactggcctgctggacctccctgtcaccagcagttctatcagaggagaagtgaaaatcaagacgagtctggttgatggtggagaggcctgtctcagcaaagctgatgatttcacattcctgttccctgttgtcctctagaagtgccccctgtgggaccccgtggaggtgctgcagtgcagtcctcaaagcagctctggacacagggcggttcagtgttgggcgctgggtgaggtgcagcttgtccaagatgcttctcttggccagatcaagaagcagctcccgctggctctccagttccaaggtgggccccccacatgctggacactgaccgccagctctgggagtggccactgtggttggagccaggaggagaaaggccagaagcaatgaggaggtcattgctggggaaggcccttcttgagcaatacagactcagggctcagggtctcaacagctgtggtctcaactctgtcctggctgccagaggccctggaagaagtgt

SEQ ID NO: 51 - DNA, 1976 bp, Mus musculus
  source 1..1976: mol_type = genomic DNA
ggccgctgtatctctgacaaaaaggagtcatgccagtcggaggtcagtcacattcctcccagggtccctggtgcccaggacagagttgaagccactcccgttgagaccctgaatataggctttgggtcctttaaggaggctatcctccagcaatggcctcctccttgctcctggctcttctgttcctgactccaaccacagtagtgaaccccaaaactgagggtccatgcccagcatgttggggtgccatctttgacctggagagccagcgggagctgcttctcgatttggccaagaaaagtatcctggacaagctgcacctcagccagcgccccatactcagtcggccagtgtccagaggggctctcaagaccgcgctgcagcgcctccgcgggcctcgacgggaaaccctgttggagcatgaccagagacaagaagaatatgagatcatcagctttgctgacacagacctctccagcatcaaccagacccggctcgagttccacttctctggtagaatggccagcggcatggaggtccggcagacccgcttcatgttcttcgtacagttcccccacaatgccacccagaccatgaatataagagttcttgtgctaagaccatatgacaccaacctcaccttgacaagtcagtacgtggtgcaggtgaatgccagtggctggtaccagcttctcctgggacctgaagctcaagctgcttgcagccagggacaccttactctggagctggtaccagaaagccaggtggcccacagttccttgatcctgggctggttttcccacaggccttttgtggcagcccaggtaagggttgagggcaagcatcgggttcgccggcgaggtatcgattgccagggggcgtccaggatgtgctgtcgacaagagttcttcgtagacttccgtgagattggctggaatgactggatcatccagcctgaaggctatgccatgaacttctgcactgggcagtgcccactacatgtggcaggcatgcctggcatctctgcctcctttcacactgcagtgctgaatctgctcaaagccaacgcagctgctggcaccactggcaggggctcgtgctgcgtgcctacatctcggcgccctctgtctttgctctactatgacagggacagcaacattgtcaagacggatatacctgacatggtggtcgaggcctgcgggtgtagttagcttatgggtgatacaggctgcctgaggtagaatggccttcctcaggaaggggaaactctgttcccacttctgtccagaatggaaacacctttctaagcatgcagacatccctctgtggacttcaggggatccacctctaaagagagtcactagtgaccaacagcctttctctctcctgggacatggttgacccagtacacccatcctcagccttaagctagaggctaatcgactgcctaccacaagcaatgtcattttgttcctggcaaacacacccttagctctcccttagtcaactatgtaatctactctgcctccctgaccctgccaccggaaggttcctattccacgatgatatgccttagtgtctccccttgaattctgtggctctccgaagaaccccttcatcagggtcactgaagattatattgctgccttccaaagaaaggctcatctctcaaatctggagacccgagcccagatgtgctactaaatagtgttctctgccctcttctgccctcgggggtgacataccaagtctcattggttggacattcctctagtttccagctgaatttgaccaaaaggagactccagttggaaactaaagcctaggataacacagaaaaactccatcaggcatagtggctcacatggacaagtccagccctgcacacgagagactgaggccagctagctctaggctagcctgggttatgccattaagacctttgtcacaaagtaaaagaaggaagaatgaaagaa

SEQ ID NO: 52 - DNA, 1976 bp, Mus musculus
  source 1..1976: mol_type = genomic DNA
ttctttcattcttccttcttttactttgtgacaaaggtcttaatggcataacccaggctagcctagagctagctggcctcagtctctcgtgtgcagggctggacttgtccatgtgagccactatgcctgatggagtttttctgtgttatcctaggctttagtttccaactggagtctccttttggtcaaattcagctggaaactagaggaatgtccaaccaatgagacttggtatgtcacccccgagggcagaagagggcagagaacactatttagtagcacatctgggctcgggtctccagatttgagagatgagcctttctttggaaggcagcaatataatcttcagtgaccctgatgaaggggttcttcggagagccacagaattcaaggggagacactaaggcatatcatcgtggaataggaaccttccggtggcagggtcagggaggcagagtagattacatagttgactaagggagagctaagggtgtgtttgccaggaacaaaatgacattgcttgtggtaggcagtcgattagcctctagcttaaggctgaggatgggtgtactgggtcaaccatgtcccaggagagagaaaggctgttggtcactagtgactctctttagaggtggatcccctgaagtccacagagggatgtctgcatgcttagaaaggtgtttccattctggacagaagtgggaacagagtttccccttcctgaggaaggccattctacctcaggcagcctgtatcacccataagctaactacacccgcaggcctcgaccaccatgtcaggtatatccgtcttgacaatgttgctgtccctgtcatagtagagcaaagacagagggcgccgagatgtaggcacgcagcacgagcccctgccagtggtgccagcagctgcgttggctttgagcagattcagcactgcagtgtgaaaggaggcagagatgccaggcatgcctgccacatgtagtgggcactgcccagtgcagaagttcatggcatagccttcaggctggatgatccagtcattccagccaatctcacggaagtctacgaagaactcttgtcgacagcacatcctggacgccccctggcaatcgatacctcgccggcgaacccgatgcttgccctcaacccttacctgggctgccacaaaaggcctgtgggaaaaccagcccaggatcaaggaactgtgggccacctggctttctggtaccagctccagagtaaggtgtccctggctgcaagcagcttgagcttcaggtcccaggagaagctggtaccagccactggcattcacctgcaccacgtactgacttgtcaaggtgaggttggtgtcatatggtcttagcacaagaactcttatattcatggtctgggtggcattgtgggggaactgtacgaagaacatgaagcgggtctgccggacctccatgccgctggccattctaccagagaagtggaactcgagccgggtctggttgatgctggagaggtctgtgtcagcaaagctgatgatctcatattcttcttgtctctggtcatgctccaacagggtttcccgtcgaggcccgcggaggcgctgcagcgcggtcttgagagcccctctggacactggccgactgagtatggggcgctggctgaggtgcagcttgtccaggatacttttcttggccaaatcgagaagcagctcccgctggctctccaggtcaaagatggcaccccaacatgctgggcatggaccctcagttttggggttcactactgtggttggagtcaggaacagaagagccaggagcaaggaggaggccattgctggaggatagcctccttaaaggacccaaagcctatattcagggtctcaacgggagtggcttcaactctgtcctgggcaccagggaccctgggaggaatgtgactgacctccgactggcatgactcctttttgtcagagatacagcggcc

SEQ ID NO: 53 - DNA, 2022 bp, Rattus norvegicus
  source 1..2022: mol_type = genomic DNA
cagggtccctggtggccaggacagagttgaagctactcccgttgagaccctgaacacaggcgttgtgtcctttaaggagaccatcctccagcaatggcctcctccttgctcctggctcttctgttcctgactctagccacagtagtgaacctcaaaactgatggtccatgtccagcatgttggggtgccacctttgacctggagagccatcgggagctccttctcgatttggccaagaaaagcatcctggacaagctgcacctcagccagcgccccatactcagtcggcctgtgtccagagaggccctcaagaccgcgctgcggcgcctccgtgggactcgagcggaaaccctgttggagcatgaccagagacaagaatatgagatcatcagctttgctgacacaggcctctccaacatcaaccaaacccgtcttgaattccatttctctgatagaactactggtggtgtggaggtcctgcagacccgtttcatgttcttcatgcagctccctcccaacaccacccagaccatgaatataagagttcttgtgctaaggccatatgacaccaacctcaccttgacaagccagtacatgctgcaggtggatgccagtggctggtaccagcttctcctaggacccgaagctcaagctgcttgcagtcaggggcacctcactctggagctggtgccagaaagtcagctggcccacagttccttgatcctggatggggtttcccacaggccttttgtggcagcccaggtaagagttgaaggcaagcatcgggtacgccggcgaggtatcaactgccaggggctgtccaggatgtgctgtcggcaagagttctttgtggacttccgtgagattggctggcatgactggatcatccagcccgaaggctatgccatgaacttctgcactgggcagtgcccactacatgtggcaggcatgcctggcatctctgcgtcctttcacactgcagtgctgaatctgctcaaagccaacacagatgctggcactgcccgcaggggctcatgctgcgtgcctacgtctcggcgccctctgtctttgctctactatgacagggacagcaacattgtcaagacggatatacctgacatggtggtagaggcctgtgggtgcagttagcttatgtgtgatataggcagcctgaggtagagcagcagcctgaggtagagcggccttccccaggacggggtgactctgctctggcttctgtccagaaagtaagcgccttctttctaagcatacagacatccctccgttgactccaggagatccacctctaaagggagtcactcatgatcaacagcctttctctccccttggacatggttgacccagtatacccacatcttcagctaggccaggggctaatccactgccaaccacaagcagtatcatttcatttccagcaaacacatccttagttcacccttagtcaactatgtcacctactctgcctccctgacctgccacctgaggctcccaccgagatgacgtgccttagtatctcctcttgaattctatggctctcccaagagtcctttcctcagcttcactaaagattataccgctgtcttccaaagcaaggcgcagctctcagatctcgagaccctcacccagatgtgctgctaaatgctgtctgcacagcttccagagttctctgccctcctctgccctggtgggtggcataccaagactcatcacctgaactctcctacccaactgaacttgaccaaagggagactcaggttggaaacaaaatcccaggatgatacacggaaaaactccattaggcacagtgacatacatgtgtaattcaaacgctgcacttgagagactgaggcaggaggagatctatcgaaaggttgagaccaactagctgtaggctagcctgggctatgctgttaagaccttgtcacaaagtacaagaagggagaataaaagaatatttcctaaaaaaaaaaaaaaaaaaaaaaaaaaaaaaaaaaaaaaaaa

SEQ ID NO: 54 - DNA, 2022 bp, Rattus norvegicus
  source 1..2022: mol_type = genomic DNA
tttttttttttttttttttttttttttttttttttttttttaggaaatattcttttattctcccttcttgtactttgtgacaaggtcttaacagcatagcccaggctagcctacagctagttggtctcaacctttcgatagatctcctcctgcctcagtctctcaagtgcagcgtttgaattacacatgtatgtcactgtgcctaatggagtttttccgtgtatcatcctgggattttgtttccaacctgagtctccctttggtcaagttcagttgggtaggagagttcaggtgatgagtcttggtatgccacccaccagggcagaggagggcagagaactctggaagctgtgcagacagcatttagcagcacatctgggtgagggtctcgagatctgagagctgcgccttgctttggaagacagcggtataatctttagtgaagctgaggaaaggactcttgggagagccatagaattcaagaggagatactaaggcacgtcatctcggtgggagcctcaggtggcaggtcagggaggcagagtaggtgacatagttgactaagggtgaactaaggatgtgtttgctggaaatgaaatgatactgcttgtggttggcagtggattagcccctggcctagctgaagatgtgggtatactgggtcaaccatgtccaaggggagagaaaggctgttgatcatgagtgactccctttagaggtggatctcctggagtcaacggagggatgtctgtatgcttagaaagaaggcgcttactttctggacagaagccagagcagagtcaccccgtcctggggaaggccgctctacctcaggctgctgctctacctcaggctgcctatatcacacataagctaactgcacccacaggcctctaccaccatgtcaggtatatccgtcttgacaatgttgctgtccctgtcatagtagagcaaagacagagggcgccgagacgtaggcacgcagcatgagcccctgcgggcagtgccagcatctgtgttggctttgagcagattcagcactgcagtgtgaaaggacgcagagatgccaggcatgcctgccacatgtagtgggcactgcccagtgcagaagttcatggcatagccttcgggctggatgatccagtcatgccagccaatctcacggaagtccacaaagaactcttgccgacagcacatcctggacagcccctggcagttgatacctcgccggcgtacccgatgcttgccttcaactcttacctgggctgccacaaaaggcctgtgggaaaccccatccaggatcaaggaactgtgggccagctgactttctggcaccagctccagagtgaggtgcccctgactgcaagcagcttgagcttcgggtcctaggagaagctggtaccagccactggcatccacctgcagcatgtactggcttgtcaaggtgaggttggtgtcatatggccttagcacaagaactcttatattcatggtctgggtggtgttgggagggagctgcatgaagaacatgaaacgggtctgcaggacctccacaccaccagtagttctatcagagaaatggaattcaagacgggtttggttgatgttggagaggcctgtgtcagcaaagctgatgatctcatattcttgtctctggtcatgctccaacagggtttccgctcgagtcccacggaggcgccgcagcgcggtcttgagggcctctctggacacaggccgactgagtatggggcgctggctgaggtgcagcttgtccaggatgcttttcttggccaaatcgagaaggagctcccgatggctctccaggtcaaaggtggcaccccaacatgctggacatggaccatcagttttgaggttcactactgtggctagagtcaggaacagaagagccaggagcaaggaggaggccattgctggaggatggtctccttaaaggacacaacgcctgtgttcagggtctcaacgggagtagcttcaactctgtcctggccaccagggaccctg

SEQ ID NO: 55 - DNA, 1909 bp, Macaca mulatta
  source 1..1909: mol_type = genomic DNA
tcacctttgtccccaggcttggcagctcacatggataacaactgtctcccaacattggcccagggacatgtctttccctaaacaaaccaacctctcctcacgtcccccactctgtactttcactgactatgcgttggcagattctgccaagttctacctgtaactggcttcattttcaagtcagatgtttggctgctgctctgtcccctgcaacaaggagccatgccagctggacacacacttcttccagggcctctggcagccaggacagagttgagaccacagctgttgagaccctgagccctgagtctgtgttgctcaagaagggcctcccccagcaatgacctcctcattgcttctggcctttttcctcctggctccaaccacagtggctactcccagagctggtggtcagtgtccagcatgtggagggcccaccttggaactggaaagccagcgggagctgcttcttcatctggccaagagaagcatcttggacaagctgcacctcagccagcgcccaacactgaaccgccctgtgtccagagctgctttgaggactgcactgcagcgcctccatggggtcccacagggggcacttccggaggacaacagggaacaggaatgtgaaatcatcagctttgccgagacaggcctctccaccatcaacaagactcgtcttgattttcacttctcctctgatagaactgctggtgacagggaggtccagcaggctagtctcatgttctttgtgcagctcccttccaataccacttggaccttgaaagtgagggtccttgtgctgggtccacataataccaacctcaccttggctactcagtacctgctagaggtggatgccagtggctggcatcaactcctcctggggcctgaagctcaagctgcctatagccaggggcacctgaccctggagctggtacctgaaggccaggtagcccagagctcagtcatcctgggtggagctgcccataggccttttgtggcagcccgggtgagagttgggggcaaacaccggattcatcgacgaggcatcgactgccaagaagggtccaggatgtgctgtcgacaagagttttttgtggacttccgtgagattggctggcacgactggatcatccagcctgagggctacgccatgaacttctgcatagggcagtgcccactacatgtagccggcatgcctggaattgcggcctcctttcacactgcagtgctcaatcttcttaaggccaacacagctgcaggcaccactggagggggctcatgctgtgtacccacagcccggcgccccctgtctctgctctactatgacagggacagcaacattgtcaagactgacatacctgacatggtagtagaggcctgcgggtgcagttagtctatgtgtagtatgggcagcccaagggggtgtgggaaaacactcccccacagaagtgcacttccttgagaggagggaatgacctcattctctgtccagaatgtggactccctcttcctgagcatcttatggaaattaccccacctttgacttgaagaaaccttcatctaaaaagagtcactgtaccatcttcctgaccactaccctctttcctagggcatggtccatcccgctagcctcacgtgcttaaccccgactccagggactcagacccatctccaacgatgagcaaggccatatggttcccaggcaaagacacccttatctcacctttaattgaccccataacccactatgccttcctgtcctttccactcgatggtccccactccaagatgagttgacacagcccctttccccgatttttgtggatctccagagagccccttctttggattcaccaaagtttagatcactgctgcccaaaatagaggcttacgtaccctcctc

SEQ ID NO: 56 - DNA, 1909 bp, Macaca mulatta
  source 1..1909: mol_type = genomic DNA
gaggagggtacgtaagcctctattttgggcagcagtgatctaaactttggtgaatccaaagaaggggctctctggagatccacaaaaatcggggaaaggggctgtgtcaactcatcttggagtggggaccatcgagtggaaaggacaggaaggcatagtgggttatggggtcaattaaaggtgagataagggtgtctttgcctgggaaccatatggccttgctcatcgttggagatgggtctgagtccctggagtcggggttaagcacgtgaggctagcgggatggaccatgccctaggaaagagggtagtggtcaggaagatggtacagtgactctttttagatgaaggtttcttcaagtcaaaggtggggtaatttccataagatgctcaggaagagggagtccacattctggacagagaatgaggtcattccctcctctcaaggaagtgcacttctgtgggggagtgttttcccacacccccttgggctgcccatactacacatagactaactgcacccgcaggcctctactaccatgtcaggtatgtcagtcttgacaatgttgctgtccctgtcatagtagagcagagacagggggcgccgggctgtgggtacacagcatgagccccctccagtggtgcctgcagctgtgttggccttaagaagattgagcactgcagtgtgaaaggaggccgcaattccaggcatgccggctacatgtagtgggcactgccctatgcagaagttcatggcgtagccctcaggctggatgatccagtcgtgccagccaatctcacggaagtccacaaaaaactcttgtcgacagcacatcctggacccttcttggcagtcgatgcctcgtcgatgaatccggtgtttgcccccaactctcacccgggctgccacaaaaggcctatgggcagctccacccaggatgactgagctctgggctacctggccttcaggtaccagctccagggtcaggtgcccctggctataggcagcttgagcttcaggccccaggaggagttgatgccagccactggcatccacctctagcaggtactgagtagccaaggtgaggttggtattatgtggacccagcacaaggaccctcactttcaaggtccaagtggtattggaagggagctgcacaaagaacatgagactagcctgctggacctccctgtcaccagcagttctatcagaggagaagtgaaaatcaagacgagtcttgttgatggtggagaggcctgtctcggcaaagctgatgatttcacattcctgttccctgttgtcctccggaagtgccccctgtgggaccccatggaggcgctgcagtgcagtcctcaaagcagctctggacacagggcggttcagtgttgggcgctggctgaggtgcagcttgtccaagatgcttctcttggccagatgaagaagcagctcccgctggctttccagttccaaggtgggccctccacatgctggacactgaccaccagctctgggagtagccactgtggttggagccaggaggaaaaaggccagaagcaatgaggaggtcattgctgggggaggcccttcttgagcaacacagactcagggctcagggtctcaacagctgtggtctcaactctgtcctggctgccagaggccctggaagaagtgtgtgtccagctggcatggctccttgttgcaggggacagagcagcagccaaacatctgacttgaaaatgaagccagttacaggtagaacttggcagaatctgccaacgcatagtcagtgaaagtacagagtgggggacgtgaggagaggttggtttgtttagggaaagacatgtccctgggccaatgttgggagacagttgttatccatgtgagctgccaagcctggggacaaaggtga

SEQ ID NO: 57 - RNA, 23 nt, synthetic construct
  source 1..23: mol_type = other RNA
  modified_base 7: mod_base = OTHER; note = thymine
agttattctgggacgactggtca

SEQ ID NO: 58 - RNA, 23 nt, synthetic construct
  source 1..23: mol_type = other RNA
  modified_base 7: mod_base = OTHER; note = thymine
agttattctgggacgactggtct

SEQ ID NO: 59 - RNA, 23 nt, synthetic construct
  source 1..23: mol_type = other RNA
  modified_base 2: mod_base = OTHER; note = thymine
atggaggatgagttattctggga

SEQ ID NO: 60 - RNA, 23 nt, synthetic construct
  source 1..23: mol_type = other RNA
  modified_base 7: mod_base = OTHER; note = thymine
atgaagtggagtctgtgacagta

SEQ ID NO: 61 - RNA, 23 nt, synthetic construct
  source 1..23: mol_type = other RNA
actgaagtggagtctgtgacagt

SEQ ID NO: 62 - RNA, 23 nt, synthetic construct
  source 1..23: mol_type = other RNA
  modified_base 12: mod_base = OTHER; note = thymine
acggaagatcctcaagcaaagag

SEQ ID NO: 63 - RNA, 23 nt, synthetic construct
  source 1..23: mol_type = other RNA
acagacaagaaagtgcccatttg

SEQ ID NO: 64 - RNA, 23 nt, synthetic construct
  source 1..23: mol_type = other RNA
aagaaagtataaatgcttgtctc

SEQ ID NO: 65 - RNA, 23 nt, synthetic construct
  source 1..23: mol_type = other RNA
aaagaaagtataaatgcttgtct

SEQ ID NO: 66 - RNA, 21 nt, synthetic construct
  source 1..21: mol_type = other RNA
accagtcgtcccagaataact

SEQ ID NO: 67 - RNA, 21 nt, synthetic construct
  source 1..21: mol_type = other RNA
ccagaataactcatcctccat

SEQ ID NO: 68 - RNA, 21 nt, synthetic construct
  source 1..21: mol_type = other RNA
ctgtcacagactccacttcat

SEQ ID NO: 69 - RNA, 21 nt, synthetic construct
  source 1..21: mol_type = other RNA
tgtcacagactccacttcagt

SEQ ID NO: 70 - RNA, 21 nt, synthetic construct
  source 1..21: mol_type = other RNA
ctttgcttgaggatcttccgt

SEQ ID NO: 71 - RNA, 21 nt, synthetic construct
  source 1..21: mol_type = other RNA
aatgggcactttcttgtctgt

SEQ ID NO: 72 - RNA, 21 nt, synthetic construct
  source 1..21: mol_type = other RNA
gacaagcatttatactttctt

SEQ ID NO: 73 - RNA, 21 nt, synthetic construct
  source 1..21: mol_type = other RNA
acaagcatttatactttcttt

SEQ ID NO: 74 - RNA, 21 nt, synthetic construct
  source 1..21: mol_type = other RNA
  modified_base 1: mod_base = OTHER; note = 2'-O-methyladenosine-3'-phosphorothioate
  modified_base 2: mod_base = OTHER; note = 2'-O-methylcytidine-3'-phosphorothioate
  modified_base 3: mod_base = OTHER; note = 2'-O-methylcytidine-3'-phosphate
  modified_base 4: mod_base = OTHER; note = 2'-O-methyladenosine-3'-phosphate
  modified_base 5: mod_base = OTHER; note = 2'-O-methylguanosine-3'-phosphate
  modified_base 6: mod_base = OTHER; note = 2'-O-methyluridine-3'-phosphate
  modified_base 7: mod_base = OTHER; note = 2'-O-methylcytidine-3'-phosphate
  modified_base 8: mod_base = OTHER; note = 2'-O-methylguanosine-3'-phosphate
  modified_base 9: mod_base = OTHER; note = 2'-fluorouridine-3'-phosphate
  modified_base 10: mod_base = OTHER; note = 2'-fluorocytidine-3'-phosphate
  modified_base 11: mod_base = OTHER; note = 2'-fluorocytidine-3'-phosphate
  modified_base 12: mod_base = OTHER; note = 2'-O-methylcytidine-3'-phosphate
  modified_base 13: mod_base = OTHER; note = 2'-O-methyladenosine-3'-phosphate
  modified_base 14: mod_base = OTHER; note = 2'-O-methylguanosine-3'-phosphate
  modified_base 15: mod_base = OTHER; note = 2'-O-methyladenosine-3'-phosphate
  modified_base 16: mod_base = OTHER; note = 2'-O-methyladenosine-3'-phosphate
  modified_base 17: mod_base = OTHER; note = 2'-O-methyluridine-3'-phosphate
  modified_base 18: mod_base = OTHER; note = 2'-O-methyladenosine-3'-phosphate
  modified_base 19: mod_base = OTHER; note = 2'-O-methyladenosine-3'-phosphate
  modified_base 20: mod_base = OTHER; note = 2'-O-methylcytidine-3'-phosphate
  modified_base 21: mod_base = OTHER; note = 2'-O-methyluridine-3'-phosphate
accagtcgtcccagaataact

SEQ ID NO: 75 - DNA, 23 bp, synthetic construct
  source 1..23: mol_type = other DNA
  modified_base 1: mod_base = OTHER; note = 2'-O-methyladenosine-3'-phosphorothioate
  modified_base 2: mod_base = OTHER; note = 2'-deoxyguanosine-3'-phosphorothioate
  modified_base 3: mod_base = OTHER; note = 2'-O-methyluridine-3'-phosphate
  modified_base 4: mod_base = OTHER; note = 2'-O-methyluridine-3'-phosphate
  modified_base 6: mod_base = OTHER; note = 2'-O-methyluridine-3'-phosphate
  modified_base 8: mod_base = OTHER; note = 2'-O-methylcytidine-3'-phosphate
  modified_base 9: mod_base = OTHER; note = 2'-O-methyluridine-3'-phosphate
  modified_base 10: mod_base = OTHER; note = 2'-O-methylguanosine-3'-phosphate
  modified_base 11: mod_base = OTHER; note = 2'-O-methylguanosine-3'-phosphate
  modified_base 13: mod_base = OTHER; note = 2'-O-methyladenosine-3'-phosphate
  modified_base 14: mod_base = OTHER; note = 2'-fluorocytidine-3'-phosphate
  modified_base 15: mod_base = OTHER; note = 2'-O-methylguanosine-3'-phosphate
  modified_base 16: mod_base = OTHER; note = 2'-O-methyladenosine-3'-phosphate
  modified_base 17: mod_base = OTHER; note = 2'-O-methylcytidine-3'-phosphate
  modified_base 18: mod_base = OTHER; note = 2'-O-methyluridine-3'-phosphate
  modified_base 19: mod_base = OTHER; note = 2'-O-methylguanosine-3'-phosphate
  modified_base 20: mod_base = OTHER; note = 2'-O-methylguanosine-3'-phosphate
  modified_base 21: mod_base = OTHER; note = 2'-O-methyluridine-3'-phosphorothioate
  modified_base 22: mod_base = OTHER; note = 2'-O-methylcytidine-3'-phosphorothioate
  modified_base 23: mod_base = OTHER; note = 2'-O-methyladenosine-3'-phosphate
  misc_feature 1: note = RNA
  misc_feature 2: note = DNA
  misc_feature 3..4: note = RNA
  misc_feature 5: note = DNA
  misc_feature 6: note = RNA
  misc_feature 7: note = DNA
  misc_feature 8..11: note = RNA
  misc_feature 12: note = DNA
  misc_feature 13..23: note = RNA
agttattctgggacgactggtca

SEQ ID NO: 76 - DNA, 23 bp, synthetic construct
  source 1..23: mol_type = other DNA
  modified_base 1: mod_base = OTHER; note = 2'-O-methyladenosine-3'-phosphorothioate
  modified_base 2: mod_base = OTHER; note = 2'-deoxyguanosine-3'-phosphorothioate
  modified_base 3: mod_base = OTHER; note = 2'-O-methyluridine-3'-phosphate
  modified_base 4: mod_base = OTHER; note = 2'-O-methyluridine-3'-phosphate
  modified_base 6: mod_base = OTHER; note = 2'-O-methyluridine-3'-phosphate
  modified_base 8: mod_base = OTHER; note = 2'-O-methylcytidine-3'-phosphate
  modified_base 9: mod_base = OTHER; note = 2'-O-methyluridine-3'-phosphate
  modified_base 10: mod_base = OTHER; note = 2'-O-methylguanosine-3'-phosphate
  modified_base 11: mod_base = OTHER; note = 2'-O-methylguanosine-3'-phosphate
  modified_base 13: mod_base = OTHER; note = 2'-O-methyladenosine-3'-phosphate
  modified_base 14: mod_base = OTHER; note = 2'-fluorocytidine-3'-phosphate
  modified_base 15: mod_base = OTHER; note = 2'-O-methylguanosine-3'-phosphate
  modified_base 16: mod_base = OTHER; note = 2'-O-methyladenosine-3'-phosphate
  modified_base 17: mod_base = OTHER; note = 2'-O-methylcytidine-3'-phosphate
  modified_base 18: mod_base = OTHER; note = 2'-O-methyluridine-3'-phosphate
  modified_base 19: mod_base = OTHER; note = 2'-O-methylguanosine-3'-phosphate
  modified_base 20: mod_base = OTHER; note = 2'-O-methylguanosine-3'-phosphate
  modified_base 21: mod_base = OTHER; note = 2'-O-methyluridine-3'-phosphorothioate
  modified_base 22: mod_base = OTHER; note = 2'-O-methylcytidine-3'-phosphorothioate
  modified_base 23: mod_base = OTHER; note = 2'-O-methyluridine-3'-phosphate
  misc_feature 1: note = RNA
  misc_feature 2: note = DNA
  misc_feature 3..4: note = RNA
  misc_feature 5: note = DNA
  misc_feature 6: note = RNA
  misc_feature 7: note = DNA
  misc_feature 8..11: note = RNA
  misc_feature 12: note = DNA
  misc_feature 13..23: note = RNA
agttattctgggacgactggtct

SEQ ID NO: 77 - RNA, 21 nt, synthetic construct
  source 1..21: mol_type = other RNA
  modified_base 1: mod_base = OTHER; note = 2'-O-methylcytidine-3'-phosphorothioate
  modified_base 2: mod_base = OTHER; note = 2'-O-methylcytidine-3'-phosphorothioate
  modified_base 3: mod_base = OTHER; note = 2'-O-methyladenosine-3'-phosphate
  modified_base 4: mod_base = OTHER; note = 2'-O-methylguanosine-3'-phosphate
  modified_base 5: mod_base = OTHER; note = 2'-O-methyladenosine-3'-phosphate
  modified_base 6: mod_base = OTHER; note = 2'-O-methyladenosine-3'-phosphate
  modified_base 7: mod_base = OTHER; note = 2'-O-methyluridine-3'-phosphate
  modified_base 8: mod_base = OTHER; note = 2'-O-methyladenosine-3'-phosphate
  modified_base 9: mod_base = OTHER; note = 2'-fluoroadenosine-3'-phosphate
  modified_base 10: mod_base = OTHER; note = 2'-fluorocytidine-3'-phosphate
  modified_base 11: mod_base = OTHER; note = 2'-fluorouridine-3'-phosphate
  modified_base 12: mod_base = OTHER; note = 2'-O-methylcytidine-3'-phosphate
  modified_base 13: mod_base = OTHER; note = 2'-O-methyladenosine-3'-phosphate
  modified_base 14: mod_base = OTHER; note = 2'-O-methyluridine-3'-phosphate
  modified_base 15: mod_base = OTHER; note = 2'-O-methylcytidine-3'-phosphate
  modified_base 16: mod_base = OTHER; note = 2'-O-methylcytidine-3'-phosphate
  modified_base 17: mod_base = OTHER; note = 2'-O-methyluridine-3'-phosphate
  modified_base 18: mod_base = OTHER; note = 2'-O-methylcytidine-3'-phosphate
  modified_base 19: mod_base = OTHER; note = 2'-O-methylcytidine-3'-phosphate
  modified_base 20: mod_base = OTHER; note = 2'-O-methyladenosine-3'-phosphate
  modified_base 21: mod_base = OTHER; note = 2'-O-methyluridine-3'-phosphate
ccagaataactcatcctccat

SEQ ID NO: 78 - DNA, 23 bp, synthetic construct
  source 1..23: mol_type = other DNA
  modified_base 1: mod_base = OTHER; note = 2'-O-methyladenosine-3'-phosphorothioate
  modified_base 2: mod_base = OTHER; note = 2'-deoxythimidine-3'-phosphorothioate
  modified_base 3: mod_base = OTHER; note = 2'-O-methylguanosine-3'-phosphate
  modified_base 4: mod_base = OTHER; note = 2'-O-methylguanosine-3'-phosphate
  modified_base 6: mod_base = OTHER; note = 2'-O-methylguanosine-3'-phosphate
  modified_base 8: mod_base = OTHER; note = 2'-O-methyladenosine-3'-phosphate
  modified_base 9: mod_base = OTHER; note = 2'-O-methyluridine-3'-phosphate
  modified_base 10: mod_base = OTHER; note = 2'-O-methylguanosine-3'-phosphate
  modified_base 11: mod_base = OTHER; note = 2'-O-methyladenosine-3'-phosphate
  modified_base 13: mod_base = OTHER; note = 2'-O-methyluridine-3'-phosphate
  modified_base 14: mod_base = OTHER; note = 2'-fluorouridine-3'-phosphate
  modified_base 15: mod_base = OTHER; note = 2'-O-methyladenosine-3'-phosphate
  modified_base 16: mod_base = OTHER; note = 2'-O-methyluridine-3'-phosphate
  modified_base 17: mod_base = OTHER; note = 2'-O-methyluridine-3'-phosphate
  modified_base 18: mod_base = OTHER; note = 2'-O-methylcytidine-3'-phosphate
  modified_base 19: mod_base = OTHER; note = 2'-O-methyluridine-3'-phosphate
  modified_base 20: mod_base = OTHER; note = 2'-O-methylguanosine-3'-phosphate
  modified_base 21: mod_base = OTHER; note = 2'-O-methylguanosine-3'-phosphorothioate
  modified_base 22: mod_base = OTHER; note = 2'-O-methylguanosine-3'-phosphorothioate
  modified_base 23: mod_base = OTHER; note = 2'-O-methyladenosine-3'-phosphate
  misc_feature 1: note = RNA
  misc_feature 2: note = DNA
  misc_feature 3..4: note = RNA
  misc_feature 5: note = DNA
  misc_feature 6: note = RNA
  misc_feature 7: note = DNA
  misc_feature 8..11: note = RNA
  misc_feature 12: note = DNA
  misc_feature 13..23: note = RNA
atggaggatgagttattctggga

SEQ ID NO: 79 - RNA, 21 nt, synthetic construct
  source 1..21: mol_type = other RNA
  modified_base 1: mod_base = OTHER; note = 2'-O-methylcytidine-3'-phosphorothioate
  modified_base 2: mod_base = OTHER; note = 2'-O-methyluridine-3'-phosphorothioate
  modified_base 3: mod_base = OTHER; note = 2'-O-methylguanosine-3'-phosphate
  modified_base 4: mod_base = OTHER; note = 2'-O-methyluridine-3'-phosphate
  modified_base 5: mod_base = OTHER; note = 2'-O-methylcytidine-3'-phosphate
  modified_base 6: mod_base = OTHER; note = 2'-O-methyladenosine-3'-phosphate
  modified_base 7: mod_base = OTHER; note = 2'-fluorocytidine-3'-phosphate
  modified_base 8: mod_base = OTHER; note = 2'-O-methyladenosine-3'-phosphate
  modified_base 9: mod_base = OTHER; note = 2'-fluoroguanosine-3'-phosphate
  modified_base 10: mod_base = OTHER; note = 2'-fluoroadenosine-3'-phosphate
  modified_base 11: mod_base = OTHER; note = 2'-fluorocytidine-3'-phosphate
  modified_base 12: mod_base = OTHER; note = 2'-O-methyluridine-3'-phosphate
  modified_base 13: mod_base = OTHER; note = 2'-O-methylcytidine-3'-phosphate
  modified_base 14: mod_base = OTHER; note = 2'-O-methylcytidine-3'-phosphate
  modified_base 15: mod_base = OTHER; note = 2'-O-methyladenosine-3'-phosphate
  modified_base 16: mod_base = OTHER; note = 2'-O-methylcytidine-3'-phosphate
  modified_base 17: mod_base = OTHER; note = 2'-O-methyluridine-3'-phosphate
  modified_base 18: mod_base = OTHER; note = 2'-O-methyluridine-3'-phosphate
  modified_base 19: mod_base = OTHER; note = 2'-O-methylcytidine-3'-phosphate
  modified_base 20: mod_base = OTHER; note = 2'-O-methyladenosine-3'-phosphate
  modified_base 21: mod_base = OTHER; note = 2'-O-methyluridine-3'-phosphate
ctgtcacagactccacttcat

SEQ ID NO: 80 - DNA, 23 bp, synthetic construct
  source 1..23: mol_type = other DNA
  modified_base 1: mod_base = OTHER; note = 2'-O-methyladenosine-3'-phosphorothioate
  modified_base 2: mod_base = OTHER; note = 2'-fluorouridine -3'-phosphorothioate
  modified_base 3: mod_base = OTHER; note = 2'-O-methylguanosine-3'-phosphate
  modified_base 4: mod_base = OTHER; note = 2'-O-methyladenosine-3'-phosphate
  modified_base 6: mod_base = OTHER; note = 2'-O-methylguanosine-3'-phosphate
  modified_base 7: mod_base = OTHER; note = Thymidine-glycol nucleic acid (GNA) S-Isomer
  modified_base 8: mod_base = OTHER; note = 2'-O-methylguanosine-3'-phosphate
  modified_base 9: mod_base = OTHER; note = 2'-O-methylguanosine-3'-phosphate
  modified_base 10: mod_base = OTHER; note = 2'-O-methyladenosine-3'-phosphate
  modified_base 11: mod_base = OTHER; note = 2'-O-methylguanosine-3'-phosphate
  modified_base 12: mod_base = OTHER; note = 2'-O-methyluridine-3'-phosphate
  modified_base 13: mod_base = OTHER; note = 2'-O-methylcytidine-3'-phosphate
  modified_base 14: mod_base = OTHER; note = 2'-fluorouridine-3'-phosphate
  modified_base 15: mod_base = OTHER; note = 2'-O-methylguanosine-3'-phosphate
  modified_base 16: mod_base = OTHER; note = 2'-fluorouridine-3'-phosphate
  modified_base 17: mod_base = OTHER; note = 2'-O-methylguanosine-3'-phosphate
  modified_base 18: mod_base = OTHER; note = 2'-O-methyladenosine-3'-phosphate
  modified_base 19: mod_base = OTHER; note = 2'-O-methylcytidine-3'-phosphate
  modified_base 20: mod_base = OTHER; note = 2'-O-methyladenosine-3'-phosphate
  modified_base 21: mod_base = OTHER; note = 2'-O-methylguanosine-3'-phosphorothioate
  modified_base 22: mod_base = OTHER; note = 2'-O-methyluridine-3'-phosphorothioate
  modified_base 23: mod_base = OTHER; note = 2'-O-methyladenosine-3'-phosphate
  misc_feature 1..4: note = RNA
  misc_feature 5: note = DNA
  misc_feature 6: note = RNA
  misc_feature 7: note = DNA
  misc_feature 8..23: note = RNA
atgaagtggagtctgtgacagta

SEQ ID NO: 81 - RNA, 21 nt, synthetic construct
  source 1..21: mol_type = other RNA
  modified_base 1: mod_base = OTHER; note = 2'-O-methyluridine-3'-phosphorothioate
  modified_base 2: mod_base = OTHER; note = 2'-O-methylguanosine-3'-phosphorothioate
  modified_base 3: mod_base = OTHER; note = 2'-O-methyluridine-3'-phosphate
  modified_base 4: mod_base = OTHER; note = 2'-O-methylcytidine-3'-phosphate
  modified_base 5: mod_base = OTHER; note = 2'-O-methyladenosine-3'-phosphate
  modified_base 6: mod_base = OTHER; note = 2'-O-methylcytidine-3'-phosphate
  modified_base 7: mod_base = OTHER; note = 2'-O-methyladenosine-3'-phosphate
  modified_base 8: mod_base = OTHER; note = 2'-O-methylguanosine-3'-phosphate
  modified_base 9: mod_base = OTHER; note = 2'-fluoroadenosine-3'-phosphate
  modified_base 10: mod_base = OTHER; note = 2'-fluorocytidine-3'-phosphate
  modified_base 11: mod_base = OTHER; note = 2'-fluorouridine-3'-phosphate
  modified_base 12: mod_base = OTHER; note = 2'-O-methylcytidine-3'-phosphate
  modified_base 13: mod_base = OTHER; note = 2'-O-methylcytidine-3'-phosphate
  modified_base 14: mod_base = OTHER; note = 2'-O-methyladenosine-3'-phosphate
  modified_base 15: mod_base = OTHER; note = 2'-O-methylcytidine-3'-phosphate
  modified_base 16: mod_base = OTHER; note = 2'-O-methyluridine-3'-phosphate
  modified_base 17: mod_base = OTHER; note = 2'-O-methyluridine-3'-phosphate
  modified_base 18: mod_base = OTHER; note = 2'-O-methylcytidine-3'-phosphate
  modified_base 19: mod_base = OTHER; note = 2'-O-methyladenosine-3'-phosphate
  modified_base 20: mod_base = OTHER; note = 2'-O-methylguanosine-3'-phosphate
  modified_base 21: mod_base = OTHER; note = 2'-O-methyluridine-3'-phosphate
tgtcacagactccacttcagt

SEQ ID NO: 82 - DNA, 23 bp, synthetic construct
  source 1..23: mol_type = other DNA
  modified_base 1: mod_base = OTHER; note = 2'-O-methyladenosine-3'-phosphorothioate
  modified_base 2: mod_base = OTHER; note = 2'-deoxycytidine-3'-phosphorothioate
  modified_base 3: mod_base = OTHER; note = 2'-O-methyluridine-3'-phosphate
  modified_base 4: mod_base = OTHER; note = 2'-O-methylguanosine-3'-phosphate
  modified_base 6: mod_base = OTHER; note = 2'-O-methyladenosine-3'-phosphate
  modified_base 8: mod_base = OTHER; note = 2'-O-methyluridine-3'-phosphate
  modified_base 9: mod_base = OTHER; note = 2'-O-methylguanosine-3'-phosphate
  modified_base 10: mod_base = OTHER; note = 2'-O-methylguanosine-3'-phosphate
  modified_base 11: mod_base = OTHER; note = 2'-O-methyladenosine-3'-phosphate
  modified_base 13: mod_base = OTHER; note = 2'-O-methyluridine-3'-phosphate
  modified_base 14: mod_base = OTHER; note = 2'-fluorocytidine-3'-phosphate
  modified_base 15: mod_base = OTHER; note = 2'-O-methyluridine-3'-phosphate
  modified_base 16: mod_base = OTHER; note = 2'-O-methylguanosine-3'-phosphate
  modified_base 17: mod_base = OTHER; note = 2'-O-methyluridine-3'-phosphate
  modified_base 18: mod_base = OTHER; note = 2'-O-methylguanosine-3'-phosphate
  modified_base 19: mod_base = OTHER; note = 2'-O-methyladenosine-3'-phosphate
  modified_base 20: mod_base = OTHER; note = 2'-O-methylcytidine-3'-phosphate
  modified_base 21: mod_base = OTHER; note = 2'-O-methyladenosine-3'-phosphorothioate
  modified_base 22: mod_base = OTHER; note = 2'-O-methylguanosine-3'-phosphorothioate
  modified_base 23: mod_base = OTHER; note = 2'-O-methyluridine-3'-phosphate
  misc_feature 1: note = RNA
  misc_feature 2: note = DNA
  misc_feature 3..4: note = RNA
  misc_feature 5: note = DNA
  misc_feature 6: note = RNA
  misc_feature 7: note = DNA
  misc_feature 8..11: note = RNA
  misc_feature 12: note = DNA
  misc_feature 13..23: note = RNA
actgaagtggagtctgtgacagt

SEQ ID NO: 83 - RNA, 21 nt, synthetic construct
  source 1..21: mol_type = other RNA
  modified_base 1: mod_base = OTHER; note = 2'-O-methylcytidine-3'-phosphorothioate
  modified_base 2: mod_base = OTHER; note = 2'-O-methyluridine-3'-phosphorothioate
  modified_base 3: mod_base = OTHER; note = 2'-O-methyluridine-3'-phosphate
  modified_base 4: mod_base = OTHER; note = 2'-O-methyluridine-3'-phosphate
  modified_base 5: mod_base = OTHER; note = 2'-O-methylguanosine-3'-phosphate
  modified_base 6: mod_base = OTHER; note = 2'-O-methylcytidine-3'-phosphate
  modified_base 7: mod_base = OTHER; note = 2'-O-methyluridine-3'-phosphate
  modified_base 8: mod_base = OTHER; note = 2'-O-methyluridine-3'-phosphate
  modified_base 9: mod_base = OTHER; note = 2'-fluoroguanosine-3'-phosphate
  modified_base 10: mod_base = OTHER; note = 2'-fluoroadenosine-3'-phosphate
  modified_base 11: mod_base = OTHER; note = 2'-fluoroguanosine-3'-phosphate
  modified_base 12: mod_base = OTHER; note = 2'-O-methylguanosine-3'-phosphate
  modified_base 13: mod_base = OTHER; note = 2'-O-methyladenosine-3'-phosphate
  modified_base 14: mod_base = OTHER; note = 2'-O-methyluridine-3'-phosphate
  modified_base 15: mod_base = OTHER; note = 2'-O-methylcytidine-3'-phosphate
  modified_base 16: mod_base = OTHER; note = 2'-O-methyluridine-3'-phosphate
  modified_base 17: mod_base = OTHER; note = 2'-O-methyluridine-3'-phosphate
  modified_base 18: mod_base = OTHER; note = 2'-O-methylcytidine-3'-phosphate
  modified_base 19: mod_base = OTHER; note = 2'-O-methylcytidine-3'-phosphate
  modified_base 20: mod_base = OTHER; note = 2'-O-methylguanosine-3'-phosphate
  modified_base 21: mod_base = OTHER; note = 2'-O-methyluridine-3'-phosphate
ctttgcttgaggatcttccgt

SEQ ID NO: 84 - DNA, 23 bp, synthetic construct
  source 1..23: mol_type = other DNA
  modified_base 1: mod_base = OTHER; note = 2'-O-methyladenosine-3'-phosphorothioate
  modified_base 2: mod_base = OTHER; note = 2'-deoxycytidine-3'-phosphorothioate
  modified_base 3: mod_base = OTHER; note = 2'-O-methylguanosine-3'-phosphate
  modified_base 4: mod_base = OTHER; note = 2'-O-methylguanosine-3'-phosphate
  modified_base 6: mod_base = OTHER; note = 2'-O-methyladenosine-3'-phosphate
  modified_base 8: mod_base = OTHER; note = 2'-O-methyladenosine-3'-phosphate
  modified_base 9: mod_base = OTHER; note = 2'-O-methyluridine-3'-phosphate
  modified_base 10: mod_base = OTHER; note = 2'-O-methylcytidine-3'-phosphate
  modified_base 11: mod_base = OTHER; note = 2'-O-methylcytidine-3'-phosphate
  modified_base 13: mod_base = OTHER; note = 2'-O-methylcytidine-3'-phosphate
  modified_base 14: mod_base = OTHER; note = 2'-fluoroadenosine-3'-phosphate
  modified_base 15: mod_base = OTHER; note = 2'-O-methyladenosine-3'-phosphate
  modified_base 16: mod_base = OTHER; note = 2'-O-methylguanosine-3'-phosphate
  modified_base 17: mod_base = OTHER; note = 2'-O-methylcytidine-3'-phosphate
  modified_base 18: mod_base = OTHER; note = 2'-O-methyladenosine-3'-phosphate
  modified_base 19: mod_base = OTHER; note = 2'-O-methyladenosine-3'-phosphate
  modified_base 20: mod_base = OTHER; note = 2'-O-methyladenosine-3'-phosphate
  modified_base 21: mod_base = OTHER; note = 2'-O-methylguanosine-3'-phosphorothioate
  modified_base 22: mod_base = OTHER; note = 2'-O-methyladenosine-3'-phosphorothioate
  modified_base 23: mod_base = OTHER; note = 2'-O-methylguanosine-3'-phosphate
  misc_feature 1: note = RNA
  misc_feature 2: note = DNA
  misc_feature 3..4: note = RNA
  misc_feature 5: note = DNA
  misc_feature 6: note = RNA
  misc_feature 7: note = DNA
  misc_feature 8..11: note = RNA
  misc_feature 12: note = DNA
  misc_feature 13..23: note = RNA
acggaagatcctcaagcaaagag

SEQ ID NO: 85 - RNA, 21 nt, synthetic construct
  source 1..21: mol_type = other RNA
  modified_base 1: mod_base = OTHER; note = 2'-O-methyladenosine-3'-phosphorothioate
  modified_base 2: mod_base = OTHER; note = 2'-O-methyladenosine-3'-phosphorothioate
  modified_base 3: mod_base = OTHER; note = 2'-O-methyluridine-3'-phosphate
  modified_base 4: mod_base = OTHER; note = 2'-O-methylguanosine-3'-phosphate
  modified_base 5: mod_base = OTHER; note = 2'-O-methylguanosine-3'-phosphate
  modified_base 6: mod_base = OTHER; note = 2'-O-methylguanosine-3'-phosphate
  modified_base 7: mod_base = OTHER; note = 2'-O-methylcytidine-3'-phosphate
  modified_base 8: mod_base = OTHER; note = 2'-O-methyladenosine-3'-phosphate
  modified_base 9: mod_base = OTHER; note = 2'-fluorocytidine-3'-phosphate
  modified_base 10: mod_base = OTHER; note = 2'-fluorouridine-3'-phosphate
  modified_base 11: mod_base = OTHER; note = 2'-fluorouridine-3'-phosphate
  modified_base 12: mod_base = OTHER; note = 2'-O-methyluridine-3'-phosphate
  modified_base 13: mod_base = OTHER; note = 2'-O-methylcytidine-3'-phosphate
  modified_base 14: mod_base = OTHER; note = 2'-O-methyluridine-3'-phosphate
  modified_base 15: mod_base = OTHER; note = 2'-O-methyluridine-3'-phosphate
  modified_base 16: mod_base = OTHER; note = 2'-O-methylguanosine-3'-phosphate
  modified_base 17: mod_base = OTHER; note = 2'-O-methyluridine-3'-phosphate
  modified_base 18: mod_base = OTHER; note = 2'-O-methylcytidine-3'-phosphate
  modified_base 19: mod_base = OTHER; note = 2'-O-methyluridine-3'-phosphate
  modified_base 20: mod_base = OTHER; note = 2'-O-methylguanosine-3'-phosphate
  modified_base 21: mod_base = OTHER; note = 2'-O-methyluridine-3'-phosphate
aatgggcactttcttgtctgt

SEQ ID NO: 86 - DNA, 23 bp, synthetic construct
  source 1..23: mol_type = other DNA
  modified_base 1: mod_base = OTHER; note = 2'-O-methyladenosine-3'-phosphorothioate
  modified_base 2: mod_base = OTHER; note = 2'-deoxycytidine-3'-phosphorothioate
  modified_base 3: mod_base = OTHER; note = 2'-O-methyladenosine-3'-phosphate
  modified_base 4: mod_base = OTHER; note = 2'-O-methylguanosine-3'-phosphate
  modified_base 6: mod_base = OTHER; note = 2'-O-methylcytidine-3'-phosphate
  modified_base 8: mod_base = OTHER; note = 2'-O-methyladenosine-3'-phosphate
  modified_base 9: mod_base = OTHER; note = 2'-O-methylguanosine-3'-phosphate
  modified_base 10: mod_base = OTHER; note = 2'-O-methyladenosine-3'-phosphate
  modified_base 11: mod_base = OTHER; note = 2'-O-methyladenosine-3'-phosphate
  modified_base 13: mod_base = OTHER; note = 2'-O-methylguanosine-3'-phosphate
  modified_base 14: mod_base = OTHER; note = 2'-fluorouridine-3'-phosphate
  modified_base 15: mod_base = OTHER; note = 2'-O-methylguanosine-3'-phosphate
  modified_base 16: mod_base = OTHER; note = 2'-O-methylcytidine-3'-phosphate
  modified_base 17: mod_base = OTHER; note = 2'-O-methylcytidine-3'-phosphate
  modified_base 18: mod_base = OTHER; note = 2'-O-methylcytidine-3'-phosphate
  modified_base 19: mod_base = OTHER; note = 2'-O-methyladenosine-3'-phosphate
  modified_base 20: mod_base = OTHER; note = 2'-O-methyluridine-3'-phosphate
  modified_base 21: mod_base = OTHER; note = 2'-O-methyluridine-3'-phosphorothioate
  modified_base 22: mod_base = OTHER; note = 2'-O-methyluridine-3'-phosphorothioate
  modified_base 23: mod_base = OTHER; note = 2'-O-methylguanosine-3'-phosphate
  misc_feature 1: note = RNA
  misc_feature 2: note = DNA
  misc_feature 3..4: note = RNA
  misc_feature 5: note = DNA
  misc_feature 6: note = RNA
  misc_feature 7: note = DNA
  misc_feature 8..11: note = RNA
  misc_feature 12: note = DNA
  misc_feature 13..23: note = RNA
acagacaagaaagtgcccatttg

SEQ ID NO: 87 - RNA, 21 nt, synthetic construct
  source 1..21: mol_type = other RNA
  modified_base 1: mod_base = OTHER; note = 2'-O-methylguanosine-3'-phosphorothioate
  modified_base 2: mod_base = OTHER; note = 2'-O-methyladenosine-3'-phosphorothioate
  modified_base 3: mod_base = OTHER; note = 2'-O-methylcytidine-3'-phosphate
  modified_base 4: mod_base = OTHER; note = 2'-O-methyladenosine-3'-phosphate
  modified_base 5: mod_base = OTHER; note = 2'-O-methyladenosine-3'-phosphate
  modified_base 6: mod_base = OTHER; note = 2'-O-methylguanosine-3'-phosphate
  modified_base 7: mod_base = OTHER; note = 2'-O-methylcytidine-3'-phosphate
  modified_base 8: mod_base = OTHER; note = 2'-O-methyladenosine-3'-phosphate
  modified_base 9: mod_base = OTHER; note = 2'-fluorouridine-3'-phosphate
  modified_base 10: mod_base = OTHER; note = 2'-fluorouridine-3'-phosphate
  modified_base 11: mod_base = OTHER; note = 2'-fluorouridine-3'-phosphate
  modified_base 12: mod_base = OTHER; note = 2'-O-methyladenosine-3'-phosphate
  modified_base 13: mod_base = OTHER; note = 2'-O-methyluridine-3'-phosphate
  modified_base 14: mod_base = OTHER; note = 2'-O-methyladenosine-3'-phosphate
  modified_base 15: mod_base = OTHER; note = 2'-O-methylcytidine-3'-phosphate
  modified_base 16: mod_base = OTHER; note = 2'-O-methyluridine-3'-phosphate
  modified_base 17: mod_base = OTHER; note = 2'-O-methyluridine-3'-phosphate
  modified_base 18: mod_base = OTHER; note = 2'-O-methyluridine-3'-phosphate
  modified_base 19: mod_base = OTHER; note = 2'-O-methylcytidine-3'-phosphate
  modified_base 20: mod_base = OTHER; note = 2'-O-methyluridine-3'-phosphate
  modified_base 21: mod_base = OTHER; note = 2'-O-methyluridine-3'-phosphate
gacaagcatttatactttctt

SEQ ID NO: 88 - DNA, 23 bp, synthetic construct
  source 1..23: mol_type = other DNA
  modified_base 1: mod_base = OTHER; note = 2'-O-methyladenosine-3'-phosphorothioate
  modified_base 2: mod_base = OTHER; note = 2'-deoxyadenosine-3'-phosphorothioate
  modified_base 3: mod_base = OTHER; note = 2'-O-methylguanosine-3'-phosphate
  modified_base 4: mod_base = OTHER; note = 2'-O-methyladenosine-3'-phosphate
  modified_base 6: mod_base = OTHER; note = 2'-O-methyladenosine-3'-phosphate
  modified_base 8: mod_base = OTHER; note = 2'-O-methyluridine-3'-phosphate
  modified_base 9: mod_base = OTHER; note = 2'-O-methyladenosine-3'-phosphate
  modified_base 10: mod_base = OTHER; note = 2'-O-methyluridine-3'-phosphate
  modified_base 11: mod_base = OTHER; note = 2'-O-methyladenosine-3'-phosphate
  modified_base 13: mod_base = OTHER; note = 2'-O-methyladenosine-3'-phosphate
  modified_base 14: mod_base = OTHER; note = 2'-fluorouridine-3'-phosphate
  modified_base 15: mod_base = OTHER; note = 2'-O-methylguanosine-3'-phosphate
  modified_base 16: mod_base = OTHER; note = 2'-O-methylcytidine-3'-phosphate
  modified_base 17: mod_base = OTHER; note = 2'-O-methyluridine-3'-phosphate
  modified_base 18: mod_base = OTHER; note = 2'-O-methyluridine-3'-phosphate
  modified_base 19: mod_base = OTHER; note = 2'-O-methylguanosine-3'-phosphate
  modified_base 20: mod_base = OTHER; note = 2'-O-methyluridine-3'-phosphate
  modified_base 21: mod_base = OTHER; note = 2'-O-methylcytidine-3'-phosphorothioate
  modified_base 22: mod_base = OTHER; note = 2'-O-methyluridine-3'-phosphorothioate
  modified_base 23: mod_base = OTHER; note = 2'-O-methylcytidine-3'-phosphate
  misc_feature 1: note = RNA
  misc_feature 2: note = DNA
  misc_feature 3..4: note = RNA
  misc_feature 5: note = DNA
  misc_feature 6: note = RNA
  misc_feature 7: note = DNA
  misc_feature 8..11: note = RNA
  misc_feature 12: note = DNA
  misc_feature 13..23: note = RNA
aagaaagtataaatgcttgtctc

SEQ ID NO: 89 - RNA, 21 nt, synthetic construct
  source 1..21: mol_type = other RNA
  modified_base 1: mod_base = OTHER; note = 2'-O-methyladenosine-3'-phosphorothioate
  modified_base 2: mod_base = OTHER; note = 2'-O-methylcytidine-3'-phosphorothioate
  modified_base 3: mod_base = OTHER; note = 2'-O-methyladenosine-3'-phosphate
  modified_base 4: mod_base = OTHER; note = 2'-O-methyladenosine-3'-phosphate
  modified_base 5: mod_base = OTHER; note = 2'-O-methylguanosine-3'-phosphate
  modified_base 6: mod_base = OTHER; note = 2'-O-methylcytidine-3'-phosphate
  modified_base 7: mod_base = OTHER; note = 2'-O-methyladenosine-3'-phosphate
  modified_base 8: mod_base = OTHER; note = 2'-O-methyluridine-3'-phosphate
  modified_base 9: mod_base = OTHER; note = 2'-fluorouridine-3'-phosphate
  modified_base 10: mod_base = OTHER; note = 2'-fluorouridine-3'-phosphate
  modified_base 11: mod_base = OTHER; note = 2'-fluoroadenosine-3'-phosphate
  modified_base 12: mod_base = OTHER; note = 2'-O-methyluridine-3'-phosphate
  modified_base 13: mod_base = OTHER; note = 2'-O-methyladenosine-3'-phosphate
  modified_base 14: mod_base = OTHER; note = 2'-O-methylcytidine-3'-phosphate
  modified_base 15: mod_base = OTHER; note = 2'-O-methyluridine-3'-phosphate
  modified_base 16: mod_base = OTHER; note = 2'-O-methyluridine-3'-phosphate
  modified_base 17: mod_base = OTHER; note = 2'-O-methyluridine-3'-phosphate
  modified_base 18: mod_base = OTHER; note = 2'-O-methylcytidine-3'-phosphate
  modified_base 19: mod_base = OTHER; note = 2'-O-methyluridine-3'-phosphate
  modified_base 20: mod_base = OTHER; note = 2'-O-methyluridine-3'-phosphate
  modified_base 21: mod_base = OTHER; note = 2'-O-methyluridine-3'-phosphate
acaagcatttatactttcttt

SEQ ID NO: 90 - DNA, 23 bp, synthetic construct
  source 1..23: mol_type = other DNA
  modified_base 1: mod_base = OTHER; note = 2'-O-methyladenosine-3'-phosphorothioate
  modified_base 2: mod_base = OTHER; note = 2'-deoxyadenosine-3'-phosphorothioate
  modified_base 3: mod_base = OTHER; note = 2'-O-methyladenosine-3'-phosphate
  modified_base 4: mod_base = OTHER; note = 2'-O-methylguanosine-3'-phosphate
  modified_base 6: mod_base = OTHER; note = 2'-O-methyladenosine-3'-phosphate
  modified_base 8: mod_base = OTHER; note = 2'-O-methylguanosine-3'-phosphate
  modified_base 9: mod_base = OTHER; note = 2'-O-methyluridine-3'-phosphate
  modified_base 10: mod_base = OTHER; note = 2'-O-methyladenosine-3'-phosphate
  modified_base 11: mod_base = OTHER; note = 2'-O-methyluridine-3'-phosphate
  modified_base 13: mod_base = OTHER; note = 2'-O-methyladenosine-3'-phosphate
  modified_base 14: mod_base = OTHER; note = 2'-fluoroadenosine-3'-phosphate
  modified_base 15: mod_base = OTHER; note = 2'-O-methyluridine-3'-phosphate
  modified_base 16: mod_base = OTHER; note = 2'-O-methylguanosine-3'-phosphate
  modified_base 17: mod_base = OTHER; note = 2'-O-methylcytidine-3'-phosphate
  modified_base 18: mod_base = OTHER; note = 2'-O-methyluridine-3'-phosphate
  modified_base 19: mod_base = OTHER; note = 2'-O-methyluridine-3'-phosphate
  modified_base 20: mod_base = OTHER; note = 2'-O-methylguanosine-3'-phosphate
  modified_base 21: mod_base = OTHER; note = 2'-O-methyluridine-3'-phosphorothioate
  modified_base 22: mod_base = OTHER; note = 2'-O-methylcytidine-3'-phosphorothioate
  modified_base 23: mod_base = OTHER; note = 2'-O-methyluridine-3'-phosphate
  misc_feature 1: note = RNA
  misc_feature 2: note = DNA
  misc_feature 3..4: note = RNA
  misc_feature 5: note = DNA
  misc_feature 6: note = RNA
  misc_feature 7: note = DNA
  misc_feature 8..11: note = RNA
  misc_feature 12: note = DNA
  misc_feature 13..23: note = RNA
aaagaaagtataaatgcttgtct

SEQ ID NO: 91 - protein, 29 aa, synthetic construct
AALEALAEALEALAEALEALAEAAAAGGC

SEQ ID NO: 92 - protein, 30 aa, synthetic construct
AALAEALAEALAEALAEALAEALAAAAGGC

SEQ ID NO: 93 - protein, 15 aa, synthetic construct
ALEALAEALEALAEA

SEQ ID NO: 94 - protein, 22 aa, synthetic construct
GLFEAIEGFIENGWEGMIWDYG

SEQ ID NO: 95 - protein, 23 aa, synthetic construct
GLFGAIAGFIENGWEGMIDGWYG

SEQ ID NO: 96 - protein, 48 aa, synthetic construct
GLFEAIEGFIENGWEGMIDGWYGCGLFEAIEGFIENGWEGMIDGWYGC

SEQ ID NO: 97 - protein, 44 aa, synthetic construct
GLFEAIEGFIENGWEGMIDGGCGLFEAIEGFIENGWEGMIDGGC

SEQ ID NO: 98 - protein, 35 aa, synthetic construct
GLFGALAEALAEALAEHLAEALAEALEALAAGGSC

SEQ ID NO: 99 - protein, 34 aa, synthetic construct
GLFEAIEGFIENGWEGLAEALAEALEALAAGGSC

SEQ ID NO: 100 - protein, 41 aa, synthetic construct
  SITE 17: note = Norleucine
  SITE 38: note = Norleucine
GLFEAIEGFIENGWEGXIDGKGLFEAIEGFIENGWEGXIDG

SEQ ID NO: 101 - protein, 19 aa, synthetic construct
LFEALLELLESLWELLLEA

SEQ ID NO: 102 - protein, 20 aa, synthetic construct
GLFKALLKLLKSLWKLLLKA

SEQ ID NO: 103 - protein, 20 aa, synthetic construct
GLFRALLRLLRSLWRLLLRA

SEQ ID NO: 104 - protein, 30 aa, synthetic construct
WEAKLAKALAKALAKHLAKALAKALKACEA

SEQ ID NO: 105 - protein, 22 aa, synthetic construct
GLFFEAIAEFIEGGWEGLIEGC

SEQ ID NO: 106 - protein, 26 aa, synthetic construct
GIGAVLKVLTTGLPALISWIKRKRQQ

SEQ ID NO: 107 - protein, 8 aa, synthetic construct
HHHHHWYG

SEQ ID NO: 108 - protein, 10 aa, synthetic construct
CHKKKKKKHC

SEQ ID NO: 109 - protein, 16 aa, synthetic construct
RQIKIWFQNRRMKWKK

SEQ ID NO: 110 - protein, 14 aa, synthetic construct
GRKKRRQRRRPPQC

SEQ ID NO: 111 - protein, 27 aa, synthetic construct
GALFLGWLGAAGSTMGAWSQPKKKRKV

SEQ ID NO: 112 - protein, 18 aa, synthetic construct
LLIILRRRIRKQAHAHSK

SEQ ID NO: 113 - protein, 26 aa, synthetic construct
GWTLNSAGYLLKINLKALAALAKKIL

SEQ ID NO: 114 - protein, 18 aa, synthetic construct
KLALKLALKALKAALKLA

SEQ ID NO: 115 - protein, 9 aa, synthetic construct
RRRRRRRRR

SEQ ID NO: 116 - protein, 10 aa, synthetic construct
KFFKFFKFFK

SEQ ID NO: 117 - protein, 37 aa, synthetic construct
LLGDFFRKSKEKIGKEFKRIVQRIKDFLRNLVPRTES

SEQ ID NO: 118 - protein, 31 aa, synthetic construct
SWLSKTAKKLENSAKKRISEGIAIAIQGGPR

SEQ ID NO: 119 - protein, 30 aa, synthetic construct
ACYCRIPACIAGERRYGTCIYQGRLWAFCC

SEQ ID NO: 120 - protein, 36 aa, synthetic construct
DHYNCVSSGGQCLYSACPIFTKIQGTCYRGKAKCCK

SEQ ID NO: 121 - protein, 42 aa, synthetic construct
  SITE 42: note = Arginine amide
RRRPRPPYLPRPRPPPFFPPRLPPRIPPGFPPRFPPRFPGKR

SEQ ID NO: 122 - protein, 13 aa, synthetic construct
  SITE 13: note = Arginine amide
ILPWKWPWWPWRR

SEQ ID NO: 123 - protein, 16 aa, synthetic construct
AAVALLPAVLLALLAP

SEQ ID NO: 124 - protein, 11 aa, synthetic construct
AALLPVLLAAP

SEQ ID NO: 125 - protein, 12 aa, synthetic construct
RKCRIVVIRVCR

SEQ ID NO: 126 - DNA, 21 bp, synthetic construct
  source 1..21: mol_type = other DNA
  modified_base 1: mod_base = OTHER; note = 2'-O-methylcytidine-3'-phosphate
  modified_base 2: mod_base = OTHER; note = 2'-O-methyluridine-3'-phosphate
  modified_base 3: mod_base = OTHER; note = 2'-O-methyluridine-3'-phosphate
  modified_base 5: mod_base = OTHER; note = 2'-O-methylcytidine-3'-phosphate
  modified_base 7: mod_base = OTHER; note = 2'-O-methylcytidine-3'-phosphate
  modified_base 8: mod_base = OTHER; note = 2'-O-methyluridine-3'-phosphate
  modified_base 12: mod_base = OTHER; note = 2'-O-methyluridine-3'-phosphate
  modified_base 14: mod_base = OTHER; note = 2'-O-methylcytidine-3'-phosphate
  modified_base 15: mod_base = OTHER; note = 2'-O-methyluridine-3'-phosphate
  modified_base 16: mod_base = OTHER; note = 2'-O-methyluridine-3'-phosphate
  modified_base 17: mod_base = OTHER; note = 2'-O-methylcytidine-3'-phosphate
  modified_base 20: mod_base = OTHER; note = 2'-deoxythimidine-3'-phosphorothioate
  misc_feature 1..19: note = RNA
  misc_feature 20..21: note = DNA
cttacgctgagtacttcgatt

SEQ ID NO: 127 - DNA, 21 bp, synthetic construct
  source 1..21: mol_type = other DNA
  modified_base 7: mod_base = OTHER; note = 2'-O-methyluridine-3'-phosphate
  modified_base 11: mod_base = OTHER; note = 2'-O-methylcytidine-3'-phosphate
  modified_base 16: mod_base = OTHER; note = 2'-O-methyluridine-3'-phosphate
  modified_base 20: mod_base = OTHER; note = 2'-deoxythimidine-3'-phosphorothioate
  misc_feature 1..19: note = RNA
  misc_feature 20..21: note = DNA
tcgaagtactcagcgtaagtt

SEQ ID NO: 128 - RNA, 21 nt, synthetic construct
  source 1..21: mol_type = other RNA
tagccagacatgagctgtgat

SEQ ID NO: 129 - RNA, 21 nt, synthetic construct
  source 1..21: mol_type = other RNA
gagggtcaagcacagctatct

SEQ ID NO: 130 - RNA, 21 nt, synthetic construct
  source 1..21: mol_type = other RNA
atccatcagatgatctacttt

SEQ ID NO: 131 - RNA, 21 nt, synthetic construct
  source 1..21: mol_type = other RNA
gatctactttcagccttcctt

SEQ ID NO: 132 - RNA, 21 nt, synthetic construct
  source 1..21: mol_type = other RNA
gagtcccagacaatagaagat

SEQ ID NO: 133 - RNA, 21 nt, synthetic construct
  source 1..21: mol_type = other RNA
atagaagacaggtggctgtat

SEQ ID NO: 134 - RNA, 21 nt, synthetic construct
  source 1..21: mol_type = other RNA
gtggctgtacccttggccaat

SEQ ID NO: 135 - RNA, 21 nt, synthetic construct
  source 1..21: mol_type = other RNA
cttggccaagggtaggtgtgt

SEQ ID NO: 136 - RNA, 21 nt, synthetic construct
  source 1..21: mol_type = other RNA
gtggcagtggtgtctgctgtt

SEQ ID NO: 137 - RNA, 21 nt, synthetic construct
  source 1..21: mol_type = other RNA
tgctgtcactgtgccctcatt

SEQ ID NO: 138 - RNA, 21 nt, synthetic construct
  source 1..21: mol_type = other RNA
agcaatcagactcaacagact

SEQ ID NO: 139 - RNA, 21 nt, synthetic construct
  source 1..21: mol_type = other RNA
acggagcaactgccatccgat

SEQ ID NO: 140 - RNA, 21 nt, synthetic construct
  source 1..21: mol_type = other RNA
gctcctgaaccagggccattt

SEQ ID NO: 141 - RNA, 21 nt, synthetic construct
  source 1..21: mol_type = other RNA
agggccattcaccaggagcat

SEQ ID NO: 142 - RNA, 21 nt, synthetic construct
  source 1..21: mol_type = other RNA
gctccctgatgtccagctctt

SEQ ID NO: 143 - RNA, 21 nt, synthetic construct
  source 1..21: mol_type = other RNA
cagctctggctggtgctgctt

SEQ ID NO: 144 - RNA, 21 nt, synthetic construct
  source 1..21: mol_type = other RNA
tgggcactggtgcgagcacat

SEQ ID NO: 145 - RNA, 21 nt, synthetic construct
  source 1..21: mol_type = other RNA
agggtctgtgtgtccctcctt

SEQ ID NO: 146 - RNA, 21 nt, synthetic construct
  source 1..21: mol_type = other RNA
caagcagaacgagctctggtt

SEQ ID NO: 147 - RNA, 21 nt, synthetic construct
  source 1..21: mol_type = other RNA
ctggtgctggagctagccaat

SEQ ID NO: 148 - RNA, 21 nt, synthetic construct
  source 1..21: mol_type = other RNA
ctagccaagcagcaaatcctt

SEQ ID NO: 149 - RNA, 21 nt, synthetic construct
  source 1..21: mol_type = other RNA
atcctggatgggttgcacctt

SEQ ID NO: 150 - RNA, 21 nt, synthetic construct
  source 1..21: mol_type = other RNA
ttgcacctgaccagtcgtcct

SEQ ID NO: 151 - RNA, 21 nt, synthetic construct
  source 1..21: mol_type = other RNA
tcgtcccagaataactcatct

SEQ ID NO: 152 - RNA, 21 nt, synthetic construct
  source 1..21: mol_type = other RNA
ccctccggagactacagccat

SEQ ID NO: 153 - RNA, 21 nt, synthetic construct
  source 1..21: mol_type = other RNA
tacagccagggagtgtggctt

SEQ ID NO: 154 - RNA, 21 nt, synthetic construct
  source 1..21: mol_type = other RNA
agtgtggctccagggaatggt

SEQ ID NO: 155 - RNA, 21 nt, synthetic construct
  source 1..21: mol_type = other RNA
catcagctttgctactgtcat

SEQ ID NO: 156 - RNA, 21 nt, synthetic construct
  source 1..21: mol_type = other RNA
tccacttcagcctacagctct

SEQ ID NO: 157 - RNA, 21 nt, synthetic construct
  source 1..21: mol_type = other RNA
cctgctcacttttcacctgtt

SEQ ID NO: 158 - RNA, 21 nt, synthetic construct
  source 1..21: mol_type = other RNA
tcacctgtccactcctcggtt

SEQ ID NO: 159 - RNA, 21 nt, synthetic construct
  source 1..21: mol_type = other RNA
tcccaccacctgtaccatgct

SEQ ID NO: 160 - RNA, 21 nt, synthetic construct
  source 1..21: mol_type = other RNA
taccatgcccgcctgtggctt

SEQ ID NO: 161 - RNA, 21 nt, synthetic construct
  source 1..21: mol_type = other RNA
cccttcctggcactctttgct

SEQ ID NO: 162 - RNA, 21 nt, synthetic construct
  source 1..21: mol_type = other RNA
ctctttgcttgaggatcttct

SEQ ID NO: 163 - RNA, 21 nt, synthetic construct
  source 1..21: mol_type = other RNA
actctcctggctgagcaccat

SEQ ID NO: 164 - RNA, 21 nt, synthetic construct
  source 1..21: mol_type = other RNA
gagcaccacatcaccaacctt

SEQ ID NO: 165 - RNA, 21 nt, synthetic construct
  source 1..21: mol_type = other RNA
accaacctgggctggcatact

SEQ ID NO: 166 - RNA, 21 nt, synthetic construct
  source 1..21: mol_type = other RNA
ctggcataccttaactctgct

SEQ ID NO: 167 - RNA, 21 nt, synthetic construct
  source 1..21: mol_type = other RNA
tgccctctagtggcttgaggt

SEQ ID NO: 168 - RNA, 21 nt, synthetic construct
  source 1..21: mol_type = other RNA
agaagtctggtgtcctgaaat

SEQ ID NO: 169 - RNA, 21 nt, synthetic construct
  source 1..21: mol_type = other RNA
gtcctgaaactgcaactagat

SEQ ID NO: 170 - RNA, 21 nt, synthetic construct
  source 1..21: mol_type = other RNA
acagcacagttactggacaat

SEQ ID NO: 171 - RNA, 21 nt, synthetic construct
  source 1..21: mol_type = other RNA
ctggacaaccgaggcggctct

SEQ ID NO: 172 - RNA, 21 nt, synthetic construct
  source 1..21: mol_type = other RNA
gcggctcttggacacagcagt

SEQ ID NO: 173 - RNA, 21 nt, synthetic construct
  source 1..21: mol_type = other RNA
gacaccagcagcccttcctat

SEQ ID NO: 174 - RNA, 21 nt, synthetic construct
  source 1..21: mol_type = other RNA
ccttcctagagcttaagatct

SEQ ID NO: 175 - RNA, 21 nt, synthetic construct
  source 1..21: mol_type = other RNA
cttaagatccgagccaatgat

SEQ ID NO: 176 - RNA, 21 nt, synthetic construct
  source 1..21: mol_type = other RNA
agccaatgagcctggagcagt

SEQ ID NO: 177 - RNA, 21 nt, synthetic construct
  source 1..21: mol_type = other RNA
aggcgagaccattacgtagat

SEQ ID NO: 178 - RNA, 21 nt, synthetic construct
  source 1..21: mol_type = other RNA
tacgtagacttccaggaactt

SEQ ID NO: 179 - RNA, 21 nt, synthetic construct
  source 1..21: mol_type = other RNA
caggaactgggatggcgggat

SEQ ID NO: 180 - RNA, 21 nt, synthetic construct
  source 1..21: mol_type = other RNA
gcgggactggatactgcagct

SEQ ID NO: 181 - RNA, 21 nt, synthetic construct
  source 1..21: mol_type = other RNA
taccagctgaattactgcagt

SEQ ID NO: 182 - RNA, 21 nt, synthetic construct
  source 1..21: mol_type = other RNA
actgcagtgggcagtgccctt

SEQ ID NO: 183 - RNA, 21 nt, synthetic construct
  source 1..21: mol_type = other RNA
caggcattgctgcctctttct

SEQ ID NO: 184 - RNA, 21 nt, synthetic construct
  source 1..21: mol_type = other RNA
tttccattctgccgtcttcat

SEQ ID NO: 185 - RNA, 21 nt, synthetic construct
  source 1..21: mol_type = other RNA
cgtcttcagcctcctcaaagt

SEQ ID NO: 186 - RNA, 21 nt, synthetic construct
  source 1..21: mol_type = other RNA
cctcaaagccaacaatccttt

SEQ ID NO: 187 - RNA, 21 nt, synthetic construct
  source 1..21: mol_type = other RNA
cttggcctgccagtacctcct

SEQ ID NO: 188 - RNA, 21 nt, synthetic construct
  source 1..21: mol_type = other RNA
tacctcctgttgtgtccctat

SEQ ID NO: 189 - RNA, 21 nt, synthetic construct
  source 1..21: mol_type = other RNA
gtgtccctactgcccgaaggt

SEQ ID NO: 190 - RNA, 21 nt, synthetic construct
  source 1..21: mol_type = other RNA
ctctctctcctctacctggat

SEQ ID NO: 191 - RNA, 21 nt, synthetic construct
  source 1..21: mol_type = other RNA
tacctggatcataatggcaat

SEQ ID NO: 192 - RNA, 21 nt, synthetic construct
  source 1..21: mol_type = other RNA
aatggcaatgtggtcaagact

SEQ ID NO: 193 - RNA, 21 nt, synthetic construct
  source 1..21: mol_type = other RNA
aagacggatgtgccagatatt

SEQ ID NO: 194 - RNA, 21 nt, synthetic construct
  source 1..21: mol_type = other RNA
gccagatatggtggtggaggt

SEQ ID NO: 195 - RNA, 21 nt, synthetic construct
  source 1..21: mol_type = other RNA
gaggcctgtggctgcagctat

SEQ ID NO: 196 - RNA, 21 nt, synthetic construct
  source 1..21: mol_type = other RNA
tgcagctagcaagaggacctt

SEQ ID NO: 197 - RNA, 21 nt, synthetic construct
  source 1..21: mol_type = other RNA
ctttggagtgaagagaccaat

SEQ ID NO: 198 - RNA, 21 nt, synthetic construct
  source 1..21: mol_type = other RNA
agagaccaagatgaagtttct

SEQ ID NO: 199 - RNA, 21 nt, synthetic construct
  source 1..21: mol_type = other RNA
cagggcatctgtgactggagt

SEQ ID NO: 200 - RNA, 21 nt, synthetic construct
  source 1..21: mol_type = other RNA
gaggcatcagattcctgatct

SEQ ID NO: 201 - RNA, 21 nt, synthetic construct
  source 1..21: mol_type = other RNA
acccaacaaccacctggcaat

SEQ ID NO: 202 - RNA, 21 nt, synthetic construct
  source 1..21: mol_type = other RNA
ggcaatatgactcacttgact

SEQ ID NO: 203 - RNA, 21 nt, synthetic construct
  source 1..21: mol_type = other RNA
gacccaaatgggcactttctt

SEQ ID NO: 204 - RNA, 21 nt, synthetic construct
  source 1..21: mol_type = other RNA
actttcttgtctgagactctt

SEQ ID NO: 205 - RNA, 21 nt, synthetic construct
  source 1..21: mol_type = other RNA
tgagactctggcttattccat

SEQ ID NO: 206 - RNA, 21 nt, synthetic construct
  source 1..21: mol_type = other RNA
tccaggttggctgatgtgttt

SEQ ID NO: 207 - RNA, 21 nt, synthetic construct
  source 1..21: mol_type = other RNA
tgtgttgggagatgggtaaat

SEQ ID NO: 208 - RNA, 21 nt, synthetic construct
  source 1..21: mol_type = other RNA
ggtaaagcgtttcttctaaat

SEQ ID NO: 209 - RNA, 21 nt, synthetic construct
  source 1..21: mol_type = other RNA
tacccagaaagcatgatttct

SEQ ID NO: 210 - RNA, 21 nt, synthetic construct
  source 1..21: mol_type = other RNA
gatttcctgccctaagtcctt

SEQ ID NO: 211 - RNA, 21 nt, synthetic construct
  source 1..21: mol_type = other RNA
agtcctgtgagaagatgtcat

SEQ ID NO: 212 - RNA, 21 nt, synthetic construct
  source 1..21: mol_type = other RNA
tcagggactagggagggaggt

SEQ ID NO: 213 - RNA, 21 nt, synthetic construct
  source 1..21: mol_type = other RNA
aattacttagcctctcccaat

SEQ ID NO: 214 - RNA, 21 nt, synthetic construct
  source 1..21: mol_type = other RNA
caagatgagaaagtcctcaat

SEQ ID NO: 215 - RNA, 21 nt, synthetic construct
  source 1..21: mol_type = other RNA
ggaggaagcagatagatggtt

SEQ ID NO: 216 - RNA, 21 nt, synthetic construct
  source 1..21: mol_type = other RNA
gcaggcttgaagcagggtaat

SEQ ID NO: 217 - RNA, 21 nt, synthetic construct
  source 1..21: mol_type = other RNA
gcagggtaagcaggctggcct

SEQ ID NO: 218 - RNA, 21 nt, synthetic construct
  source 1..21: mol_type = other RNA
ggcccagggtaagggctgttt

SEQ ID NO: 219 - RNA, 21 nt, synthetic construct
  source 1..21: mol_type = other RNA
ggctgttgaggtaccttaagt

SEQ ID NO: 220 - RNA, 21 nt, synthetic construct
  source 1..21: mol_type = other RNA
accttaagggaaggtcaagat

SEQ ID NO: 221 - RNA, 21 nt, synthetic construct
  source 1..21: mol_type = other RNA
gtcaagagggagatgggcaat

SEQ ID NO: 222 - RNA, 21 nt, synthetic construct
  source 1..21: mol_type = other RNA
gctgagggaggatgcttaggt

SEQ ID NO: 223 - RNA, 21 nt, synthetic construct
  source 1..21: mol_type = other RNA
agaaacaggagtcaggaaaat

SEQ ID NO: 224 - RNA, 21 nt, synthetic construct
  source 1..21: mol_type = other RNA
tcaggaaaatgaggcactaat

SEQ ID NO: 225 - RNA, 21 nt, synthetic construct
  source 1..21: mol_type = other RNA
ggcactaagcctaagaagttt

SEQ ID NO: 226 - RNA, 21 nt, synthetic construct
  source 1..21: mol_type = other RNA
aagaagttccctggtttttct

SEQ ID NO: 227 - RNA, 21 nt, synthetic construct
  source 1..21: mol_type = other RNA
cactgggagacaagcatttat

SEQ ID NO: 228 - RNA, 21 nt, synthetic construct
  source 1..21: mol_type = other RNA
aagcatttatactttctttct

SEQ ID NO: 229 - RNA, 21 nt, synthetic construct
  source 1..21: mol_type = other RNA
ttttgagatcgagtctcgctt

SEQ ID NO: 230 - RNA, 21 nt, synthetic construct
  source 1..21: mol_type = other RNA
tctcgctctgtcaccaggctt

SEQ ID NO: 231 - RNA, 21 nt, synthetic construct
  source 1..21: mol_type = other RNA
agtgcagtgacacgatcttgt

SEQ ID NO: 232 - RNA, 21 nt, synthetic construct
  source 1..21: mol_type = other RNA
gctcactgcaacctccgtctt

SEQ ID NO: 233 - RNA, 21 nt, synthetic construct
  source 1..21: mol_type = other RNA
cctccgtctcctgggttcaat

SEQ ID NO: 234 - RNA, 21 nt, synthetic construct
  source 1..21: mol_type = other RNA
ttctgcctcagcctcccgagt

SEQ ID NO: 235 - RNA, 21 nt, synthetic construct
  source 1..21: mol_type = other RNA
tgggttcaagtgattcttctt

SEQ ID NO: 236 - RNA, 21 nt, synthetic construct
  source 1..21: mol_type = other RNA
gagcagctgggattacaggct

SEQ ID NO: 237 - RNA, 21 nt, synthetic construct
  source 1..21: mol_type = other RNA
cgcccactaatttttgtattt

SEQ ID NO: 238 - RNA, 21 nt, synthetic construct
  source 1..21: mol_type = other RNA
tgtattcttagtagaaacgat

SEQ ID NO: 239 - RNA, 21 nt, synthetic construct
  source 1..21: mol_type = other RNA
tagaaacgaggtttcaacatt

SEQ ID NO: 240 - RNA, 21 nt, synthetic construct
  source 1..21: mol_type = other RNA
ttcaacatgttggccaggatt

SEQ ID NO: 241 - RNA, 21 nt, synthetic construct
  source 1..21: mol_type = other RNA
ccaggatggtctcaatctctt

SEQ ID NO: 242 - RNA, 21 nt, synthetic construct
  source 1..21: mol_type = other RNA
tcaatctcttgacctcttgat

SEQ ID NO: 243 - RNA, 21 nt, synthetic construct
  source 1..21: mol_type = other RNA
acctcttgatccacccgactt

SEQ ID NO: 244 - RNA, 21 nt, synthetic construct
  source 1..21: mol_type = other RNA
ccgacttggcctcccgaagtt

SEQ ID NO: 245 - RNA, 21 nt, synthetic construct
  source 1..21: mol_type = other RNA
gaagtgatgagattataggct

SEQ ID NO: 246 - RNA, 21 nt, synthetic construct
  source 1..21: mol_type = other RNA
cctggcttatactttcttaat

SEQ ID NO: 247 - RNA, 21 nt, synthetic construct
  source 1..21: mol_type = other RNA
gagaaagaaaatcaacaaatt

SEQ ID NO: 248 - RNA, 21 nt, synthetic construct
  source 1..21: mol_type = other RNA
tgagtcataaagaagggttat

SEQ ID NO: 249 - RNA, 21 nt, synthetic construct
  source 1..21: mol_type = other RNA
agggttagggtgatggtccat

SEQ ID NO: 250 - RNA, 21 nt, synthetic construct
  source 1..21: mol_type = other RNA
ccagagcaacagttcttcaat

SEQ ID NO: 251 - RNA, 21 nt, synthetic construct
  source 1..21: mol_type = other RNA
ttcttcaagtgtactctgtat

SEQ ID NO: 252 - RNA, 21 nt, synthetic construct
  source 1..21: mol_type = other RNA
tactctgtaggcttctgggat

SEQ ID NO: 253 - RNA, 21 nt, synthetic construct
  source 1..21: mol_type = other RNA
ctgggaggtcccttttcaggt

SEQ ID NO: 254 - RNA, 21 nt, synthetic construct
  source 1..21: mol_type = other RNA
gtccacaaagtcaaagctatt

SEQ ID NO: 255 - RNA, 21 nt, synthetic construct
  source 1..21: mol_type = other RNA
ctaacatgttatttgcctttt

SEQ ID NO: 256 - RNA, 21 nt, synthetic construct
  source 1..21: mol_type = other RNA
cttttgaattctcattatctt

SEQ ID NO: 257 - RNA, 21 nt, synthetic construct
  source 1..21: mol_type = other RNA
gtattgtggagttttccagat

SEQ ID NO: 258 - RNA, 21 nt, synthetic construct
  source 1..21: mol_type = other RNA
gaggccgtgtgacatgtgatt

SEQ ID NO: 259 - RNA, 21 nt, synthetic construct
  source 1..21: mol_type = other RNA
acatgtgattacatcatcttt

SEQ ID NO: 260 - RNA, 21 nt, synthetic construct
  source 1..21: mol_type = other RNA
atcatctttctgacatcattt

SEQ ID NO: 261 - RNA, 21 nt, synthetic construct
  source 1..21: mol_type = other RNA
gacatcattgttaatggaatt

SEQ ID NO: 262 - RNA, 23 nt, synthetic construct
  source 1..23: mol_type = other RNA
atcacagctcatgtctggctact

SEQ ID NO: 263 - RNA, 23 nt, synthetic construct
  source 1..23: mol_type = other RNA
agatagctgtgcttgaccctcac

SEQ ID NO: 264 - RNA, 23 nt, synthetic construct
  source 1..23: mol_type = other RNA
aaagtagatcatctgatggatag

SEQ ID NO: 265 - RNA, 23 nt, synthetic construct
  source 1..23: mol_type = other RNA
aaggaaggctgaaagtagatcat

SEQ ID NO: 266 - RNA, 23 nt, synthetic construct
  source 1..23: mol_type = other RNA
atcttctattgtctgggactcag

SEQ ID NO: 267 - RNA, 23 nt, synthetic construct
  source 1..23: mol_type = other RNA
atacagccacctgtcttctattg

SEQ ID NO: 268 - RNA, 23 nt, synthetic construct
  source 1..23: mol_type = other RNA
attggccaagggtacagccacct

SEQ ID NO: 269 - RNA, 23 nt, synthetic construct
  source 1..23: mol_type = other RNA
acacacctacccttggccaaggg

SEQ ID NO: 270 - RNA, 23 nt, synthetic construct
  source 1..23: mol_type = other RNA
aacagcagacaccactgccacac

SEQ ID NO: 271 - RNA, 23 nt, synthetic construct
  source 1..23: mol_type = other RNA
aatgagggcacagtgacagcaga

SEQ ID NO: 272 - RNA, 23 nt, synthetic construct
  source 1..23: mol_type = other RNA
agtctgttgagtctgattgctgg

SEQ ID NO: 273 - RNA, 23 nt, synthetic construct
  source 1..23: mol_type = other RNA
atcggatggcagttgctccgtct

SEQ ID NO: 274 - RNA, 23 nt, synthetic construct
  source 1..23: mol_type = other RNA
aaatggccctggttcaggagcct

SEQ ID NO: 275 - RNA, 23 nt, synthetic construct
  source 1..23: mol_type = other RNA
atgctcctggtgaatggccctgg

SEQ ID NO: 276 - RNA, 23 nt, synthetic construct
  source 1..23: mol_type = other RNA
aagagctggacatcagggagccg

SEQ ID NO: 277 - RNA, 23 nt, synthetic construct
  source 1..23: mol_type = other RNA
aagcagcaccagccagagctgga

SEQ ID NO: 278 - RNA, 23 nt, synthetic construct
  source 1..23: mol_type = other RNA
atgtgctcgcaccagtgcccaca

SEQ ID NO: 279 - RNA, 23 nt, synthetic construct
  source 1..23: mol_type = other RNA
aaggagggacacacagaccctgt

SEQ ID NO: 280 - RNA, 23 nt, synthetic construct
  source 1..23: mol_type = other RNA
aaccagagctcgttctgcttggg

SEQ ID NO: 281 - RNA, 23 nt, synthetic construct
  source 1..23: mol_type = other RNA
attggctagctccagcaccagag

SEQ ID NO: 282 - RNA, 23 nt, synthetic construct
  source 1..23: mol_type = other RNA
aaggatttgctgcttggctagct

SEQ ID NO: 283 - RNA, 23 nt, synthetic construct
  source 1..23: mol_type = other RNA
aaggtgcaacccatccaggattt

SEQ ID NO: 284 - RNA, 23 nt, synthetic construct
  source 1..23: mol_type = other RNA
aggacgactggtcaggtgcaacc

SEQ ID NO: 285 - RNA, 23 nt, synthetic construct
  source 1..23: mol_type = other RNA
agatgagttattctgggacgact

SEQ ID NO: 286 - RNA, 23 nt, synthetic construct
  source 1..23: mol_type = other RNA
atggctgtagtctccggagggct

SEQ ID NO: 287 - RNA, 23 nt, synthetic construct
  source 1..23: mol_type = other RNA
aagccacactccctggctgtagt

SEQ ID NO: 288 - RNA, 23 nt, synthetic construct
  source 1..23: mol_type = other RNA
accattccctggagccacactcc

SEQ ID NO: 289 - RNA, 23 nt, synthetic construct
  source 1..23: mol_type = other RNA
atgacagtagcaaagctgatgac

SEQ ID NO: 290 - RNA, 23 nt, synthetic construct
  source 1..23: mol_type = other RNA
atgaagtggagtctgtgacagta

SEQ ID NO: 291 - RNA, 23 nt, synthetic construct
  source 1..23: mol_type = other RNA
agagctgtaggctgaagtggagt

SEQ ID NO: 292 - RNA, 23 nt, synthetic construct
  source 1..23: mol_type = other RNA
aacaggtgaaaagtgagcaggga

SEQ ID NO: 293 - RNA, 23 nt, synthetic construct
  source 1..23: mol_type = other RNA
aaccgaggagtggacaggtgaaa

SEQ ID NO: 294 - RNA, 23 nt, synthetic construct
  source 1..23: mol_type = other RNA
agcatggtacaggtggtgggacc

SEQ ID NO: 295 - RNA, 23 nt, synthetic construct
  source 1..23: mol_type = other RNA
aagccacaggcgggcatggtaca

SEQ ID NO: 296 - RNA, 23 nt, synthetic construct
  source 1..23: mol_type = other RNA
agcaaagagtgccaggaagggtg

SEQ ID NO: 297 - RNA, 23 nt, synthetic construct
  source 1..23: mol_type = other RNA
agaagatcctcaagcaaagagtg

SEQ ID NO: 298 - RNA, 23 nt, synthetic construct
  source 1..23: mol_type = other RNA
atggtgctcagccaggagagtgc

SEQ ID NO: 299 - RNA, 23 nt, synthetic construct
  source 1..23: mol_type = other RNA
aaggttggtgatgtggtgctcag

SEQ ID NO: 300 - RNA, 23 nt, synthetic construct
  source 1..23: mol_type = other RNA
agtatgccagcccaggttggtga

SEQ ID NO: 301 - RNA, 23 nt, synthetic construct
  source 1..23: mol_type = other RNA
agcagagttaaggtatgccagcc

SEQ ID NO: 302 - RNA, 23 nt, synthetic construct
  source 1..23: mol_type = other RNA
acctcaagccactagagggcaga

SEQ ID NO: 303 - RNA, 23 nt, synthetic construct
  source 1..23: mol_type = other RNA
atttcaggacaccagacttctca

SEQ ID NO: 304 - RNA, 23 nt, synthetic construct
  source 1..23: mol_type = other RNA
atctagttgcagtttcaggacac

SEQ ID NO: 305 - RNA, 23 nt, synthetic construct
  source 1..23: mol_type = other RNA
attgtccagtaactgtgctgttg

SEQ ID NO: 306 - RNA, 23 nt, synthetic construct
  source 1..23: mol_type = other RNA
agagccgcctcggttgtccagta

SEQ ID NO: 307 - RNA, 23 nt, synthetic construct
  source 1..23: mol_type = other RNA
actgctgtgtccaagagccgcct

SEQ ID NO: 308 - RNA, 23 nt, synthetic construct
  source 1..23: mol_type = other RNA
ataggaagggctgctggtgtcct

SEQ ID NO: 309 - RNA, 23 nt, synthetic construct
  source 1..23: mol_type = other RNA
agatcttaagctctaggaagggc

SEQ ID NO: 310 - RNA, 23 nt, synthetic construct
  source 1..23: mol_type = other RNA
atcattggctcggatcttaagct

SEQ ID NO: 311 - RNA, 23 nt, synthetic construct
  source 1..23: mol_type = other RNA
actgctccaggctcattggctcg

SEQ ID NO: 312 - RNA, 23 nt, synthetic construct
  source 1..23: mol_type = other RNA
atctacgtaatggtctcgcctgc

SEQ ID NO: 313 - RNA, 23 nt, synthetic construct
  source 1..23: mol_type = other RNA
aagttcctggaagtctacgtaat

SEQ ID NO: 314 - RNA, 23 nt, synthetic construct
  source 1..23: mol_type = other RNA
atcccgccatcccagttcctgga

SEQ ID NO: 315 - RNA, 23 nt, synthetic construct
  source 1..23: mol_type = other RNA
agctgcagtatccagtcccgcca

SEQ ID NO: 316 - RNA, 23 nt, synthetic construct
  source 1..23: mol_type = other RNA
actgcagtaattcagctggtacc

SEQ ID NO: 317 - RNA, 23 nt, synthetic construct
  source 1..23: mol_type = other RNA
aagggcactgcccactgcagtaa

SEQ ID NO: 318 - RNA, 23 nt, synthetic construct
  source 1..23: mol_type = other RNA
agaaagaggcagcaatgcctggg

SEQ ID NO: 319 - RNA, 23 nt, synthetic construct
  source 1..23: mol_type = other RNA
atgaagacggcagaatggaaaga

SEQ ID NO: 320 - RNA, 23 nt, synthetic construct
  source 1..23: mol_type = other RNA
actttgaggaggctgaagacggc

SEQ ID NO: 321 - RNA, 23 nt, synthetic construct
  source 1..23: mol_type = other RNA
aaaggattgttggctttgaggag

SEQ ID NO: 322 - RNA, 23 nt, synthetic construct
  source 1..23: mol_type = other RNA
aggaggtactggcaggccaagga

SEQ ID NO: 323 - RNA, 23 nt, synthetic construct
  source 1..23: mol_type = other RNA
atagggacacaacaggaggtact

SEQ ID NO: 324 - RNA, 23 nt, synthetic construct
  source 1..23: mol_type = other RNA
accttcgggcagtagggacacaa

SEQ ID NO: 325 - RNA, 23 nt, synthetic construct
  source 1..23: mol_type = other RNA
atccaggtagaggagagagaggg

SEQ ID NO: 326 - RNA, 23 nt, synthetic construct
  source 1..23: mol_type = other RNA
attgccattatgatccaggtaga

SEQ ID NO: 327 - RNA, 23 nt, synthetic construct
  source 1..23: mol_type = other RNA
agtcttgaccacattgccattat

SEQ ID NO: 328 - RNA, 23 nt, synthetic construct
  source 1..23: mol_type = other RNA
aatatctggcacatccgtcttga

SEQ ID NO: 329 - RNA, 23 nt, synthetic construct
  source 1..23: mol_type = other RNA
acctccaccaccatatctggcac

SEQ ID NO: 330 - RNA, 23 nt, synthetic construct
  source 1..23: mol_type = other RNA
atagctgcagccacaggcctcca

SEQ ID NO: 331 - RNA, 23 nt, synthetic construct
  source 1..23: mol_type = other RNA
aaggtcctcttgctagctgcagc

SEQ ID NO: 332 - RNA, 23 nt, synthetic construct
  source 1..23: mol_type = other RNA
attggtctcttcactccaaagcc

SEQ ID NO: 333 - RNA, 23 nt, synthetic construct
  source 1..23: mol_type = other RNA
agaaacttcatcttggtctcttc

SEQ ID NO: 334 - RNA, 23 nt, synthetic construct
  source 1..23: mol_type = other RNA
actccagtcacagatgccctgtg

SEQ ID NO: 335 - RNA, 23 nt, synthetic construct
  source 1..23: mol_type = other RNA
agatcaggaatctgatgcctcca

SEQ ID NO: 336 - RNA, 23 nt, synthetic construct
  source 1..23: mol_type = other RNA
attgccaggtggttgttgggttg

SEQ ID NO: 337 - RNA, 23 nt, synthetic construct
  source 1..23: mol_type = other RNA
agtcaagtgagtcatattgccag

SEQ ID NO: 338 - RNA, 23 nt, synthetic construct
  source 1..23: mol_type = other RNA
aagaaagtgcccatttgggtccc

SEQ ID NO: 339 - RNA, 23 nt, synthetic construct
  source 1..23: mol_type = other RNA
aagagtctcagacaagaaagtgc

SEQ ID NO: 340 - RNA, 23 nt, synthetic construct
  source 1..23: mol_type = other RNA
atggaataagccagagtctcaga

SEQ ID NO: 341 - RNA, 23 nt, synthetic construct
  source 1..23: mol_type = other RNA
aaacacatcagccaacctggaat

SEQ ID NO: 342 - RNA, 23 nt, synthetic construct
  source 1..23: mol_type = other RNA
atttacccatctcccaacacatc

SEQ ID NO: 343 - RNA, 23 nt, synthetic construct
  source 1..23: mol_type = other RNA
atttagaagaaacgctttaccca

SEQ ID NO: 344 - RNA, 23 nt, synthetic construct
  source 1..23: mol_type = other RNA
agaaatcatgctttctgggtaga

SEQ ID NO: 345 - RNA, 23 nt, synthetic construct
  source 1..23: mol_type = other RNA
aaggacttagggcaggaaatcat

SEQ ID NO: 346 - RNA, 23 nt, synthetic construct
  source 1..23: mol_type = other RNA
atgacatcttctcacaggactta

SEQ ID NO: 347 - RNA, 23 nt, synthetic construct
  source 1..23: mol_type = other RNA
acctccctccctagtccctgaca

SEQ ID NO: 348 - RNA, 23 nt, synthetic construct
  source 1..23: mol_type = other RNA
attgggagaggctaagtaatttt

SEQ ID NO: 349 - RNA, 23 nt, synthetic construct
  source 1..23: mol_type = other RNA
attgaggactttctcatcttggg

SEQ ID NO: 350 - RNA, 23 nt, synthetic construct
  source 1..23: mol_type = other RNA
aaccatctatctgcttcctcctc

SEQ ID NO: 351 - RNA, 23 nt, synthetic construct
  source 1..23: mol_type = other RNA
attaccctgcttcaagcctgctg

SEQ ID NO: 352 - RNA, 23 nt, synthetic construct
  source 1..23: mol_type = other RNA
aggccagcctgcttaccctgctt

SEQ ID NO: 353 - RNA, 23 nt, synthetic construct
  source 1..23: mol_type = other RNA
aaacagcccttaccctgggccag

SEQ ID NO: 354 - RNA, 23 nt, synthetic construct
  source 1..23: mol_type = other RNA
acttaaggtacctcaacagccct

SEQ ID NO: 355 - RNA, 23 nt, synthetic construct
  source 1..23: mol_type = other RNA
atcttgaccttcccttaaggtac

SEQ ID NO: 356 - RNA, 23 nt, synthetic construct
  source 1..23: mol_type = other RNA
attgcccatctccctcttgacct

SEQ ID NO: 357 - RNA, 23 nt, synthetic construct
  source 1..23: mol_type = other RNA
acctaagcatcctccctcagcgc

SEQ ID NO: 358 - RNA, 23 nt, synthetic construct
  source 1..23: mol_type = other RNA
attttcctgactcctgtttctgg

SEQ ID NO: 359 - RNA, 23 nt, synthetic construct
  source 1..23: mol_type = other RNA
attagtgcctcattttcctgact

SEQ ID NO: 360 - RNA, 23 nt, synthetic construct
  source 1..23: mol_type = other RNA
aaacttcttaggcttagtgcctc

SEQ ID NO: 361 - RNA, 23 nt, synthetic construct
  source 1..23: mol_type = other RNA
agaaaaaccagggaacttcttag

SEQ ID NO: 362 - RNA, 23 nt, synthetic construct
  source 1..23: mol_type = other RNA
ataaatgcttgtctcccagtggg

SEQ ID NO: 363 - RNA, 23 nt, synthetic construct
  source 1..23: mol_type = other RNA
agaaagaaagtataaatgcttgt

SEQ ID NO: 364 - RNA, 23 nt, synthetic construct
  source 1..23: mol_type = other RNA
aagcgagactcgatctcaaaaaa

SEQ ID NO: 365 - RNA, 23 nt, synthetic construct
  source 1..23: mol_type = other RNA
aagcctggtgacagagcgagact

SEQ ID NO: 366 - RNA, 23 nt, synthetic construct
  source 1..23: mol_type = other RNA
acaagatcgtgtcactgcactcc

SEQ ID NO: 367 - RNA, 23 nt, synthetic construct
  source 1..23: mol_type = other RNA
aagacggaggttgcagtgagcca

SEQ ID NO: 368 - RNA, 23 nt, synthetic construct
  source 1..23: mol_type = other RNA
attgaacccaggagacggaggtt

SEQ ID NO: 369 - RNA, 23 nt, synthetic construct
  source 1..23: mol_type = other RNA
actcgggaggctgaggcagaaga

SEQ ID NO: 370 - RNA, 23 nt, synthetic construct
  source 1..23: mol_type = other RNA
aagaagaatcacttgaacccagg

SEQ ID NO: 371 - RNA, 23 nt, synthetic construct
  source 1..23: mol_type = other RNA
agcctgtaatcccagctgctcgg

SEQ ID NO: 372 - RNA, 23 nt, synthetic construct
  source 1..23: mol_type = other RNA
aaatacaaaaattagtgggcgcc

SEQ ID NO: 373 - RNA, 23 nt, synthetic construct
  source 1..23: mol_type = other RNA
atcgtttctactaagaatacaaa

SEQ ID NO: 374 - RNA, 23 nt, synthetic construct
  source 1..23: mol_type = other RNA
aatgttgaaacctcgtttctact

SEQ ID NO: 375 - RNA, 23 nt, synthetic construct
  source 1..23: mol_type = other RNA
aatcctggccaacatgttgaaac

SEQ ID NO: 376 - RNA, 23 nt, synthetic construct
  source 1..23: mol_type = other RNA
aagagattgagaccatcctggcc

SEQ ID NO: 377 - RNA, 23 nt, synthetic construct
  source 1..23: mol_type = other RNA
atcaagaggtcaagagattgaga

SEQ ID NO: 378 - RNA, 23 nt, synthetic construct
  source 1..23: mol_type = other RNA
aagtcgggtggatcaagaggtca

SEQ ID NO: 379 - RNA, 23 nt, synthetic construct
  source 1..23: mol_type = other RNA
aacttcgggaggccaagtcgggt

SEQ ID NO: 380 - RNA, 23 nt, synthetic construct
  source 1..23: mol_type = other RNA
agcctataatctcatcacttcgg

SEQ ID NO: 381 - RNA, 23 nt, synthetic construct
  source 1..23: mol_type = other RNA
attaagaaagtataagccaggcg

SEQ ID NO: 382 - RNA, 23 nt, synthetic construct
  source 1..23: mol_type = other RNA
aatttgttgattttctttctcct

SEQ ID NO: 383 - RNA, 23 nt, synthetic construct
  source 1..23: mol_type = other RNA
ataacccttctttatgactcaca

SEQ ID NO: 384 - RNA, 23 nt, synthetic construct
  source 1..23: mol_type = other RNA
atggaccatcaccctaacccttc

SEQ ID NO: 385 - RNA, 23 nt, synthetic construct
  source 1..23: mol_type = other RNA
attgaagaactgttgctctggac

SEQ ID NO: 386 - RNA, 23 nt, synthetic construct
  source 1..23: mol_type = other RNA
atacagagtacacttgaagaact

SEQ ID NO: 387 - RNA, 23 nt, synthetic construct
  source 1..23: mol_type = other RNA
atcccagaagcctacagagtaca

SEQ ID NO: 388 - RNA, 23 nt, synthetic construct
  source 1..23: mol_type = other RNA
acctgaaaagggacctcccagaa

SEQ ID NO: 389 - RNA, 23 nt, synthetic construct
  source 1..23: mol_type = other RNA
aatagctttgactttgtggacac

SEQ ID NO: 390 - RNA, 23 nt, synthetic construct
  source 1..23: mol_type = other RNA
aaaaggcaaataacatgttagta

SEQ ID NO: 391 - RNA, 23 nt, synthetic construct
  source 1..23: mol_type = other RNA
aagataatgagaattcaaaaggc

SEQ ID NO: 392 - RNA, 23 nt, synthetic construct
  source 1..23: mol_type = other RNA
atctggaaaactccacaatacaa

SEQ ID NO: 393 - RNA, 23 nt, synthetic construct
  source 1..23: mol_type = other RNA
aatcacatgtcacacggcctctg

SEQ ID NO: 394 - RNA, 23 nt, synthetic construct
  source 1..23: mol_type = other RNA
aaagatgatgtaatcacatgtca

SEQ ID NO: 395 - RNA, 23 nt, synthetic construct
  source 1..23: mol_type = other RNA
aaatgatgtcagaaagatgatgt

SEQ ID NO: 396 - RNA, 23 nt, synthetic construct
  source 1..23: mol_type = other RNA
aattccattaacaatgatgtcag

SEQ ID NO: 397 - RNA, 21 nt, synthetic construct
  source 1..21: mol_type = other RNA
  modified_base 1: mod_base = OTHER; note = 2'-O-methyluridine-3'-phosphorothioate
  modified_base 2: mod_base = OTHER; note = 2'-O-methyladenosine-3'-phosphorothioate
  modified_base 3: mod_base = OTHER; note = 2'-O-methylguanosine-3'-phosphate
  modified_base 4: mod_base = OTHER; note = 2'-O-methylcytidine-3'-phosphate
  modified_base 5: mod_base = OTHER; note = 2'-O-methylcytidine-3'-phosphate
  modified_base 6: mod_base = OTHER; note = 2'-O-methyladenosine-3'-phosphate
  modified_base 7: mod_base = OTHER; note = 2'-fluoroguanosine-3'-phosphate
  modified_base 8: mod_base = OTHER; note = 2'-O-methyladenosine-3'-phosphate
  modified_base 9: mod_base = OTHER; note = 2'-fluorocytidine-3'-phosphate
  modified_base 10: mod_base = OTHER; note = 2'-fluoroadenosine-3'-phosphate
  modified_base 11: mod_base = OTHER; note = 2'-fluorouridine-3'-phosphate
  modified_base 12: mod_base = OTHER; note = 2'-O-methylguanosine-3'-phosphate
  modified_base 13: mod_base = OTHER; note = 2'-O-methyladenosine-3'-phosphate
  modified_base 14: mod_base = OTHER; note = 2'-O-methylguanosine-3'-phosphate
  modified_base 15: mod_base = OTHER; note = 2'-O-methylcytidine-3'-phosphate
  modified_base 16: mod_base = OTHER; note = 2'-O-methyluridine-3'-phosphate
  modified_base 17: mod_base = OTHER; note = 2'-O-methylguanosine-3'-phosphate
  modified_base 18: mod_base = OTHER; note = 2'-O-methyluridine-3'-phosphate
  modified_base 19: mod_base = OTHER; note = 2'-O-methylguanosine-3'-phosphate
  modified_base 20: mod_base = OTHER; note = 2'-O-methyladenosine-3'-phosphate
  modified_base 21: mod_base = OTHER; note = 2'-O-methyluridine-3'-phosphate N-[tris(GalNAc-alkyl)-amidodecanoyl)]-4-hydroxyprolinol (Hyp-(GalNAc-alkyl)3)
tagccagacatgagctgtgat

SEQ ID NO: 398 - RNA, 21 nt, synthetic construct
  source 1..21: mol_type = other RNA
  modified_base 1: mod_base = OTHER; note = 2'-O-methylguanosine-3'-phosphorothioate
  modified_base 2: mod_base = OTHER; note = 2'-O-methyladenosine-3'-phosphorothioate
  modified_base 3: mod_base = OTHER; note = 2'-O-methylguanosine-3'-phosphate
  modified_base 4: mod_base = OTHER; note = 2'-O-methylguanosine-3'-phosphate
  modified_base 5: mod_base = OTHER; note = 2'-O-methylguanosine-3'-phosphate
  modified_base 6: mod_base = OTHER; note = 2'-O-methyluridine-3'-phosphate
  modified_base 7: mod_base = OTHER; note = 2'-fluorocytidine-3'-phosphate
  modified_base 8: mod_base = OTHER; note = 2'-O-methyladenosine-3'-phosphate
  modified_base 9: mod_base = OTHER; note = 2'-fluoroadenosine-3'-phosphate
  modified_base 10: mod_base = OTHER; note = 2'-fluoroguanosine-3'-phosphate
  modified_base 11: mod_base = OTHER; note = 2'-fluorocytidine-3'-phosphate
  modified_base 12: mod_base = OTHER; note = 2'-O-methyladenosine-3'-phosphate
  modified_base 13: mod_base = OTHER; note = 2'-O-methylcytidine-3'-phosphate
  modified_base 14: mod_base = OTHER; note = 2'-O-methyladenosine-3'-phosphate
  modified_base 15: mod_base = OTHER; note = 2'-O-methylguanosine-3'-phosphate
  modified_base 16: mod_base = OTHER; note = 2'-O-methylcytidine-3'-phosphate
  modified_base 17: mod_base = OTHER; note = 2'-O-methyluridine-3'-phosphate
  modified_base 18: mod_base = OTHER; note = 2'-O-methyladenosine-3'-phosphate
  modified_base 19: mod_base = OTHER; note = 2'-O-methyluridine-3'-phosphate
  modified_base 20: mod_base = OTHER; note = 2'-O-methylcytidine-3'-phosphate
  modified_base 21: mod_base = OTHER; note = 2'-O-methyluridine-3'-phosphate N-[tris(GalNAc-alkyl)-amidodecanoyl)]-4-hydroxyprolinol (Hyp-(GalNAc-alkyl)3)
gagggtcaagcacagctatct

SEQ ID NO: 399 - RNA, 21 nt, synthetic construct
  source 1..21: mol_type = other RNA
  modified_base 1: mod_base = OTHER; note = 2'-O-methyladenosine-3'-phosphorothioate
  modified_base 2: mod_base = OTHER; note = 2'-O-methyluridine-3'-phosphorothioate
  modified_base 3: mod_base = OTHER; note = 2'-O-methylcytidine-3'-phosphate
  modified_base 4: mod_base = OTHER; note = 2'-O-methylcytidine-3'-phosphate
  modified_base 5: mod_base = OTHER; note = 2'-O-methyladenosine-3'-phosphate
  modified_base 6: mod_base = OTHER; note = 2'-O-methyluridine-3'-phosphate
  modified_base 7: mod_base = OTHER; note = 2'-fluorocytidine-3'-phosphate
  modified_base 8: mod_base = OTHER; note = 2'-O-methyladenosine-3'-phosphate
  modified_base 9: mod_base = OTHER; note = 2'-fluoroguanosine-3'-phosphate
  modified_base 10: mod_base = OTHER; note = 2'-fluoroadenosine-3'-phosphate
  modified_base 11: mod_base = OTHER; note = 2'-fluorouridine-3'-phosphate
  modified_base 12: mod_base = OTHER; note = 2'-O-methylguanosine-3'-phosphate
  modified_base 13: mod_base = OTHER; note = 2'-O-methyladenosine-3'-phosphate
  modified_base 14: mod_base = OTHER; note = 2'-O-methyluridine-3'-phosphate
  modified_base 15: mod_base = OTHER; note = 2'-O-methylcytidine-3'-phosphate
  modified_base 16: mod_base = OTHER; note = 2'-O-methyluridine-3'-phosphate
  modified_base 17: mod_base = OTHER; note = 2'-O-methyladenosine-3'-phosphate
  modified_base 18: mod_base = OTHER; note = 2'-O-methylcytidine-3'-phosphate
  modified_base 19: mod_base = OTHER; note = 2'-O-methyluridine-3'-phosphate
  modified_base 20: mod_base = OTHER; note = 2'-O-methyluridine-3'-phosphate
  modified_base 21: mod_base = OTHER; note = 2'-O-methyluridine-3'-phosphate N-[tris(GalNAc-alkyl)-amidodecanoyl)]-4-hydroxyprolinol (Hyp-(GalNAc-alkyl)3)
atccatcagatgatctacttt

SEQ ID NO: 400 - RNA, 21 nt, synthetic construct
  source 1..21: mol_type = other RNA
  modified_base 1: mod_base = OTHER; note = 2'-O-methylguanosine-3'-phosphorothioate
  modified_base 2: mod_base = OTHER; note = 2'-O-methyladenosine-3'-phosphorothioate
  modified_base 3: mod_base = OTHER; note = 2'-O-methyluridine-3'-phosphate
  modified_base 4: mod_base = OTHER; note = 2'-O-methylcytidine-3'-phosphate
  modified_base 5: mod_base = OTHER; note = 2'-O-methyluridine-3'-phosphate
  modified_base 6: mod_base = OTHER; note = 2'-O-methyladenosine-3'-phosphate
  modified_base 7: mod_base = OTHER; note = 2'-fluorocytidine-3'-phosphate
  modified_base 8: mod_base = OTHER; note = 2'-O-methyluridine-3'-phosphate
  modified_base 9: mod_base = OTHER; note = 2'-fluorouridine-3'-phosphate
  modified_base 10: mod_base = OTHER; note = 2'-fluorouridine-3'-phosphate
  modified_base 11: mod_base = OTHER; note = 2'-fluorocytidine-3'-phosphate
  modified_base 12: mod_base = OTHER; note = 2'-O-methyladenosine-3'-phosphate
  modified_base 13: mod_base = OTHER; note = 2'-O-methylguanosine-3'-phosphate
  modified_base 14: mod_base = OTHER; note = 2'-O-methylcytidine-3'-phosphate
  modified_base 15: mod_base = OTHER; note = 2'-O-methylcytidine-3'-phosphate
  modified_base 16: mod_base = OTHER; note = 2'-O-methyluridine-3'-phosphate
  modified_base 17: mod_base = OTHER; note = 2'-O-methyluridine-3'-phosphate
  modified_base 18: mod_base = OTHER; note = 2'-O-methylcytidine-3'-phosphate
  modified_base 19: mod_base = OTHER; note = 2'-O-methylcytidine-3'-phosphate
  modified_base 20: mod_base = OTHER; note = 2'-O-methyluridine-3'-phosphate
  modified_base 21: mod_base = OTHER; note = 2'-O-methyluridine-3'-phosphate N-[tris(GalNAc-alkyl)-amidodecanoyl)]-4-hydroxyprolinol (Hyp-(GalNAc-alkyl)3)
gatctactttcagccttcctt

SEQ ID NO: 401 - RNA, 21 nt, synthetic construct
  source 1..21: mol_type = other RNA
  modified_base 1: mod_base = OTHER; note = 2'-O-methylguanosine-3'-phosphorothioate
  modified_base 2: mod_base = OTHER; note = 2'-O-methyladenosine-3'-phosphorothioate
  modified_base 3: mod_base = OTHER; note = 2'-O-methylguanosine-3'-phosphate
  modified_base 4: mod_base = OTHER; note = 2'-O-methyluridine-3'-phosphate
  modified_base 5: mod_base = OTHER; note = 2'-O-methylcytidine-3'-phosphate
  modified_base 6: mod_base = OTHER; note = 2'-O-methylcytidine-3'-phosphate
  modified_base 7: mod_base = OTHER; note = 2'-fluorocytidine-3'-phosphate
  modified_base 8: mod_base = OTHER; note = 2'-O-methyladenosine-3'-phosphate
  modified_base 9: mod_base = OTHER; note = 2'-fluoroguanosine-3'-phosphate
  modified_base 10: mod_base = OTHER; note = 2'-fluoroadenosine-3'-phosphate
  modified_base 11: mod_base = OTHER; note = 2'-fluorocytidine-3'-phosphate
  modified_base 12: mod_base = OTHER; note = 2'-O-methyladenosine-3'-phosphate
  modified_base 13: mod_base = OTHER; note = 2'-O-methyladenosine-3'-phosphate
  modified_base 14: mod_base = OTHER; note = 2'-O-methyluridine-3'-phosphate
  modified_base 15: mod_base = OTHER; note = 2'-O-methyladenosine-3'-phosphate
  modified_base 16: mod_base = OTHER; note = 2'-O-methylguanosine-3'-phosphate
  modified_base 17: mod_base = OTHER; note = 2'-O-methyladenosine-3'-phosphate
  modified_base 18: mod_base = OTHER; note = 2'-O-methyladenosine-3'-phosphate
  modified_base 19: mod_base = OTHER; note = 2'-O-methylguanosine-3'-phosphate
  modified_base 20: mod_base = OTHER; note = 2'-O-methyladenosine-3'-phosphate
  modified_base 21: mod_base = OTHER; note = 2'-O-methyluridine-3'-phosphate N-[tris(GalNAc-alkyl)-amidodecanoyl)]-4-hydroxyprolinol (Hyp-(GalNAc-alkyl)3)
gagtcccagacaatagaagat

SEQ ID NO: 402 - RNA, 21 nt, synthetic construct
  source 1..21: mol_type = other RNA
  modified_base 1: mod_base = OTHER; note = 2'-O-methyladenosine-3'-phosphorothioate
  modified_base 2: mod_base = OTHER; note = 2'-O-methyluridine-3'-phosphorothioate
  modified_base 3: mod_base = OTHER; note = 2'-O-methyladenosine-3'-phosphate
  modified_base 4: mod_base = OTHER; note = 2'-O-methylguanosine-3'-phosphate
  modified_base 5: mod_base = OTHER; note = 2'-O-methyladenosine-3'-phosphate
  modified_base 6: mod_base = OTHER; note = 2'-O-methyladenosine-3'-phosphate
  modified_base 7: mod_base = OTHER; note = 2'-fluoroguanosine-3'-phosphate
  modified_base 8: mod_base = OTHER; note = 2'-O-methyladenosine-3'-phosphate
  modified_base 9: mod_base = OTHER; note = 2'-fluorocytidine-3'-phosphate
  modified_base 10: mod_base = OTHER; note = 2'-fluoroadenosine-3'-phosphate
  modified_base 11: mod_base = OTHER; note = 2'-fluoroguanosine-3'-phosphate
  modified_base 12: mod_base = OTHER; note = 2'-O-methylguanosine-3'-phosphate
  modified_base 13: mod_base = OTHER; note = 2'-O-methyluridine-3'-phosphate
  modified_base 14: mod_base = OTHER; note = 2'-O-methylguanosine-3'-phosphate
  modified_base 15: mod_base = OTHER; note = 2'-O-methylguanosine-3'-phosphate
  modified_base 16: mod_base = OTHER; note = 2'-O-methylcytidine-3'-phosphate
  modified_base 17: mod_base = OTHER; note = 2'-O-methyluridine-3'-phosphate
  modified_base 18: mod_base = OTHER; note = 2'-O-methylguanosine-3'-phosphate
  modified_base 19: mod_base = OTHER; note = 2'-O-methyluridine-3'-phosphate
  modified_base 20: mod_base = OTHER; note = 2'-O-methyladenosine-3'-phosphate
  modified_base 21: mod_base = OTHER; note = 2'-O-methyluridine-3'-phosphate N-[tris(GalNAc-alkyl)-amidodecanoyl)]-4-hydroxyprolinol (Hyp-(GalNAc-alkyl)3)
atagaagacaggtggctgtat

SEQ ID NO: 403 - RNA, 21 nt, synthetic construct
  source 1..21: mol_type = other RNA
  modified_base 1: mod_base = OTHER; note = 2'-O-methylguanosine-3'-phosphorothioate
  modified_base 2: mod_base = OTHER; note = 2'-O-methyluridine-3'-phosphorothioate
  modified_base 3: mod_base = OTHER; note = 2'-O-methylguanosine-3'-phosphate
  modified_base 4: mod_base = OTHER; note = 2'-O-methylguanosine-3'-phosphate
  modified_base 5: mod_base = OTHER; note = 2'-O-methylcytidine-3'-phosphate
  modified_base 6: mod_base = OTHER; note = 2'-O-methyluridine-3'-phosphate
  modified_base 7: mod_base = OTHER; note = 2'-fluoroguanosine-3'-phosphate
  modified_base 8: mod_base = OTHER; note = 2'-O-methyluridine-3'-phosphate
  modified_base 9: mod_base = OTHER; note = 2'-fluoroadenosine-3'-phosphate
  modified_base 10: mod_base = OTHER; note = 2'-fluorocytidine-3'-phosphate
  modified_base 11: mod_base = OTHER; note = 2'-fluorocytidine-3'-phosphate
  modified_base 12: mod_base = OTHER; note = 2'-O-methylcytidine-3'-phosphate
  modified_base 13: mod_base = OTHER; note = 2'-O-methyluridine-3'-phosphate
  modified_base 14: mod_base = OTHER; note = 2'-O-methyluridine-3'-phosphate
  modified_base 15: mod_base = OTHER; note = 2'-O-methylguanosine-3'-phosphate
  modified_base 16: mod_base = OTHER; note = 2'-O-methylguanosine-3'-phosphate
  modified_base 17: mod_base = OTHER; note = 2'-O-methylcytidine-3'-phosphate
  modified_base 18: mod_base = OTHER; note = 2'-O-methylcytidine-3'-phosphate
  modified_base 19: mod_base = OTHER; note = 2'-O-methyladenosine-3'-phosphate
  modified_base 20: mod_base = OTHER; note = 2'-O-methyladenosine-3'-phosphate
  modified_base 21: mod_base = OTHER; note = 2'-O-methyluridine-3'-phosphate N-[tris(GalNAc-alkyl)-amidodecanoyl)]-4-hydroxyprolinol (Hyp-(GalNAc-alkyl)3)
gtggctgtacccttggccaat

SEQ ID NO: 404 - RNA, 21 nt, synthetic construct
  source 1..21: mol_type = other RNA
  modified_base 1: mod_base = OTHER; note = 2'-O-methylcytidine-3'-phosphorothioate
  modified_base 2: mod_base = OTHER; note = 2'-O-methyluridine-3'-phosphorothioate
  modified_base 3: mod_base = OTHER; note = 2'-O-methyluridine-3'-phosphate
  modified_base 4: mod_base = OTHER; note = 2'-O-methylguanosine-3'-phosphate
  modified_base 5: mod_base = OTHER; note = 2'-O-methylguanosine-3'-phosphate
  modified_base 6: mod_base = OTHER; note = 2'-O-methylcytidine-3'-phosphate
  modified_base 7: mod_base = OTHER; note = 2'-fluorocytidine-3'-phosphate
  modified_base 8: mod_base = OTHER; note = 2'-O-methyladenosine-3'-phosphate
  modified_base 9: mod_base = OTHER; note = 2'-fluoroadenosine-3'-phosphate
  modified_base 10: mod_base = OTHER; note = 2'-fluoroguanosine-3'-phosphate
  modified_base 11: mod_base = OTHER; note = 2'-fluoroguanosine-3'-phosphate
  modified_base 12: mod_base = OTHER; note = 2'-O-methylguanosine-3'-phosphate
  modified_base 13: mod_base = OTHER; note = 2'-O-methyluridine-3'-phosphate
  modified_base 14: mod_base = OTHER; note = 2'-O-methyladenosine-3'-phosphate
  modified_base 15: mod_base = OTHER; note = 2'-O-methylguanosine-3'-phosphate
  modified_base 16: mod_base = OTHER; note = 2'-O-methylguanosine-3'-phosphate
  modified_base 17: mod_base = OTHER; note = 2'-O-methyluridine-3'-phosphate
  modified_base 18: mod_base = OTHER; note = 2'-O-methylguanosine-3'-phosphate
  modified_base 19: mod_base = OTHER; note = 2'-O-methyluridine-3'-phosphate
  modified_base 20: mod_base = OTHER; note = 2'-O-methylguanosine-3'-phosphate
  modified_base 21: mod_base = OTHER; note = 2'-O-methyluridine-3'-phosphate N-[tris(GalNAc-alkyl)-amidodecanoyl)]-4-hydroxyprolinol (Hyp-(GalNAc-alkyl)3)
cttggccaagggtaggtgtgt

SEQ ID NO: 405 - RNA, 21 nt, synthetic construct
  source 1..21: mol_type = other RNA
  modified_base 1: mod_base = OTHER; note = 2'-O-methylguanosine-3'-phosphorothioate
  modified_base 2: mod_base = OTHER; note = 2'-O-methyluridine-3'-phosphorothioate
  modified_base 3: mod_base = OTHER; note = 2'-O-methylguanosine-3'-phosphate
  modified_base 4: mod_base = OTHER; note = 2'-O-methylguanosine-3'-phosphate
  modified_base 5: mod_base = OTHER; note = 2'-O-methylcytidine-3'-phosphate
  modified_base 6: mod_base = OTHER; note = 2'-O-methyladenosine-3'-phosphate
  modified_base 7: mod_base = OTHER; note = 2'-fluoroguanosine-3'-phosphate
  modified_base 8: mod_base = OTHER; note = 2'-O-methyluridine-3'-phosphate
  modified_base 9: mod_base = OTHER; note = 2'-fluoroguanosine-3'-phosphate
  modified_base 10: mod_base = OTHER; note = 2'-fluoroguanosine-3'-phosphate
  modified_base 11: mod_base = OTHER; note = 2'-fluorouridine-3'-phosphate
  modified_base 12: mod_base = OTHER; note = 2'-O-methylguanosine-3'-phosphate
  modified_base 13: mod_base = OTHER; note = 2'-O-methyluridine-3'-phosphate
  modified_base 14: mod_base = OTHER; note = 2'-O-methylcytidine-3'-phosphate
  modified_base 15: mod_base = OTHER; note = 2'-O-methyluridine-3'-phosphate
  modified_base 16: mod_base = OTHER; note = 2'-O-methylguanosine-3'-phosphate
  modified_base 17: mod_base = OTHER; note = 2'-O-methylcytidine-3'-phosphate
  modified_base 18: mod_base = OTHER; note = 2'-O-methyluridine-3'-phosphate
  modified_base 19: mod_base = OTHER; note = 2'-O-methylguanosine-3'-phosphate
  modified_base 20: mod_base = OTHER; note = 2'-O-methyluridine-3'-phosphate
  modified_base 21: mod_base = OTHER; note = 2'-O-methyluridine-3'-phosphate N-[tris(GalNAc-alkyl)-amidodecanoyl)]-4-hydroxyprolinol (Hyp-(GalNAc-alkyl)3)
gtggcagtggtgtctgctgtt

SEQ ID NO: 406 - RNA, 21 nt, synthetic construct
  source 1..21: mol_type = other RNA
  modified_base 1: mod_base = OTHER; note = 2'-O-methyluridine-3'-phosphorothioate
  modified_base 2: mod_base = OTHER; note = 2'-O-methylguanosine-3'-phosphorothioate
  modified_base 3: mod_base = OTHER; note = 2'-O-methylcytidine-3'-phosphate
  modified_base 4: mod_base = OTHER; note = 2'-O-methyluridine-3'-phosphate
  modified_base 5: mod_base = OTHER; note = 2'-O-methylguanosine-3'-phosphate
  modified_base 6: mod_base = OTHER; note = 2'-O-methyluridine-3'-phosphate
  modified_base 7: mod_base = OTHER; note = 2'-fluorocytidine-3'-phosphate
  modified_base 8: mod_base = OTHER; note = 2'-O-methyladenosine-3'-phosphate
  modified_base 9: mod_base = OTHER; note = 2'-fluorocytidine-3'-phosphate
  modified_base 10: mod_base = OTHER; note = 2'-fluorouridine-3'-phosphate
  modified_base 11: mod_base = OTHER; note = 2'-fluoroguanosine-3'-phosphate
  modified_base 12: mod_base = OTHER; note = 2'-O-methyluridine-3'-phosphate
  modified_base 13: mod_base = OTHER; note = 2'-O-methylguanosine-3'-phosphate
  modified_base 14: mod_base = OTHER; note = 2'-O-methylcytidine-3'-phosphate
  modified_base 15: mod_base = OTHER; note = 2'-O-methylcytidine-3'-phosphate
  modified_base 16: mod_base = OTHER; note = 2'-O-methylcytidine-3'-phosphate
  modified_base 17: mod_base = OTHER; note = 2'-O-methyluridine-3'-phosphate
  modified_base 18: mod_base = OTHER; note = 2'-O-methylcytidine-3'-phosphate
  modified_base 19: mod_base = OTHER; note = 2'-O-methyladenosine-3'-phosphate
  modified_base 20: mod_base = OTHER; note = 2'-O-methyluridine-3'-phosphate
  modified_base 21: mod_base = OTHER; note = 2'-O-methyluridine-3'-phosphate N-[tris(GalNAc-alkyl)-amidodecanoyl)]-4-hydroxyprolinol (Hyp-(GalNAc-alkyl)3)
tgctgtcactgtgccctcatt

SEQ ID NO: 407 - RNA, 21 nt, synthetic construct
  source 1..21: mol_type = other RNA
  modified_base 1: mod_base = OTHER; note = 2'-O-methyladenosine-3'-phosphorothioate
  modified_base 2: mod_base = OTHER; note = 2'-O-methylguanosine-3'-phosphorothioate
  modified_base 3: mod_base = OTHER; note = 2'-O-methylcytidine-3'-phosphate
  modified_base 4: mod_base = OTHER; note = 2'-O-methyladenosine-3'-phosphate
  modified_base 5: mod_base = OTHER; note = 2'-O-methyladenosine-3'-phosphate
  modified_base 6: mod_base = OTHER; note = 2'-O-methyluridine-3'-phosphate
  modified_base 7: mod_base = OTHER; note = 2'-fluorocytidine-3'-phosphate
  modified_base 8: mod_base = OTHER; note = 2'-O-methyladenosine-3'-phosphate
  modified_base 9: mod_base = OTHER; note = 2'-fluoroguanosine-3'-phosphate
  modified_base 10: mod_base = OTHER; note = 2'-fluoroadenosine-3'-phosphate
  modified_base 11: mod_base = OTHER; note = 2'-fluorocytidine-3'-phosphate
  modified_base 12: mod_base = OTHER; note = 2'-O-methyluridine-3'-phosphate
  modified_base 13: mod_base = OTHER; note = 2'-O-methylcytidine-3'-phosphate
  modified_base 14: mod_base = OTHER; note = 2'-O-methyladenosine-3'-phosphate
  modified_base 15: mod_base = OTHER; note = 2'-O-methyladenosine-3'-phosphate
  modified_base 16: mod_base = OTHER; note = 2'-O-methylcytidine-3'-phosphate
  modified_base 17: mod_base = OTHER; note = 2'-O-methyladenosine-3'-phosphate
  modified_base 18: mod_base = OTHER; note = 2'-O-methylguanosine-3'-phosphate
  modified_base 19: mod_base = OTHER; note = 2'-O-methyladenosine-3'-phosphate
  modified_base 20: mod_base = OTHER; note = 2'-O-methylcytidine-3'-phosphate
  modified_base 21: mod_base = OTHER; note = 2'-O-methyluridine-3'-phosphate N-[tris(GalNAc-alkyl)-amidodecanoyl)]-4-hydroxyprolinol (Hyp-(GalNAc-alkyl)3)
agcaatcagactcaacagact

SEQ ID NO: 408 - RNA, 21 nt, synthetic construct
  source 1..21: mol_type = other RNA
  modified_base 1: mod_base = OTHER; note = 2'-O-methyladenosine-3'-phosphorothioate
  modified_base 2: mod_base = OTHER; note = 2'-O-methylcytidine-3'-phosphorothioate
  modified_base 3: mod_base = OTHER; note = 2'-O-methylguanosine-3'-phosphate
  modified_base 4: mod_base = OTHER; note = 2'-O-methylguanosine-3'-phosphate
  modified_base 5: mod_base = OTHER; note = 2'-O-methyladenosine-3'-phosphate
  modified_base 6: mod_base = OTHER; note = 2'-O-methylguanosine-3'-phosphate
  modified_base 7: mod_base = OTHER; note = 2'-fluorocytidine-3'-phosphate
  modified_base 8: mod_base = OTHER; note = 2'-O-methyladenosine-3'-phosphate
  modified_base 9: mod_base = OTHER; note = 2'-fluoroadenosine-3'-phosphate
  modified_base 10: mod_base = OTHER; note = 2'-fluorocytidine-3'-phosphate
  modified_base 11: mod_base = OTHER; note = 2'-fluorouridine-3'-phosphate
  modified_base 12: mod_base = OTHER; note = 2'-O-methylguanosine-3'-phosphate
  modified_base 13: mod_base = OTHER; note = 2'-O-methylcytidine-3'-phosphate
  modified_base 14: mod_base = OTHER; note = 2'-O-methylcytidine-3'-phosphate
  modified_base 15: mod_base = OTHER; note = 2'-O-methyladenosine-3'-phosphate
  modified_base 16: mod_base = OTHER; note = 2'-O-methyluridine-3'-phosphate
  modified_base 17: mod_base = OTHER; note = 2'-O-methylcytidine-3'-phosphate
  modified_base 18: mod_base = OTHER; note = 2'-O-methylcytidine-3'-phosphate
  modified_base 19: mod_base = OTHER; note = 2'-O-methylguanosine-3'-phosphate
  modified_base 20: mod_base = OTHER; note = 2'-O-methyladenosine-3'-phosphate
  modified_base 21: mod_base = OTHER; note = 2'-O-methyluridine-3'-phosphate N-[tris(GalNAc-alkyl)-amidodecanoyl)]-4-hydroxyprolinol (Hyp-(GalNAc-alkyl)3)
acggagcaactgccatccgat

SEQ ID NO: 409 - RNA, 21 nt, synthetic construct
  source 1..21: mol_type = other RNA
  modified_base 1: mod_base = OTHER; note = 2'-O-methylguanosine-3'-phosphorothioate
  modified_base 2: mod_base = OTHER; note = 2'-O-methylcytidine-3'-phosphorothioate
  modified_base 3: mod_base = OTHER; note = 2'-O-methyluridine-3'-phosphate
  modified_base 4: mod_base = OTHER; note = 2'-O-methylcytidine-3'-phosphate
  modified_base 5: mod_base = OTHER; note = 2'-O-methylcytidine-3'-phosphate
  modified_base 6: mod_base = OTHER; note = 2'-O-methyluridine-3'-phosphate
  modified_base 7: mod_base = OTHER; note = 2'-fluoroguanosine-3'-phosphate
  modified_base 8: mod_base = OTHER; note = 2'-O-methyladenosine-3'-phosphate
  modified_base 9: mod_base = OTHER; note = 2'-fluoroadenosine-3'-phosphate
  modified_base 10: mod_base = OTHER; note = 2'-fluorocytidine-3'-phosphate
  modified_base 11: mod_base = OTHER; note = 2'-fluorocytidine-3'-phosphate
  modified_base 12: mod_base = OTHER; note = 2'-O-methyladenosine-3'-phosphate
  modified_base 13: mod_base = OTHER; note = 2'-O-methylguanosine-3'-phosphate
  modified_base 14: mod_base = OTHER; note = 2'-O-methylguanosine-3'-phosphate
  modified_base 15: mod_base = OTHER; note = 2'-O-methylguanosine-3'-phosphate
  modified_base 16: mod_base = OTHER; note = 2'-O-methylcytidine-3'-phosphate
  modified_base 17: mod_base = OTHER; note = 2'-O-methylcytidine-3'-phosphate
  modified_base 18: mod_base = OTHER; note = 2'-O-methyladenosine-3'-phosphate
  modified_base 19: mod_base = OTHER; note = 2'-O-methyluridine-3'-phosphate
  modified_base 20: mod_base = OTHER; note = 2'-O-methyluridine-3'-phosphate
  modified_base 21: mod_base = OTHER; note = 2'-O-methyluridine-3'-phosphate N-[tris(GalNAc-alkyl)-amidodecanoyl)]-4-hydroxyprolinol (Hyp-(GalNAc-alkyl)3)
gctcctgaaccagggccattt

SEQ ID NO: 410 - RNA, 21 nt, synthetic construct
  source 1..21: mol_type = other RNA
  modified_base 1: mod_base = OTHER; note = 2'-O-methyladenosine-3'-phosphorothioate
  modified_base 2: mod_base = OTHER; note = 2'-O-methylguanosine-3'-phosphorothioate
  modified_base 3: mod_base = OTHER; note = 2'-O-methylguanosine-3'-phosphate
  modified_base 4: mod_base = OTHER; note = 2'-O-methylguanosine-3'-phosphate
  modified_base 5: mod_base = OTHER; note = 2'-O-methylcytidine-3'-phosphate
  modified_base 6: mod_base = OTHER; note = 2'-O-methylcytidine-3'-phosphate
  modified_base 7: mod_base = OTHER; note = 2'-fluoroadenosine-3'-phosphate
  modified_base 8: mod_base = OTHER; note = 2'-O-methyluridine-3'-phosphate
  modified_base 9: mod_base = OTHER; note = 2'-fluorouridine-3'-phosphate
  modified_base 10: mod_base = OTHER; note = 2'-fluorocytidine-3'-phosphate
  modified_base 11: mod_base = OTHER; note = 2'-fluoroadenosine-3'-phosphate
  modified_base 12: mod_base = OTHER; note = 2'-O-methylcytidine-3'-phosphate
  modified_base 13: mod_base = OTHER; note = 2'-O-methylcytidine-3'-phosphate
  modified_base 14: mod_base = OTHER; note = 2'-O-methyladenosine-3'-phosphate
  modified_base 15: mod_base = OTHER; note = 2'-O-methylguanosine-3'-phosphate
  modified_base 16: mod_base = OTHER; note = 2'-O-methylguanosine-3'-phosphate
  modified_base 17: mod_base = OTHER; note = 2'-O-methyladenosine-3'-phosphate
  modified_base 18: mod_base = OTHER; note = 2'-O-methylguanosine-3'-phosphate
  modified_base 19: mod_base = OTHER; note = 2'-O-methylcytidine-3'-phosphate
  modified_base 20: mod_base = OTHER; note = 2'-O-methyladenosine-3'-phosphate
  modified_base 21: mod_base = OTHER; note = 2'-O-methyluridine-3'-phosphate N-[tris(GalNAc-alkyl)-amidodecanoyl)]-4-hydroxyprolinol (Hyp-(GalNAc-alkyl)3)
agggccattcaccaggagcat

SEQ ID NO: 411 - RNA, 21 nt, synthetic construct
  source 1..21: mol_type = other RNA
  modified_base 1: mod_base = OTHER; note = 2'-O-methylguanosine-3'-phosphorothioate
  modified_base 2: mod_base = OTHER; note = 2'-O-methylcytidine-3'-phosphorothioate
  modified_base 3: mod_base = OTHER; note = 2'-O-methyluridine-3'-phosphate
  modified_base 4: mod_base = OTHER; note = 2'-O-methylcytidine-3'-phosphate
  modified_base 5: mod_base = OTHER; note = 2'-O-methylcytidine-3'-phosphate
  modified_base 6: mod_base = OTHER; note = 2'-O-methylcytidine-3'-phosphate
  modified_base 7: mod_base = OTHER; note = 2'-fluorouridine-3'-phosphate
  modified_base 8: mod_base = OTHER; note = 2'-O-methylguanosine-3'-phosphate
  modified_base 9: mod_base = OTHER; note = 2'-fluoroadenosine-3'-phosphate
  modified_base 10: mod_base = OTHER; note = 2'-fluorouridine-3'-phosphate
  modified_base 11: mod_base = OTHER; note = 2'-fluoroguanosine-3'-phosphate
  modified_base 12: mod_base = OTHER; note = 2'-O-methyluridine-3'-phosphate
  modified_base 13: mod_base = OTHER; note = 2'-O-methylcytidine-3'-phosphate
  modified_base 14: mod_base = OTHER; note = 2'-O-methylcytidine-3'-phosphate
  modified_base 15: mod_base = OTHER; note = 2'-O-methyladenosine-3'-phosphate
  modified_base 16: mod_base = OTHER; note = 2'-O-methylguanosine-3'-phosphate
  modified_base 17: mod_base = OTHER; note = 2'-O-methylcytidine-3'-phosphate
  modified_base 18: mod_base = OTHER; note = 2'-O-methyluridine-3'-phosphate
  modified_base 19: mod_base = OTHER; note = 2'-O-methylcytidine-3'-phosphate
  modified_base 20: mod_base = OTHER; note = 2'-O-methyluridine-3'-phosphate
  modified_base 21: mod_base = OTHER; note = 2'-O-methyluridine-3'-phosphate N-[tris(GalNAc-alkyl)-amidodecanoyl)]-4-hydroxyprolinol (Hyp-(GalNAc-alkyl)3)
gctccctgatgtccagctctt

SEQ ID NO: 412 - RNA, 21 nt, synthetic construct
  source 1..21: mol_type = other RNA
  modified_base 1: mod_base = OTHER; note = 2'-O-methylcytidine-3'-phosphorothioate
  modified_base 2: mod_base = OTHER; note = 2'-O-methyladenosine-3'-phosphorothioate
  modified_base 3: mod_base = OTHER; note = 2'-O-methylguanosine-3'-phosphate
  modified_base 4: mod_base = OTHER; note = 2'-O-methylcytidine-3'-phosphate
  modified_base 5: mod_base = OTHER; note = 2'-O-methyluridine-3'-phosphate
  modified_base 6: mod_base = OTHER; note = 2'-O-methylcytidine-3'-phosphate
  modified_base 7: mod_base = OTHER; note = 2'-fluorouridine-3'-phosphate
  modified_base 8: mod_base = OTHER; note = 2'-O-methylguanosine-3'-phosphate
  modified_base 9: mod_base = OTHER; note = 2'-fluoroguanosine-3'-phosphate
  modified_base 10: mod_base = OTHER; note = 2'-fluorocytidine-3'-phosphate
  modified_base 11: mod_base = OTHER; note = 2'-fluorouridine-3'-phosphate
  modified_base 12: mod_base = OTHER; note = 2'-O-methylguanosine-3'-phosphate
  modified_base 13: mod_base = OTHER; note = 2'-O-methylguanosine-3'-phosphate
  modified_base 14: mod_base = OTHER; note = 2'-O-methyluridine-3'-phosphate
  modified_base 15: mod_base = OTHER; note = 2'-O-methylguanosine-3'-phosphate
  modified_base 16: mod_base = OTHER; note = 2'-O-methylcytidine-3'-phosphate
  modified_base 17: mod_base = OTHER; note = 2'-O-methyluridine-3'-phosphate
  modified_base 18: mod_base = OTHER; note = 2'-O-methylguanosine-3'-phosphate
  modified_base 19: mod_base = OTHER; note = 2'-O-methylcytidine-3'-phosphate
  modified_base 20: mod_base = OTHER; note = 2'-O-methyluridine-3'-phosphate
  modified_base 21: mod_base = OTHER; note = 2'-O-methyluridine-3'-phosphate N-[tris(GalNAc-alkyl)-amidodecanoyl)]-4-hydroxyprolinol (Hyp-(GalNAc-alkyl)3)
cagctctggctggtgctgctt

SEQ ID NO: 413 - RNA, 21 nt, synthetic construct
  source 1..21: mol_type = other RNA
  modified_base 1: mod_base = OTHER; note = 2'-O-methyluridine-3'-phosphorothioate
  modified_base 2: mod_base = OTHER; note = 2'-O-methylguanosine-3'-phosphorothioate
  modified_base 3: mod_base = OTHER; note = 2'-O-methylguanosine-3'-phosphate
  modified_base 4: mod_base = OTHER; note = 2'-O-methylguanosine-3'-phosphate
  modified_base 5: mod_base = OTHER; note = 2'-O-methylcytidine-3'-phosphate
  modified_base 6: mod_base = OTHER; note = 2'-O-methyladenosine-3'-phosphate
  modified_base 7: mod_base = OTHER; note = 2'-fluorocytidine-3'-phosphate
  modified_base 8: mod_base = OTHER; note = 2'-O-methyluridine-3'-phosphate
  modified_base 9: mod_base = OTHER; note = 2'-fluoroguanosine-3'-phosphate
  modified_base 10: mod_base = OTHER; note = 2'-fluoroguanosine-3'-phosphate
  modified_base 11: mod_base = OTHER; note = 2'-fluorouridine-3'-phosphate
  modified_base 12: mod_base = OTHER; note = 2'-O-methylguanosine-3'-phosphate
  modified_base 13: mod_base = OTHER; note = 2'-O-methylcytidine-3'-phosphate
  modified_base 14: mod_base = OTHER; note = 2'-O-methylguanosine-3'-phosphate
  modified_base 15: mod_base = OTHER; note = 2'-O-methyladenosine-3'-phosphate
  modified_base 16: mod_base = OTHER; note = 2'-O-methylguanosine-3'-phosphate
  modified_base 17: mod_base = OTHER; note = 2'-O-methylcytidine-3'-phosphate
  modified_base 18: mod_base = OTHER; note = 2'-O-methyladenosine-3'-phosphate
  modified_base 19: mod_base = OTHER; note = 2'-O-methylcytidine-3'-phosphate
  modified_base 20: mod_base = OTHER; note = 2'-O-methyladenosine-3'-phosphate
  modified_base 21: mod_base = OTHER; note = 2'-O-methyluridine-3'-phosphate N-[tris(GalNAc-alkyl)-amidodecanoyl)]-4-hydroxyprolinol (Hyp-(GalNAc-alkyl)3)
tgggcactggtgcgagcacat

SEQ ID NO: 414 - RNA, 21 nt, synthetic construct
  source 1..21: mol_type = other RNA
  modified_base 1: mod_base = OTHER; note = 2'-O-methyladenosine-3'-phosphorothioate
  modified_base 2: mod_base = OTHER; note = 2'-O-methylguanosine-3'-phosphorothioate
  modified_base 3: mod_base = OTHER; note = 2'-O-methylguanosine-3'-phosphate
  modified_base 4: mod_base = OTHER; note = 2'-O-methylguanosine-3'-phosphate
  modified_base 5: mod_base = OTHER; note = 2'-O-methyluridine-3'-phosphate
  modified_base 6: mod_base = OTHER; note = 2'-O-methylcytidine-3'-phosphate
  modified_base 7: mod_base = OTHER; note = 2'-fluorouridine-3'-phosphate
  modified_base 8: mod_base = OTHER; note = 2'-O-methylguanosine-3'-phosphate
  modified_base 9: mod_base = OTHER; note = 2'-fluorouridine-3'-phosphate
  modified_base 10: mod_base = OTHER; note = 2'-fluoroguanosine-3'-phosphate
  modified_base 11: mod_base = OTHER; note = 2'-fluorouridine-3'-phosphate
  modified_base 12: mod_base = OTHER; note = 2'-O-methylguanosine-3'-phosphate
  modified_base 13: mod_base = OTHER; note = 2'-O-methyluridine-3'-phosphate
  modified_base 14: mod_base = OTHER; note = 2'-O-methylcytidine-3'-phosphate
  modified_base 15: mod_base = OTHER; note = 2'-O-methylcytidine-3'-phosphate
  modified_base 16: mod_base = OTHER; note = 2'-O-methylcytidine-3'-phosphate
  modified_base 17: mod_base = OTHER; note = 2'-O-methyluridine-3'-phosphate
  modified_base 18: mod_base = OTHER; note = 2'-O-methylcytidine-3'-phosphate
  modified_base 19: mod_base = OTHER; note = 2'-O-methylcytidine-3'-phosphate
  modified_base 20: mod_base = OTHER; note = 2'-O-methyluridine-3'-phosphate
  modified_base 21: mod_base = OTHER; note = 2'-O-methyluridine-3'-phosphate N-[tris(GalNAc-alkyl)-amidodecanoyl)]-4-hydroxyprolinol (Hyp-(GalNAc-alkyl)3)
agggtctgtgtgtccctcctt

SEQ ID NO: 415 - RNA, 21 nt, synthetic construct
  source 1..21: mol_type = other RNA
  modified_base 1: mod_base = OTHER; note = 2'-O-methylcytidine-3'-phosphorothioate
  modified_base 2: mod_base = OTHER; note = 2'-O-methyladenosine-3'-phosphorothioate
  modified_base 3: mod_base = OTHER; note = 2'-O-methyladenosine-3'-phosphate
  modified_base 4: mod_base = OTHER; note = 2'-O-methylguanosine-3'-phosphate
  modified_base 5: mod_base = OTHER; note = 2'-O-methylcytidine-3'-phosphate
  modified_base 6: mod_base = OTHER; note = 2'-O-methyladenosine-3'-phosphate
  modified_base 7: mod_base = OTHER; note = 2'-fluoroguanosine-3'-phosphate
  modified_base 8: mod_base = OTHER; note = 2'-O-methyladenosine-3'-phosphate
  modified_base 9: mod_base = OTHER; note = 2'-fluoroadenosine-3'-phosphate
  modified_base 10: mod_base = OTHER; note = 2'-fluorocytidine-3'-phosphate
  modified_base 11: mod_base = OTHER; note = 2'-fluoroguanosine-3'-phosphate
  modified_base 12: mod_base = OTHER; note = 2'-O-methyladenosine-3'-phosphate
  modified_base 13: mod_base = OTHER; note = 2'-O-methylguanosine-3'-phosphate
  modified_base 14: mod_base = OTHER; note = 2'-O-methylcytidine-3'-phosphate
  modified_base 15: mod_base = OTHER; note = 2'-O-methyluridine-3'-phosphate
  modified_base 16: mod_base = OTHER; note = 2'-O-methylcytidine-3'-phosphate
  modified_base 17: mod_base = OTHER; note = 2'-O-methyluridine-3'-phosphate
  modified_base 18: mod_base = OTHER; note = 2'-O-methylguanosine-3'-phosphate
  modified_base 19: mod_base = OTHER; note = 2'-O-methylguanosine-3'-phosphate
  modified_base 20: mod_base = OTHER; note = 2'-O-methyluridine-3'-phosphate
  modified_base 21: mod_base = OTHER; note = 2'-O-methyluridine-3'-phosphate N-[tris(GalNAc-alkyl)-amidodecanoyl)]-4-hydroxyprolinol (Hyp-(GalNAc-alkyl)3)
caagcagaacgagctctggtt

SEQ ID NO: 416 - RNA, 21 nt, synthetic construct
  source 1..21: mol_type = other RNA
  modified_base 1: mod_base = OTHER; note = 2'-O-methylcytidine-3'-phosphorothioate
  modified_base 2: mod_base = OTHER; note = 2'-O-methyluridine-3'-phosphorothioate
  modified_base 3: mod_base = OTHER; note = 2'-O-methylguanosine-3'-phosphate
  modified_base 4: mod_base = OTHER; note = 2'-O-methylguanosine-3'-phosphate
  modified_base 5: mod_base = OTHER; note = 2'-O-methyluridine-3'-phosphate
  modified_base 6: mod_base = OTHER; note = 2'-O-methylguanosine-3'-phosphate
  modified_base 7: mod_base = OTHER; note = 2'-fluorocytidine-3'-phosphate
  modified_base 8: mod_base = OTHER; note = 2'-O-methyluridine-3'-phosphate
  modified_base 9: mod_base = OTHER; note = 2'-fluoroguanosine-3'-phosphate
  modified_base 10: mod_base = OTHER; note = 2'-fluoroguanosine-3'-phosphate
  modified_base 11: mod_base = OTHER; note = 2'-fluoroadenosine-3'-phosphate
  modified_base 12: mod_base = OTHER; note = 2'-O-methylguanosine-3'-phosphate
  modified_base 13: mod_base = OTHER; note = 2'-O-methylcytidine-3'-phosphate
  modified_base 14: mod_base = OTHER; note = 2'-O-methyluridine-3'-phosphate
  modified_base 15: mod_base = OTHER; note = 2'-O-methyladenosine-3'-phosphate
  modified_base 16: mod_base = OTHER; note = 2'-O-methylguanosine-3'-phosphate
  modified_base 17: mod_base = OTHER; note = 2'-O-methylcytidine-3'-phosphate
  modified_base 18: mod_base = OTHER; note = 2'-O-methylcytidine-3'-phosphate
  modified_base 19: mod_base = OTHER; note = 2'-O-methyladenosine-3'-phosphate
  modified_base 20: mod_base = OTHER; note = 2'-O-methyladenosine-3'-phosphate
  modified_base 21: mod_base = OTHER; note = 2'-O-methyluridine-3'-phosphate N-[tris(GalNAc-alkyl)-amidodecanoyl)]-4-hydroxyprolinol (Hyp-(GalNAc-alkyl)3)
ctggtgctggagctagccaat

SEQ ID NO: 417 - RNA, 21 nt, synthetic construct
  source 1..21: mol_type = other RNA
  modified_base 1: mod_base = OTHER; note = 2'-O-methylcytidine-3'-phosphorothioate
  modified_base 2: mod_base = OTHER; note = 2'-O-methyluridine-3'-phosphorothioate
  modified_base 3: mod_base = OTHER; note = 2'-O-methyladenosine-3'-phosphate
  modified_base 4: mod_base = OTHER; note = 2'-O-methylguanosine-3'-phosphate
  modified_base 5: mod_base = OTHER; note = 2'-O-methylcytidine-3'-phosphate
  modified_base 6: mod_base = OTHER; note = 2'-O-methylcytidine-3'-phosphate
  modified_base 7: mod_base = OTHER; note = 2'-fluoroadenosine-3'-phosphate
  modified_base 8: mod_base = OTHER; note = 2'-O-methyladenosine-3'-phosphate
  modified_base 9: mod_base = OTHER; note = 2'-fluoroguanosine-3'-phosphate
  modified_base 10: mod_base = OTHER; note = 2'-fluorocytidine-3'-phosphate
  modified_base 11: mod_base = OTHER; note = 2'-fluoroadenosine-3'-phosphate
  modified_base 12: mod_base = OTHER; note = 2'-O-methylguanosine-3'-phosphate
  modified_base 13: mod_base = OTHER; note = 2'-O-methylcytidine-3'-phosphate
  modified_base 14: mod_base = OTHER; note = 2'-O-methyladenosine-3'-phosphate
  modified_base 15: mod_base = OTHER; note = 2'-O-methyladenosine-3'-phosphate
  modified_base 16: mod_base = OTHER; note = 2'-O-methyladenosine-3'-phosphate
  modified_base 17: mod_base = OTHER; note = 2'-O-methyluridine-3'-phosphate
  modified_base 18: mod_base = OTHER; note = 2'-O-methylcytidine-3'-phosphate
  modified_base 19: mod_base = OTHER; note = 2'-O-methylcytidine-3'-phosphate
  modified_base 20: mod_base = OTHER; note = 2'-O-methyluridine-3'-phosphate
  modified_base 21: mod_base = OTHER; note = 2'-O-methyluridine-3'-phosphate N-[tris(GalNAc-alkyl)-amidodecanoyl)]-4-hydroxyprolinol (Hyp-(GalNAc-alkyl)3)
ctagccaagcagcaaatcctt

SEQ ID NO: 418 - RNA, 21 nt, synthetic construct
  source 1..21: mol_type = other RNA
  modified_base 1: mod_base = OTHER; note = 2'-O-methyladenosine-3'-phosphorothioate
  modified_base 2: mod_base = OTHER; note = 2'-O-methyluridine-3'-phosphorothioate
  modified_base 3: mod_base = OTHER; note = 2'-O-methylcytidine-3'-phosphate
  modified_base 4: mod_base = OTHER; note = 2'-O-methylcytidine-3'-phosphate
  modified_base 5: mod_base = OTHER; note = 2'-O-methyluridine-3'-phosphate
  modified_base 6: mod_base = OTHER; note = 2'-O-methylguanosine-3'-phosphate
  modified_base 7: mod_base = OTHER; note = 2'-fluoroguanosine-3'-phosphate
  modified_base 8: mod_base = OTHER; note = 2'-O-methyladenosine-3'-phosphate
  modified_base 9: mod_base = OTHER; note = 2'-fluorouridine-3'-phosphate
  modified_base 10: mod_base = OTHER; note = 2'-fluoroguanosine-3'-phosphate
  modified_base 11: mod_base = OTHER; note = 2'-fluoroguanosine-3'-phosphate
  modified_base 12: mod_base = OTHER; note = 2'-O-methylguanosine-3'-phosphate
  modified_base 13: mod_base = OTHER; note = 2'-O-methyluridine-3'-phosphate
  modified_base 14: mod_base = OTHER; note = 2'-O-methyluridine-3'-phosphate
  modified_base 15: mod_base = OTHER; note = 2'-O-methylguanosine-3'-phosphate
  modified_base 16: mod_base = OTHER; note = 2'-O-methylcytidine-3'-phosphate
  modified_base 17: mod_base = OTHER; note = 2'-O-methyladenosine-3'-phosphate
  modified_base 18: mod_base = OTHER; note = 2'-O-methylcytidine-3'-phosphate
  modified_base 19: mod_base = OTHER; note = 2'-O-methylcytidine-3'-phosphate
  modified_base 20: mod_base = OTHER; note = 2'-O-methyluridine-3'-phosphate
  modified_base 21: mod_base = OTHER; note = 2'-O-methyluridine-3'-phosphate N-[tris(GalNAc-alkyl)-amidodecanoyl)]-4-hydroxyprolinol (Hyp-(GalNAc-alkyl)3)
atcctggatgggttgcacctt

SEQ ID NO: 419 - RNA, 21 nt, synthetic construct
  source 1..21: mol_type = other RNA
  modified_base 1: mod_base = OTHER; note = 2'-O-methyluridine-3'-phosphorothioate
  modified_base 2: mod_base = OTHER; note = 2'-O-methyluridine-3'-phosphorothioate
  modified_base 3: mod_base = OTHER; note = 2'-O-methylguanosine-3'-phosphate
  modified_base 4: mod_base = OTHER; note = 2'-O-methylcytidine-3'-phosphate
  modified_base 5: mod_base = OTHER; note = 2'-O-methyladenosine-3'-phosphate
  modified_base 6: mod_base = OTHER; note = 2'-O-methylcytidine-3'-phosphate
  modified_base 7: mod_base = OTHER; note = 2'-fluorocytidine-3'-phosphate
  modified_base 8: mod_base = OTHER; note = 2'-O-methyluridine-3'-phosphate
  modified_base 9: mod_base = OTHER; note = 2'-fluoroguanosine-3'-phosphate
  modified_base 10: mod_base = OTHER; note = 2'-fluoroadenosine-3'-phosphate
  modified_base 11: mod_base = OTHER; note = 2'-fluorocytidine-3'-phosphate
  modified_base 12: mod_base = OTHER; note = 2'-O-methylcytidine-3'-phosphate
  modified_base 13: mod_base = OTHER; note = 2'-O-methyladenosine-3'-phosphate
  modified_base 14: mod_base = OTHER; note = 2'-O-methylguanosine-3'-phosphate
  modified_base 15: mod_base = OTHER; note = 2'-O-methyluridine-3'-phosphate
  modified_base 16: mod_base = OTHER; note = 2'-O-methylcytidine-3'-phosphate
  modified_base 17: mod_base = OTHER; note = 2'-O-methylguanosine-3'-phosphate
  modified_base 18: mod_base = OTHER; note = 2'-O-methyluridine-3'-phosphate
  modified_base 19: mod_base = OTHER; note = 2'-O-methylcytidine-3'-phosphate
  modified_base 20: mod_base = OTHER; note = 2'-O-methylcytidine-3'-phosphate
  modified_base 21: mod_base = OTHER; note = 2'-O-methyluridine-3'-phosphate N-[tris(GalNAc-alkyl)-amidodecanoyl)]-4-hydroxyprolinol (Hyp-(GalNAc-alkyl)3)
ttgcacctgaccagtcgtcct

SEQ ID NO: 420 - RNA, 21 nt, synthetic construct
  source 1..21: mol_type = other RNA
  modified_base 1: mod_base = OTHER; note = 2'-O-methyluridine-3'-phosphorothioate
  modified_base 2: mod_base = OTHER; note = 2'-O-methylcytidine-3'-phosphorothioate
  modified_base 3: mod_base = OTHER; note = 2'-O-methylguanosine-3'-phosphate
  modified_base 4: mod_base = OTHER; note = 2'-O-methyluridine-3'-phosphate
  modified_base 5: mod_base = OTHER; note = 2'-O-methylcytidine-3'-phosphate
  modified_base 6: mod_base = OTHER; note = 2'-O-methylcytidine-3'-phosphate
  modified_base 7: mod_base = OTHER; note = 2'-fluorocytidine-3'-phosphate
  modified_base 8: mod_base = OTHER; note = 2'-O-methyladenosine-3'-phosphate
  modified_base 9: mod_base = OTHER; note = 2'-fluoroguanosine-3'-phosphate
  modified_base 10: mod_base = OTHER; note = 2'-fluoroadenosine-3'-phosphate
  modified_base 11: mod_base = OTHER; note = 2'-fluoroadenosine-3'-phosphate
  modified_base 12: mod_base = OTHER; note = 2'-O-methyluridine-3'-phosphate
  modified_base 13: mod_base = OTHER; note = 2'-O-methyladenosine-3'-phosphate
  modified_base 14: mod_base = OTHER; note = 2'-O-methyladenosine-3'-phosphate
  modified_base 15: mod_base = OTHER; note = 2'-O-methylcytidine-3'-phosphate
  modified_base 16: mod_base = OTHER; note = 2'-O-methyluridine-3'-phosphate
  modified_base 17: mod_base = OTHER; note = 2'-O-methylcytidine-3'-phosphate
  modified_base 18: mod_base = OTHER; note = 2'-O-methyladenosine-3'-phosphate
  modified_base 19: mod_base = OTHER; note = 2'-O-methyluridine-3'-phosphate
  modified_base 20: mod_base = OTHER; note = 2'-O-methylcytidine-3'-phosphate
  modified_base 21: mod_base = OTHER; note = 2'-O-methyluridine-3'-phosphate N-[tris(GalNAc-alkyl)-amidodecanoyl)]-4-hydroxyprolinol (Hyp-(GalNAc-alkyl)3)
tcgtcccagaataactcatct

SEQ ID NO: 421 - RNA, 21 nt, synthetic construct
  source 1..21: mol_type = other RNA
  modified_base 1: mod_base = OTHER; note = 2'-O-methylcytidine-3'-phosphorothioate
  modified_base 2: mod_base = OTHER; note = 2'-O-methylcytidine-3'-phosphorothioate
  modified_base 3: mod_base = OTHER; note = 2'-O-methylcytidine-3'-phosphate
  modified_base 4: mod_base = OTHER; note = 2'-O-methyluridine-3'-phosphate
  modified_base 5: mod_base = OTHER; note = 2'-O-methylcytidine-3'-phosphate
  modified_base 6: mod_base = OTHER; note = 2'-O-methylcytidine-3'-phosphate
  modified_base 7: mod_base = OTHER; note = 2'-fluoroguanosine-3'-phosphate
  modified_base 8: mod_base = OTHER; note = 2'-O-methylguanosine-3'-phosphate
  modified_base 9: mod_base = OTHER; note = 2'-fluoroadenosine-3'-phosphate
  modified_base 10: mod_base = OTHER; note = 2'-fluoroguanosine-3'-phosphate
  modified_base 11: mod_base = OTHER; note = 2'-fluoroadenosine-3'-phosphate
  modified_base 12: mod_base = OTHER; note = 2'-O-methylcytidine-3'-phosphate
  modified_base 13: mod_base = OTHER; note = 2'-O-methyluridine-3'-phosphate
  modified_base 14: mod_base = OTHER; note = 2'-O-methyladenosine-3'-phosphate
  modified_base 15: mod_base = OTHER; note = 2'-O-methylcytidine-3'-phosphate
  modified_base 16: mod_base = OTHER; note = 2'-O-methyladenosine-3'-phosphate
  modified_base 17: mod_base = OTHER; note = 2'-O-methylguanosine-3'-phosphate
  modified_base 18: mod_base = OTHER; note = 2'-O-methylcytidine-3'-phosphate
  modified_base 19: mod_base = OTHER; note = 2'-O-methylcytidine-3'-phosphate
  modified_base 20: mod_base = OTHER; note = 2'-O-methyladenosine-3'-phosphate
  modified_base 21: mod_base = OTHER; note = 2'-O-methyluridine-3'-phosphate N-[tris(GalNAc-alkyl)-amidodecanoyl)]-4-hydroxyprolinol (Hyp-(GalNAc-alkyl)3)
ccctccggagactacagccat

SEQ ID NO: 422 - RNA, 21 nt, synthetic construct
  source 1..21: mol_type = other RNA
  modified_base 1: mod_base = OTHER; note = 2'-O-methyluridine-3'-phosphorothioate
  modified_base 2: mod_base = OTHER; note = 2'-O-methyladenosine-3'-phosphorothioate
  modified_base 3: mod_base = OTHER; note = 2'-O-methylcytidine-3'-phosphate
  modified_base 4: mod_base = OTHER; note = 2'-O-methyladenosine-3'-phosphate
  modified_base 5: mod_base = OTHER; note = 2'-O-methylguanosine-3'-phosphate
  modified_base 6: mod_base = OTHER; note = 2'-O-methylcytidine-3'-phosphate
  modified_base 7: mod_base = OTHER; note = 2'-fluorocytidine-3'-phosphate
  modified_base 8: mod_base = OTHER; note = 2'-O-methyladenosine-3'-phosphate
  modified_base 9: mod_base = OTHER; note = 2'-fluoroguanosine-3'-phosphate
  modified_base 10: mod_base = OTHER; note = 2'-fluoroguanosine-3'-phosphate
  modified_base 11: mod_base = OTHER; note = 2'-fluoroguanosine-3'-phosphate
  modified_base 12: mod_base = OTHER; note = 2'-O-methyladenosine-3'-phosphate
  modified_base 13: mod_base = OTHER; note = 2'-O-methylguanosine-3'-phosphate
  modified_base 14: mod_base = OTHER; note = 2'-O-methyluridine-3'-phosphate
  modified_base 15: mod_base = OTHER; note = 2'-O-methylguanosine-3'-phosphate
  modified_base 16: mod_base = OTHER; note = 2'-O-methyluridine-3'-phosphate
  modified_base 17: mod_base = OTHER; note = 2'-O-methylguanosine-3'-phosphate
  modified_base 18: mod_base = OTHER; note = 2'-O-methylguanosine-3'-phosphate
  modified_base 19: mod_base = OTHER; note = 2'-O-methylcytidine-3'-phosphate
  modified_base 20: mod_base = OTHER; note = 2'-O-methyluridine-3'-phosphate
  modified_base 21: mod_base = OTHER; note = 2'-O-methyluridine-3'-phosphate N-[tris(GalNAc-alkyl)-amidodecanoyl)]-4-hydroxyprolinol (Hyp-(GalNAc-alkyl)3)
tacagccagggagtgtggctt

SEQ ID NO: 423 - RNA, 21 nt, synthetic construct
  source 1..21: mol_type = other RNA
  modified_base 1: mod_base = OTHER; note = 2'-O-methyladenosine-3'-phosphorothioate
  modified_base 2: mod_base = OTHER; note = 2'-O-methylguanosine-3'-phosphorothioate
  modified_base 3: mod_base = OTHER; note = 2'-O-methyluridine-3'-phosphate
  modified_base 4: mod_base = OTHER; note = 2'-O-methylguanosine-3'-phosphate
  modified_base 5: mod_base = OTHER; note = 2'-O-methyluridine-3'-phosphate
  modified_base 6: mod_base = OTHER; note = 2'-O-methylguanosine-3'-phosphate
  modified_base 7: mod_base = OTHER; note = 2'-fluoroguanosine-3'-phosphate
  modified_base 8: mod_base = OTHER; note = 2'-O-methylcytidine-3'-phosphate
  modified_base 9: mod_base = OTHER; note = 2'-fluorouridine-3'-phosphate
  modified_base 10: mod_base = OTHER; note = 2'-fluorocytidine-3'-phosphate
  modified_base 11: mod_base = OTHER; note = 2'-fluorocytidine-3'-phosphate
  modified_base 12: mod_base = OTHER; note = 2'-O-methyladenosine-3'-phosphate
  modified_base 13: mod_base = OTHER; note = 2'-O-methylguanosine-3'-phosphate
  modified_base 14: mod_base = OTHER; note = 2'-O-methylguanosine-3'-phosphate
  modified_base 15: mod_base = OTHER; note = 2'-O-methylguanosine-3'-phosphate
  modified_base 16: mod_base = OTHER; note = 2'-O-methyladenosine-3'-phosphate
  modified_base 17: mod_base = OTHER; note = 2'-O-methyladenosine-3'-phosphate
  modified_base 18: mod_base = OTHER; note = 2'-O-methyluridine-3'-phosphate
  modified_base 19: mod_base = OTHER; note = 2'-O-methylguanosine-3'-phosphate
  modified_base 20: mod_base = OTHER; note = 2'-O-methylguanosine-3'-phosphate
  modified_base 21: mod_base = OTHER; note = 2'-O-methyluridine-3'-phosphate N-[tris(GalNAc-alkyl)-amidodecanoyl)]-4-hydroxyprolinol (Hyp-(GalNAc-alkyl)3)
agtgtggctccagggaatggt

SEQ ID NO: 424 - RNA, 21 nt, synthetic construct
  source 1..21: mol_type = other RNA
  modified_base 1: mod_base = OTHER; note = 2'-O-methylcytidine-3'-phosphorothioate
  modified_base 2: mod_base = OTHER; note = 2'-O-methyladenosine-3'-phosphorothioate
  modified_base 3: mod_base = OTHER; note = 2'-O-methyluridine-3'-phosphate
  modified_base 4: mod_base = OTHER; note = 2'-O-methylcytidine-3'-phosphate
  modified_base 5: mod_base = OTHER; note = 2'-O-methyladenosine-3'-phosphate
  modified_base 6: mod_base = OTHER; note = 2'-O-methylguanosine-3'-phosphate
  modified_base 7: mod_base = OTHER; note = 2'-fluorocytidine-3'-phosphate
  modified_base 8: mod_base = OTHER; note = 2'-O-methyluridine-3'-phosphate
  modified_base 9: mod_base = OTHER; note = 2'-fluorouridine-3'-phosphate
  modified_base 10: mod_base = OTHER; note = 2'-fluorouridine-3'-phosphate
  modified_base 11: mod_base = OTHER; note = 2'-fluoroguanosine-3'-phosphate
  modified_base 12: mod_base = OTHER; note = 2'-O-methylcytidine-3'-phosphate
  modified_base 13: mod_base = OTHER; note = 2'-O-methyluridine-3'-phosphate
  modified_base 14: mod_base = OTHER; note = 2'-O-methyladenosine-3'-phosphate
  modified_base 15: mod_base = OTHER; note = 2'-O-methylcytidine-3'-phosphate
  modified_base 16: mod_base = OTHER; note = 2'-O-methyluridine-3'-phosphate
  modified_base 17: mod_base = OTHER; note = 2'-O-methylguanosine-3'-phosphate
  modified_base 18: mod_base = OTHER; note = 2'-O-methyluridine-3'-phosphate
  modified_base 19: mod_base = OTHER; note = 2'-O-methylcytidine-3'-phosphate
  modified_base 20: mod_base = OTHER; note = 2'-O-methyladenosine-3'-phosphate
  modified_base 21: mod_base = OTHER; note = 2'-O-methyluridine-3'-phosphate N-[tris(GalNAc-alkyl)-amidodecanoyl)]-4-hydroxyprolinol (Hyp-(GalNAc-alkyl)3)
catcagctttgctactgtcat

SEQ ID NO: 425 - RNA, 21 nt, synthetic construct
  source 1..21: mol_type = other RNA
  modified_base 1: mod_base = OTHER; note = 2'-O-methylcytidine-3'-phosphorothioate
  modified_base 2: mod_base = OTHER; note = 2'-O-methyluridine-3'-phosphorothioate
  modified_base 3: mod_base = OTHER; note = 2'-O-methylguanosine-3'-phosphate
  modified_base 4: mod_base = OTHER; note = 2'-O-methyluridine-3'-phosphate
  modified_base 5: mod_base = OTHER; note = 2'-O-methylcytidine-3'-phosphate
  modified_base 6: mod_base = OTHER; note = 2'-O-methyladenosine-3'-phosphate
  modified_base 7: mod_base = OTHER; note = 2'-fluorocytidine-3'-phosphate
  modified_base 8: mod_base = OTHER; note = 2'-O-methyladenosine-3'-phosphate
  modified_base 9: mod_base = OTHER; note = 2'-fluoroguanosine-3'-phosphate
  modified_base 10: mod_base = OTHER; note = 2'-fluoroadenosine-3'-phosphate
  modified_base 11: mod_base = OTHER; note = 2'-fluorocytidine-3'-phosphate
  modified_base 12: mod_base = OTHER; note = 2'-O-methyluridine-3'-phosphate
  modified_base 13: mod_base = OTHER; note = 2'-O-methylcytidine-3'-phosphate
  modified_base 14: mod_base = OTHER; note = 2'-O-methylcytidine-3'-phosphate
  modified_base 15: mod_base = OTHER; note = 2'-O-methyladenosine-3'-phosphate
  modified_base 16: mod_base = OTHER; note = 2'-O-methylcytidine-3'-phosphate
  modified_base 17: mod_base = OTHER; note = 2'-O-methyluridine-3'-phosphate
  modified_base 18: mod_base = OTHER; note = 2'-O-methyluridine-3'-phosphate
  modified_base 19: mod_base = OTHER; note = 2'-O-methylcytidine-3'-phosphate
  modified_base 20: mod_base = OTHER; note = 2'-O-methyladenosine-3'-phosphate
  modified_base 21: mod_base = OTHER; note = 2'-O-methyluridine-3'-phosphate N-[tris(GalNAc-alkyl)-amidodecanoyl)]-4-hydroxyprolinol (Hyp-(GalNAc-alkyl)3)
ctgtcacagactccacttcat

SEQ ID NO: 426 - RNA, 21 nt, synthetic construct
  source 1..21: mol_type = other RNA
  modified_base 1: mod_base = OTHER; note = 2'-O-methyluridine-3'-phosphorothioate
  modified_base 2: mod_base = OTHER; note = 2'-O-methylcytidine-3'-phosphorothioate
  modified_base 3: mod_base = OTHER; note = 2'-O-methylcytidine-3'-phosphate
  modified_base 4: mod_base = OTHER; note = 2'-O-methyladenosine-3'-phosphate
  modified_base 5: mod_base = OTHER; note = 2'-O-methylcytidine-3'-phosphate
  modified_base 6: mod_base = OTHER; note = 2'-O-methyluridine-3'-phosphate
  modified_base 7: mod_base = OTHER; note = 2'-fluorouridine-3'-phosphate
  modified_base 8: mod_base = OTHER; note = 2'-O-methylcytidine-3'-phosphate
  modified_base 9: mod_base = OTHER; note = 2'-fluoroadenosine-3'-phosphate
  modified_base 10: mod_base = OTHER; note = 2'-fluoroguanosine-3'-phosphate
  modified_base 11: mod_base = OTHER; note = 2'-fluorocytidine-3'-phosphate
  modified_base 12: mod_base = OTHER; note = 2'-O-methylcytidine-3'-phosphate
  modified_base 13: mod_base = OTHER; note = 2'-O-methyluridine-3'-phosphate
  modified_base 14: mod_base = OTHER; note = 2'-O-methyladenosine-3'-phosphate
  modified_base 15: mod_base = OTHER; note = 2'-O-methylcytidine-3'-phosphate
  modified_base 16: mod_base = OTHER; note = 2'-O-methyladenosine-3'-phosphate
  modified_base 17: mod_base = OTHER; note = 2'-O-methylguanosine-3'-phosphate
  modified_base 18: mod_base = OTHER; note = 2'-O-methylcytidine-3'-phosphate
  modified_base 19: mod_base = OTHER; note = 2'-O-methyluridine-3'-phosphate
  modified_base 20: mod_base = OTHER; note = 2'-O-methylcytidine-3'-phosphate
  modified_base 21: mod_base = OTHER; note = 2'-O-methyluridine-3'-phosphate N-[tris(GalNAc-alkyl)-amidodecanoyl)]-4-hydroxyprolinol (Hyp-(GalNAc-alkyl)3)
tccacttcagcctacagctct

SEQ ID NO: 427 - RNA, 21 nt, synthetic construct
  source 1..21: mol_type = other RNA
  modified_base 1: mod_base = OTHER; note = 2'-O-methylcytidine-3'-phosphorothioate
  modified_base 2: mod_base = OTHER; note = 2'-O-methylcytidine-3'-phosphorothioate
  modified_base 3: mod_base = OTHER; note = 2'-O-methyluridine-3'-phosphate
  modified_base 4: mod_base = OTHER; note = 2'-O-methylguanosine-3'-phosphate
  modified_base 5: mod_base = OTHER; note = 2'-O-methylcytidine-3'-phosphate
  modified_base 6: mod_base = OTHER; note = 2'-O-methyluridine-3'-phosphate
  modified_base 7: mod_base = OTHER; note = 2'-fluorocytidine-3'-phosphate
  modified_base 8: mod_base = OTHER; note = 2'-O-methyladenosine-3'-phosphate
  modified_base 9: mod_base = OTHER; note = 2'-fluorocytidine-3'-phosphate
  modified_base 10: mod_base = OTHER; note = 2'-fluorouridine-3'-phosphate
  modified_base 11: mod_base = OTHER; note = 2'-fluorouridine-3'-phosphate
  modified_base 12: mod_base = OTHER; note = 2'-O-methyluridine-3'-phosphate
  modified_base 13: mod_base = OTHER; note = 2'-O-methyluridine-3'-phosphate
  modified_base 14: mod_base = OTHER; note = 2'-O-methylcytidine-3'-phosphate
  modified_base 15: mod_base = OTHER; note = 2'-O-methyladenosine-3'-phosphate
  modified_base 16: mod_base = OTHER; note = 2'-O-methylcytidine-3'-phosphate
  modified_base 17: mod_base = OTHER; note = 2'-O-methylcytidine-3'-phosphate
  modified_base 18: mod_base = OTHER; note = 2'-O-methyluridine-3'-phosphate
  modified_base 19: mod_base = OTHER; note = 2'-O-methylguanosine-3'-phosphate
  modified_base 20: mod_base = OTHER; note = 2'-O-methyluridine-3'-phosphate
  modified_base 21: mod_base = OTHER; note = 2'-O-methyluridine-3'-phosphate N-[tris(GalNAc-alkyl)-amidodecanoyl)]-4-hydroxyprolinol (Hyp-(GalNAc-alkyl)3)
cctgctcacttttcacctgtt

SEQ ID NO: 428 - RNA, 21 nt, synthetic construct
  source 1..21: mol_type = other RNA
  modified_base 1: mod_base = OTHER; note = 2'-O-methyluridine-3'-phosphorothioate
  modified_base 2: mod_base = OTHER; note = 2'-O-methylcytidine-3'-phosphorothioate
  modified_base 3: mod_base = OTHER; note = 2'-O-methyladenosine-3'-phosphate
  modified_base 4: mod_base = OTHER; note = 2'-O-methylcytidine-3'-phosphate
  modified_base 5: mod_base = OTHER; note = 2'-O-methylcytidine-3'-phosphate
  modified_base 6: mod_base = OTHER; note = 2'-O-methyluridine-3'-phosphate
  modified_base 7: mod_base = OTHER; note = 2'-fluoroguanosine-3'-phosphate
  modified_base 8: mod_base = OTHER; note = 2'-O-methyluridine-3'-phosphate
  modified_base 9: mod_base = OTHER; note = 2'-fluorocytidine-3'-phosphate
  modified_base 10: mod_base = OTHER; note = 2'-fluorocytidine-3'-phosphate
  modified_base 11: mod_base = OTHER; note = 2'-fluoroadenosine-3'-phosphate
  modified_base 12: mod_base = OTHER; note = 2'-O-methylcytidine-3'-phosphate
  modified_base 13: mod_base = OTHER; note = 2'-O-methyluridine-3'-phosphate
  modified_base 14: mod_base = OTHER; note = 2'-O-methylcytidine-3'-phosphate
  modified_base 15: mod_base = OTHER; note = 2'-O-methylcytidine-3'-phosphate
  modified_base 16: mod_base = OTHER; note = 2'-O-methyluridine-3'-phosphate
  modified_base 17: mod_base = OTHER; note = 2'-O-methylcytidine-3'-phosphate
  modified_base 18: mod_base = OTHER; note = 2'-O-methylguanosine-3'-phosphate
  modified_base 19: mod_base = OTHER; note = 2'-O-methylguanosine-3'-phosphate
  modified_base 20: mod_base = OTHER; note = 2'-O-methyluridine-3'-phosphate
  modified_base 21: mod_base = OTHER; note = 2'-O-methyluridine-3'-phosphate N-[tris(GalNAc-alkyl)-amidodecanoyl)]-4-hydroxyprolinol (Hyp-(GalNAc-alkyl)3)
tcacctgtccactcctcggtt

SEQ ID NO: 429 - RNA, 21 nt, synthetic construct
  source 1..21: mol_type = other RNA
  modified_base 1: mod_base = OTHER; note = 2'-O-methyluridine-3'-phosphorothioate
  modified_base 2: mod_base = OTHER; note = 2'-O-methylcytidine-3'-phosphorothioate
  modified_base 3: mod_base = OTHER; note = 2'-O-methylcytidine-3'-phosphate
  modified_base 4: mod_base = OTHER; note = 2'-O-methylcytidine-3'-phosphate
  modified_base 5: mod_base = OTHER; note = 2'-O-methyladenosine-3'-phosphate
  modified_base 6: mod_base = OTHER; note = 2'-O-methylcytidine-3'-phosphate
  modified_base 7: mod_base = OTHER; note = 2'-fluorocytidine-3'-phosphate
  modified_base 8: mod_base = OTHER; note = 2'-O-methyladenosine-3'-phosphate
  modified_base 9: mod_base = OTHER; note = 2'-fluorocytidine-3'-phosphate
  modified_base 10: mod_base = OTHER; note = 2'-fluorocytidine-3'-phosphate
  modified_base 11: mod_base = OTHER; note = 2'-fluorouridine-3'-phosphate
  modified_base 12: mod_base = OTHER; note = 2'-O-methylguanosine-3'-phosphate
  modified_base 13: mod_base = OTHER; note = 2'-O-methyluridine-3'-phosphate
  modified_base 14: mod_base = OTHER; note = 2'-O-methyladenosine-3'-phosphate
  modified_base 15: mod_base = OTHER; note = 2'-O-methylcytidine-3'-phosphate
  modified_base 16: mod_base = OTHER; note = 2'-O-methylcytidine-3'-phosphate
  modified_base 17: mod_base = OTHER; note = 2'-O-methyladenosine-3'-phosphate
  modified_base 18: mod_base = OTHER; note = 2'-O-methyluridine-3'-phosphate
  modified_base 19: mod_base = OTHER; note = 2'-O-methylguanosine-3'-phosphate
  modified_base 20: mod_base = OTHER; note = 2'-O-methylcytidine-3'-phosphate
  modified_base 21: mod_base = OTHER; note = 2'-O-methyluridine-3'-phosphate N-[tris(GalNAc-alkyl)-amidodecanoyl)]-4-hydroxyprolinol (Hyp-(GalNAc-alkyl)3)
tcccaccacctgtaccatgct

SEQ ID NO: 430 - RNA, 21 nt, synthetic construct
  source 1..21: mol_type = other RNA
  modified_base 1: mod_base = OTHER; note = 2'-O-methyluridine-3'-phosphorothioate
  modified_base 2: mod_base = OTHER; note = 2'-O-methyladenosine-3'-phosphorothioate
  modified_base 3: mod_base = OTHER; note = 2'-O-methylcytidine-3'-phosphate
  modified_base 4: mod_base = OTHER; note = 2'-O-methylcytidine-3'-phosphate
  modified_base 5: mod_base = OTHER; note = 2'-O-methyladenosine-3'-phosphate
  modified_base 6: mod_base = OTHER; note = 2'-O-methyluridine-3'-phosphate
  modified_base 7: mod_base = OTHER; note = 2'-fluoroguanosine-3'-phosphate
  modified_base 8: mod_base = OTHER; note = 2'-O-methylcytidine-3'-phosphate
  modified_base 9: mod_base = OTHER; note = 2'-fluorocytidine-3'-phosphate
  modified_base 10: mod_base = OTHER; note = 2'-fluorocytidine-3'-phosphate
  modified_base 11: mod_base = OTHER; note = 2'-fluoroguanosine-3'-phosphate
  modified_base 12: mod_base = OTHER; note = 2'-O-methylcytidine-3'-phosphate
  modified_base 13: mod_base = OTHER; note = 2'-O-methylcytidine-3'-phosphate
  modified_base 14: mod_base = OTHER; note = 2'-O-methyluridine-3'-phosphate
  modified_base 15: mod_base = OTHER; note = 2'-O-methylguanosine-3'-phosphate
  modified_base 16: mod_base = OTHER; note = 2'-O-methyluridine-3'-phosphate
  modified_base 17: mod_base = OTHER; note = 2'-O-methylguanosine-3'-phosphate
  modified_base 18: mod_base = OTHER; note = 2'-O-methylguanosine-3'-phosphate
  modified_base 19: mod_base = OTHER; note = 2'-O-methylcytidine-3'-phosphate
  modified_base 20: mod_base = OTHER; note = 2'-O-methyluridine-3'-phosphate
  modified_base 21: mod_base = OTHER; note = 2'-O-methyluridine-3'-phosphate N-[tris(GalNAc-alkyl)-amidodecanoyl)]-4-hydroxyprolinol (Hyp-(GalNAc-alkyl)3)
taccatgcccgcctgtggctt

SEQ ID NO: 431 - RNA, 21 nt, synthetic construct
  source 1..21: mol_type = other RNA
  modified_base 1: mod_base = OTHER; note = 2'-O-methylcytidine-3'-phosphorothioate
  modified_base 2: mod_base = OTHER; note = 2'-O-methylcytidine-3'-phosphorothioate
  modified_base 3: mod_base = OTHER; note = 2'-O-methylcytidine-3'-phosphate
  modified_base 4: mod_base = OTHER; note = 2'-O-methyluridine-3'-phosphate
  modified_base 5: mod_base = OTHER; note = 2'-O-methyluridine-3'-phosphate
  modified_base 6: mod_base = OTHER; note = 2'-O-methylcytidine-3'-phosphate
  modified_base 7: mod_base = OTHER; note = 2'-fluorocytidine-3'-phosphate
  modified_base 8: mod_base = OTHER; note = 2'-O-methyluridine-3'-phosphate
  modified_base 9: mod_base = OTHER; note = 2'-fluoroguanosine-3'-phosphate
  modified_base 10: mod_base = OTHER; note = 2'-fluoroguanosine-3'-phosphate
  modified_base 11: mod_base = OTHER; note = 2'-fluorocytidine-3'-phosphate
  modified_base 12: mod_base = OTHER; note = 2'-O-methyladenosine-3'-phosphate
  modified_base 13: mod_base = OTHER; note = 2'-O-methylcytidine-3'-phosphate
  modified_base 14: mod_base = OTHER; note = 2'-O-methyluridine-3'-phosphate
  modified_base 15: mod_base = OTHER; note = 2'-O-methylcytidine-3'-phosphate
  modified_base 16: mod_base = OTHER; note = 2'-O-methyluridine-3'-phosphate
  modified_base 17: mod_base = OTHER; note = 2'-O-methyluridine-3'-phosphate
  modified_base 18: mod_base = OTHER; note = 2'-O-methyluridine-3'-phosphate
  modified_base 19: mod_base = OTHER; note = 2'-O-methylguanosine-3'-phosphate
  modified_base 20: mod_base = OTHER; note = 2'-O-methylcytidine-3'-phosphate
  modified_base 21: mod_base = OTHER; note = 2'-O-methyluridine-3'-phosphate N-[tris(GalNAc-alkyl)-amidodecanoyl)]-4-hydroxyprolinol (Hyp-(GalNAc-alkyl)3)
cccttcctggcactctttgct

SEQ ID NO: 432 - RNA, 21 nt, synthetic construct
  source 1..21: mol_type = other RNA
  modified_base 1: mod_base = OTHER; note = 2'-O-methylcytidine-3'-phosphorothioate
  modified_base 2: mod_base = OTHER; note = 2'-O-methyluridine-3'-phosphorothioate
  modified_base 3: mod_base = OTHER; note = 2'-O-methylcytidine-3'-phosphate
  modified_base 4: mod_base = OTHER; note = 2'-O-methyluridine-3'-phosphate
  modified_base 5: mod_base = OTHER; note = 2'-O-methyluridine-3'-phosphate
  modified_base 6: mod_base = OTHER; note = 2'-O-methyluridine-3'-phosphate
  modified_base 7: mod_base = OTHER; note = 2'-fluoroguanosine-3'-phosphate
  modified_base 8: mod_base = OTHER; note = 2'-O-methylcytidine-3'-phosphate
  modified_base 9: mod_base = OTHER; note = 2'-fluorouridine-3'-phosphate
  modified_base 10: mod_base = OTHER; note = 2'-fluorouridine-3'-phosphate
  modified_base 11: mod_base = OTHER; note = 2'-fluoroguanosine-3'-phosphate
  modified_base 12: mod_base = OTHER; note = 2'-O-methyladenosine-3'-phosphate
  modified_base 13: mod_base = OTHER; note = 2'-O-methylguanosine-3'-phosphate
  modified_base 14: mod_base = OTHER; note = 2'-O-methylguanosine-3'-phosphate
  modified_base 15: mod_base = OTHER; note = 2'-O-methyladenosine-3'-phosphate
  modified_base 16: mod_base = OTHER; note = 2'-O-methyluridine-3'-phosphate
  modified_base 17: mod_base = OTHER; note = 2'-O-methylcytidine-3'-phosphate
  modified_base 18: mod_base = OTHER; note = 2'-O-methyluridine-3'-phosphate
  modified_base 19: mod_base = OTHER; note = 2'-O-methyluridine-3'-phosphate
  modified_base 20: mod_base = OTHER; note = 2'-O-methylcytidine-3'-phosphate
  modified_base 21: mod_base = OTHER; note = 2'-O-methyluridine-3'-phosphate N-[tris(GalNAc-alkyl)-amidodecanoyl)]-4-hydroxyprolinol (Hyp-(GalNAc-alkyl)3)
ctctttgcttgaggatcttct

SEQ ID NO: 433 - RNA, 21 nt, synthetic construct
  source 1..21: mol_type = other RNA
  modified_base 1: mod_base = OTHER; note = 2'-O-methyladenosine-3'-phosphorothioate
  modified_base 2: mod_base = OTHER; note = 2'-O-methylcytidine-3'-phosphorothioate
  modified_base 3: mod_base = OTHER; note = 2'-O-methyluridine-3'-phosphate
  modified_base 4: mod_base = OTHER; note = 2'-O-methylcytidine-3'-phosphate
  modified_base 5: mod_base = OTHER; note = 2'-O-methyluridine-3'-phosphate
  modified_base 6: mod_base = OTHER; note = 2'-O-methylcytidine-3'-phosphate
  modified_base 7: mod_base = OTHER; note = 2'-fluorocytidine-3'-phosphate
  modified_base 8: mod_base = OTHER; note = 2'-O-methyluridine-3'-phosphate
  modified_base 9: mod_base = OTHER; note = 2'-fluoroguanosine-3'-phosphate
  modified_base 10: mod_base = OTHER; note = 2'-fluoroguanosine-3'-phosphate
  modified_base 11: mod_base = OTHER; note = 2'-fluorocytidine-3'-phosphate
  modified_base 12: mod_base = OTHER; note = 2'-O-methyluridine-3'-phosphate
  modified_base 13: mod_base = OTHER; note = 2'-O-methylguanosine-3'-phosphate
  modified_base 14: mod_base = OTHER; note = 2'-O-methyladenosine-3'-phosphate
  modified_base 15: mod_base = OTHER; note = 2'-O-methylguanosine-3'-phosphate
  modified_base 16: mod_base = OTHER; note = 2'-O-methylcytidine-3'-phosphate
  modified_base 17: mod_base = OTHER; note = 2'-O-methyladenosine-3'-phosphate
  modified_base 18: mod_base = OTHER; note = 2'-O-methylcytidine-3'-phosphate
  modified_base 19: mod_base = OTHER; note = 2'-O-methylcytidine-3'-phosphate
  modified_base 20: mod_base = OTHER; note = 2'-O-methyladenosine-3'-phosphate
  modified_base 21: mod_base = OTHER; note = 2'-O-methyluridine-3'-phosphate N-[tris(GalNAc-alkyl)-amidodecanoyl)]-4-hydroxyprolinol (Hyp-(GalNAc-alkyl)3)
actctcctggctgagcaccat

SEQ ID NO: 434 - RNA, 21 nt, synthetic construct
  source 1..21: mol_type = other RNA
  modified_base 1: mod_base = OTHER; note = 2'-O-methylguanosine-3'-phosphorothioate
  modified_base 2: mod_base = OTHER; note = 2'-O-methyladenosine-3'-phosphorothioate
  modified_base 3: mod_base = OTHER; note = 2'-O-methylguanosine-3'-phosphate
  modified_base 4: mod_base = OTHER; note = 2'-O-methylcytidine-3'-phosphate
  modified_base 5: mod_base = OTHER; note = 2'-O-methyladenosine-3'-phosphate
  modified_base 6: mod_base = OTHER; note = 2'-O-methylcytidine-3'-phosphate
  modified_base 7: mod_base = OTHER; note = 2'-fluorocytidine-3'-phosphate
  modified_base 8: mod_base = OTHER; note = 2'-O-methyladenosine-3'-phosphate
  modified_base 9: mod_base = OTHER; note = 2'-fluorocytidine-3'-phosphate
  modified_base 10: mod_base = OTHER; note = 2'-fluoroadenosine-3'-phosphate
  modified_base 11: mod_base = OTHER; note = 2'-fluorouridine-3'-phosphate
  modified_base 12: mod_base = OTHER; note = 2'-O-methylcytidine-3'-phosphate
  modified_base 13: mod_base = OTHER; note = 2'-O-methyladenosine-3'-phosphate
  modified_base 14: mod_base = OTHER; note = 2'-O-methylcytidine-3'-phosphate
  modified_base 15: mod_base = OTHER; note = 2'-O-methylcytidine-3'-phosphate
  modified_base 16: mod_base = OTHER; note = 2'-O-methyladenosine-3'-phosphate
  modified_base 17: mod_base = OTHER; note = 2'-O-methyladenosine-3'-phosphate
  modified_base 18: mod_base = OTHER; note = 2'-O-methylcytidine-3'-phosphate
  modified_base 19: mod_base = OTHER; note = 2'-O-methylcytidine-3'-phosphate
  modified_base 20: mod_base = OTHER; note = 2'-O-methyluridine-3'-phosphate
  modified_base 21: mod_base = OTHER; note = 2'-O-methyluridine-3'-phosphate N-[tris(GalNAc-alkyl)-amidodecanoyl)]-4-hydroxyprolinol (Hyp-(GalNAc-alkyl)3)
gagcaccacatcaccaacctt

SEQ ID NO: 435 - RNA, 21 nt, synthetic construct
  source 1..21: mol_type = other RNA
  modified_base 1: mod_base = OTHER; note = 2'-O-methyladenosine-3'-phosphorothioate
  modified_base 2: mod_base = OTHER; note = 2'-O-methylcytidine-3'-phosphorothioate
  modified_base 3: mod_base = OTHER; note = 2'-O-methylcytidine-3'-phosphate
  modified_base 4: mod_base = OTHER; note = 2'-O-methyladenosine-3'-phosphate
  modified_base 5: mod_base = OTHER; note = 2'-O-methyladenosine-3'-phosphate
  modified_base 6: mod_base = OTHER; note = 2'-O-methylcytidine-3'-phosphate
  modified_base 7: mod_base = OTHER; note = 2'-fluorocytidine-3'-phosphate
  modified_base 8: mod_base = OTHER; note = 2'-O-methyluridine-3'-phosphate
  modified_base 9: mod_base = OTHER; note = 2'-fluoroguanosine-3'-phosphate
  modified_base 10: mod_base = OTHER; note = 2'-fluoroguanosine-3'-phosphate
  modified_base 11: mod_base = OTHER; note = 2'-fluoroguanosine-3'-phosphate
  modified_base 12: mod_base = OTHER; note = 2'-O-methylcytidine-3'-phosphate
  modified_base 13: mod_base = OTHER; note = 2'-O-methyluridine-3'-phosphate
  modified_base 14: mod_base = OTHER; note = 2'-O-methylguanosine-3'-phosphate
  modified_base 15: mod_base = OTHER; note = 2'-O-methylguanosine-3'-phosphate
  modified_base 16: mod_base = OTHER; note = 2'-O-methylcytidine-3'-phosphate
  modified_base 17: mod_base = OTHER; note = 2'-O-methyladenosine-3'-phosphate
  modified_base 18: mod_base = OTHER; note = 2'-O-methyluridine-3'-phosphate
  modified_base 19: mod_base = OTHER; note = 2'-O-methyladenosine-3'-phosphate
  modified_base 20: mod_base = OTHER; note = 2'-O-methylcytidine-3'-phosphate
  modified_base 21: mod_base = OTHER; note = 2'-O-methyluridine-3'-phosphate N-[tris(GalNAc-alkyl)-amidodecanoyl)]-4-hydroxyprolinol (Hyp-(GalNAc-alkyl)3)
accaacctgggctggcatact

SEQ ID NO: 436 - RNA, 21 nt, synthetic construct
  source 1..21: mol_type = other RNA
  modified_base 1: mod_base = OTHER; note = 2'-O-methylcytidine-3'-phosphorothioate
  modified_base 2: mod_base = OTHER; note = 2'-O-methyluridine-3'-phosphorothioate
  modified_base 3: mod_base = OTHER; note = 2'-O-methylguanosine-3'-phosphate
  modified_base 4: mod_base = OTHER; note = 2'-O-methylguanosine-3'-phosphate
  modified_base 5: mod_base = OTHER; note = 2'-O-methylcytidine-3'-phosphate
  modified_base 6: mod_base = OTHER; note = 2'-O-methyladenosine-3'-phosphate
  modified_base 7: mod_base = OTHER; note = 2'-fluorouridine-3'-phosphate
  modified_base 8: mod_base = OTHER; note = 2'-O-methyladenosine-3'-phosphate
  modified_base 9: mod_base = OTHER; note = 2'-fluorocytidine-3'-phosphate
  modified_base 10: mod_base = OTHER; note = 2'-fluorocytidine-3'-phosphate
  modified_base 11: mod_base = OTHER; note = 2'-fluorouridine-3'-phosphate
  modified_base 12: mod_base = OTHER; note = 2'-O-methyluridine-3'-phosphate
  modified_base 13: mod_base = OTHER; note = 2'-O-methyladenosine-3'-phosphate
  modified_base 14: mod_base = OTHER; note = 2'-O-methyladenosine-3'-phosphate
  modified_base 15: mod_base = OTHER; note = 2'-O-methylcytidine-3'-phosphate
  modified_base 16: mod_base = OTHER; note = 2'-O-methyluridine-3'-phosphate
  modified_base 17: mod_base = OTHER; note = 2'-O-methylcytidine-3'-phosphate
  modified_base 18: mod_base = OTHER; note = 2'-O-methyluridine-3'-phosphate
  modified_base 19: mod_base = OTHER; note = 2'-O-methylguanosine-3'-phosphate
  modified_base 20: mod_base = OTHER; note = 2'-O-methylcytidine-3'-phosphate
  modified_base 21: mod_base = OTHER; note = 2'-O-methyluridine-3'-phosphate N-[tris(GalNAc-alkyl)-amidodecanoyl)]-4-hydroxyprolinol (Hyp-(GalNAc-alkyl)3)
ctggcataccttaactctgct

SEQ ID NO: 437 - RNA, 21 nt, synthetic construct
  source 1..21: mol_type = other RNA
  modified_base 1: mod_base = OTHER; note = 2'-O-methyluridine-3'-phosphorothioate
  modified_base 2: mod_base = OTHER; note = 2'-O-methylguanosine-3'-phosphorothioate
  modified_base 3: mod_base = OTHER; note = 2'-O-methylcytidine-3'-phosphate
  modified_base 4: mod_base = OTHER; note = 2'-O-methylcytidine-3'-phosphate
  modified_base 5: mod_base = OTHER; note = 2'-O-methylcytidine-3'-phosphate
  modified_base 6: mod_base = OTHER; note = 2'-O-methyluridine-3'-phosphate
  modified_base 7: mod_base = OTHER; note = 2'-fluorocytidine-3'-phosphate
  modified_base 8: mod_base = OTHER; note = 2'-O-methyluridine-3'-phosphate
  modified_base 9: mod_base = OTHER; note = 2'-fluoroadenosine-3'-phosphate
  modified_base 10: mod_base = OTHER; note = 2'-fluoroguanosine-3'-phosphate
  modified_base 11: mod_base = OTHER; note = 2'-fluorouridine-3'-phosphate
  modified_base 12: mod_base = OTHER; note = 2'-O-methylguanosine-3'-phosphate
  modified_base 13: mod_base = OTHER; note = 2'-O-methylguanosine-3'-phosphate
  modified_base 14: mod_base = OTHER; note = 2'-O-methylcytidine-3'-phosphate
  modified_base 15: mod_base = OTHER; note = 2'-O-methyluridine-3'-phosphate
  modified_base 16: mod_base = OTHER; note = 2'-O-methyluridine-3'-phosphate
  modified_base 17: mod_base = OTHER; note = 2'-O-methylguanosine-3'-phosphate
  modified_base 18: mod_base = OTHER; note = 2'-O-methyladenosine-3'-phosphate
  modified_base 19: mod_base = OTHER; note = 2'-O-methylguanosine-3'-phosphate
  modified_base 20: mod_base = OTHER; note = 2'-O-methylguanosine-3'-phosphate
  modified_base 21: mod_base = OTHER; note = 2'-O-methyluridine-3'-phosphate N-[tris(GalNAc-alkyl)-amidodecanoyl)]-4-hydroxyprolinol (Hyp-(GalNAc-alkyl)3)
tgccctctagtggcttgaggt

SEQ ID NO: 438 - RNA, 21 nt, synthetic construct
  source 1..21: mol_type = other RNA
  modified_base 1: mod_base = OTHER; note = 2'-O-methyladenosine-3'-phosphorothioate
  modified_base 2: mod_base = OTHER; note = 2'-O-methylguanosine-3'-phosphorothioate
  modified_base 3: mod_base = OTHER; note = 2'-O-methyladenosine-3'-phosphate
  modified_base 4: mod_base = OTHER; note = 2'-O-methyladenosine-3'-phosphate
  modified_base 5: mod_base = OTHER; note = 2'-O-methylguanosine-3'-phosphate
  modified_base 6: mod_base = OTHER; note = 2'-O-methyluridine-3'-phosphate
  modified_base 7: mod_base = OTHER; note = 2'-fluorocytidine-3'-phosphate
  modified_base 8: mod_base = OTHER; note = 2'-O-methyluridine-3'-phosphate
  modified_base 9: mod_base = OTHER; note = 2'-fluoroguanosine-3'-phosphate
  modified_base 10: mod_base = OTHER; note = 2'-fluoroguanosine-3'-phosphate
  modified_base 11: mod_base = OTHER; note = 2'-fluorouridine-3'-phosphate
  modified_base 12: mod_base = OTHER; note = 2'-O-methylguanosine-3'-phosphate
  modified_base 13: mod_base = OTHER; note = 2'-O-methyluridine-3'-phosphate
  modified_base 14: mod_base = OTHER; note = 2'-O-methylcytidine-3'-phosphate
  modified_base 15: mod_base = OTHER; note = 2'-O-methylcytidine-3'-phosphate
  modified_base 16: mod_base = OTHER; note = 2'-O-methyluridine-3'-phosphate
  modified_base 17: mod_base = OTHER; note = 2'-O-methylguanosine-3'-phosphate
  modified_base 18: mod_base = OTHER; note = 2'-O-methyladenosine-3'-phosphate
  modified_base 19: mod_base = OTHER; note = 2'-O-methyladenosine-3'-phosphate
  modified_base 20: mod_base = OTHER; note = 2'-O-methyladenosine-3'-phosphate
  modified_base 21: mod_base = OTHER; note = 2'-O-methyluridine-3'-phosphate N-[tris(GalNAc-alkyl)-amidodecanoyl)]-4-hydroxyprolinol (Hyp-(GalNAc-alkyl)3)
agaagtctggtgtcctgaaat

SEQ ID NO: 439 - RNA, 21 nt, synthetic construct
  source 1..21: mol_type = other RNA
  modified_base 1: mod_base = OTHER; note = 2'-O-methylguanosine-3'-phosphorothioate
  modified_base 2: mod_base = OTHER; note = 2'-O-methyluridine-3'-phosphorothioate
  modified_base 3: mod_base = OTHER; note = 2'-O-methylcytidine-3'-phosphate
  modified_base 4: mod_base = OTHER; note = 2'-O-methylcytidine-3'-phosphate
  modified_base 5: mod_base = OTHER; note = 2'-O-methyluridine-3'-phosphate
  modified_base 6: mod_base = OTHER; note = 2'-O-methylguanosine-3'-phosphate
  modified_base 7: mod_base = OTHER; note = 2'-fluoroadenosine-3'-phosphate
  modified_base 8: mod_base = OTHER; note = 2'-O-methyladenosine-3'-phosphate
  modified_base 9: mod_base = OTHER; note = 2'-fluoroadenosine-3'-phosphate
  modified_base 10: mod_base = OTHER; note = 2'-fluorocytidine-3'-phosphate
  modified_base 11: mod_base = OTHER; note = 2'-fluorouridine-3'-phosphate
  modified_base 12: mod_base = OTHER; note = 2'-O-methylguanosine-3'-phosphate
  modified_base 13: mod_base = OTHER; note = 2'-O-methylcytidine-3'-phosphate
  modified_base 14: mod_base = OTHER; note = 2'-O-methyladenosine-3'-phosphate
  modified_base 15: mod_base = OTHER; note = 2'-O-methyladenosine-3'-phosphate
  modified_base 16: mod_base = OTHER; note = 2'-O-methylcytidine-3'-phosphate
  modified_base 17: mod_base = OTHER; note = 2'-O-methyluridine-3'-phosphate
  modified_base 18: mod_base = OTHER; note = 2'-O-methyladenosine-3'-phosphate
  modified_base 19: mod_base = OTHER; note = 2'-O-methylguanosine-3'-phosphate
  modified_base 20: mod_base = OTHER; note = 2'-O-methyladenosine-3'-phosphate
  modified_base 21: mod_base = OTHER; note = 2'-O-methyluridine-3'-phosphate N-[tris(GalNAc-alkyl)-amidodecanoyl)]-4-hydroxyprolinol (Hyp-(GalNAc-alkyl)3)
gtcctgaaactgcaactagat

SEQ ID NO: 440 - RNA, 21 nt, synthetic construct
  source 1..21: mol_type = other RNA
  modified_base 1: mod_base = OTHER; note = 2'-O-methyladenosine-3'-phosphorothioate
  modified_base 2: mod_base = OTHER; note = 2'-O-methylcytidine-3'-phosphorothioate
  modified_base 3: mod_base = OTHER; note = 2'-O-methyladenosine-3'-phosphate
  modified_base 4: mod_base = OTHER; note = 2'-O-methylguanosine-3'-phosphate
  modified_base 5: mod_base = OTHER; note = 2'-O-methylcytidine-3'-phosphate
  modified_base 6: mod_base = OTHER; note = 2'-O-methyladenosine-3'-phosphate
  modified_base 7: mod_base = OTHER; note = 2'-fluorocytidine-3'-phosphate
  modified_base 8: mod_base = OTHER; note = 2'-O-methyladenosine-3'-phosphate
  modified_base 9: mod_base = OTHER; note = 2'-fluoroguanosine-3'-phosphate
  modified_base 10: mod_base = OTHER; note = 2'-fluorouridine-3'-phosphate
  modified_base 11: mod_base = OTHER; note = 2'-fluorouridine-3'-phosphate
  modified_base 12: mod_base = OTHER; note = 2'-O-methyladenosine-3'-phosphate
  modified_base 13: mod_base = OTHER; note = 2'-O-methylcytidine-3'-phosphate
  modified_base 14: mod_base = OTHER; note = 2'-O-methyluridine-3'-phosphate
  modified_base 15: mod_base = OTHER; note = 2'-O-methylguanosine-3'-phosphate
  modified_base 16: mod_base = OTHER; note = 2'-O-methylguanosine-3'-phosphate
  modified_base 17: mod_base = OTHER; note = 2'-O-methyladenosine-3'-phosphate
  modified_base 18: mod_base = OTHER; note = 2'-O-methylcytidine-3'-phosphate
  modified_base 19: mod_base = OTHER; note = 2'-O-methyladenosine-3'-phosphate
  modified_base 20: mod_base = OTHER; note = 2'-O-methyladenosine-3'-phosphate
  modified_base 21: mod_base = OTHER; note = 2'-O-methyluridine-3'-phosphate N-[tris(GalNAc-alkyl)-amidodecanoyl)]-4-hydroxyprolinol (Hyp-(GalNAc-alkyl)3)
acagcacagttactggacaat

SEQ ID NO: 441 - RNA, 21 nt, synthetic construct
  source 1..21: mol_type = other RNA
  modified_base 1: mod_base = OTHER; note = 2'-O-methylcytidine-3'-phosphorothioate
  modified_base 2: mod_base = OTHER; note = 2'-O-methyluridine-3'-phosphorothioate
  modified_base 3: mod_base = OTHER; note = 2'-O-methylguanosine-3'-phosphate
  modified_base 4: mod_base = OTHER; note = 2'-O-methylguanosine-3'-phosphate
  modified_base 5: mod_base = OTHER; note = 2'-O-methyladenosine-3'-phosphate
  modified_base 6: mod_base = OTHER; note = 2'-O-methylcytidine-3'-phosphate
  modified_base 7: mod_base = OTHER; note = 2'-fluoroadenosine-3'-phosphate
  modified_base 8: mod_base = OTHER; note = 2'-O-methyladenosine-3'-phosphate
  modified_base 9: mod_base = OTHER; note = 2'-fluorocytidine-3'-phosphate
  modified_base 10: mod_base = OTHER; note = 2'-fluorocytidine-3'-phosphate
  modified_base 11: mod_base = OTHER; note = 2'-fluoroguanosine-3'-phosphate
  modified_base 12: mod_base = OTHER; note = 2'-O-methyladenosine-3'-phosphate
  modified_base 13: mod_base = OTHER; note = 2'-O-methylguanosine-3'-phosphate
  modified_base 14: mod_base = OTHER; note = 2'-O-methylguanosine-3'-phosphate
  modified_base 15: mod_base = OTHER; note = 2'-O-methylcytidine-3'-phosphate
  modified_base 16: mod_base = OTHER; note = 2'-O-methylguanosine-3'-phosphate
  modified_base 17: mod_base = OTHER; note = 2'-O-methylguanosine-3'-phosphate
  modified_base 18: mod_base = OTHER; note = 2'-O-methylcytidine-3'-phosphate
  modified_base 19: mod_base = OTHER; note = 2'-O-methyluridine-3'-phosphate
  modified_base 20: mod_base = OTHER; note = 2'-O-methylcytidine-3'-phosphate
  modified_base 21: mod_base = OTHER; note = 2'-O-methyluridine-3'-phosphate N-[tris(GalNAc-alkyl)-amidodecanoyl)]-4-hydroxyprolinol (Hyp-(GalNAc-alkyl)3)
ctggacaaccgaggcggctct

SEQ ID NO: 442 - RNA, 21 nt, synthetic construct
  source 1..21: mol_type = other RNA
  modified_base 1: mod_base = OTHER; note = 2'-O-methylguanosine-3'-phosphorothioate
  modified_base 2: mod_base = OTHER; note = 2'-O-methylcytidine-3'-phosphorothioate
  modified_base 3: mod_base = OTHER; note = 2'-O-methylguanosine-3'-phosphate
  modified_base 4: mod_base = OTHER; note = 2'-O-methylguanosine-3'-phosphate
  modified_base 5: mod_base = OTHER; note = 2'-O-methylcytidine-3'-phosphate
  modified_base 6: mod_base = OTHER; note = 2'-O-methyluridine-3'-phosphate
  modified_base 7: mod_base = OTHER; note = 2'-fluorocytidine-3'-phosphate
  modified_base 8: mod_base = OTHER; note = 2'-O-methyluridine-3'-phosphate
  modified_base 9: mod_base = OTHER; note = 2'-fluorouridine-3'-phosphate
  modified_base 10: mod_base = OTHER; note = 2'-fluoroguanosine-3'-phosphate
  modified_base 11: mod_base = OTHER; note = 2'-fluoroguanosine-3'-phosphate
  modified_base 12: mod_base = OTHER; note = 2'-O-methyladenosine-3'-phosphate
  modified_base 13: mod_base = OTHER; note = 2'-O-methylcytidine-3'-phosphate
  modified_base 14: mod_base = OTHER; note = 2'-O-methyladenosine-3'-phosphate
  modified_base 15: mod_base = OTHER; note = 2'-O-methylcytidine-3'-phosphate
  modified_base 16: mod_base = OTHER; note = 2'-O-methyladenosine-3'-phosphate
  modified_base 17: mod_base = OTHER; note = 2'-O-methylguanosine-3'-phosphate
  modified_base 18: mod_base = OTHER; note = 2'-O-methylcytidine-3'-phosphate
  modified_base 19: mod_base = OTHER; note = 2'-O-methyladenosine-3'-phosphate
  modified_base 20: mod_base = OTHER; note = 2'-O-methylguanosine-3'-phosphate
  modified_base 21: mod_base = OTHER; note = 2'-O-methyluridine-3'-phosphate N-[tris(GalNAc-alkyl)-amidodecanoyl)]-4-hydroxyprolinol (Hyp-(GalNAc-alkyl)3)
gcggctcttggacacagcagt

SEQ ID NO: 443 - RNA, 21 nt, synthetic construct
  source 1..21: mol_type = other RNA
  modified_base 1: mod_base = OTHER; note = 2'-O-methylguanosine-3'-phosphorothioate
  modified_base 2: mod_base = OTHER; note = 2'-O-methyladenosine-3'-phosphorothioate
  modified_base 3: mod_base = OTHER; note = 2'-O-methylcytidine-3'-phosphate
  modified_base 4: mod_base = OTHER; note = 2'-O-methyladenosine-3'-phosphate
  modified_base 5: mod_base = OTHER; note = 2'-O-methylcytidine-3'-phosphate
  modified_base 6: mod_base = OTHER; note = 2'-O-methylcytidine-3'-phosphate
  modified_base 7: mod_base = OTHER; note = 2'-fluoroadenosine-3'-phosphate
  modified_base 8: mod_base = OTHER; note = 2'-O-methylguanosine-3'-phosphate
  modified_base 9: mod_base = OTHER; note = 2'-fluorocytidine-3'-phosphate
  modified_base 10: mod_base = OTHER; note = 2'-fluoroadenosine-3'-phosphate
  modified_base 11: mod_base = OTHER; note = 2'-fluoroguanosine-3'-phosphate
  modified_base 12: mod_base = OTHER; note = 2'-O-methylcytidine-3'-phosphate
  modified_base 13: mod_base = OTHER; note = 2'-O-methylcytidine-3'-phosphate
  modified_base 14: mod_base = OTHER; note = 2'-O-methylcytidine-3'-phosphate
  modified_base 15: mod_base = OTHER; note = 2'-O-methyluridine-3'-phosphate
  modified_base 16: mod_base = OTHER; note = 2'-O-methyluridine-3'-phosphate
  modified_base 17: mod_base = OTHER; note = 2'-O-methylcytidine-3'-phosphate
  modified_base 18: mod_base = OTHER; note = 2'-O-methylcytidine-3'-phosphate
  modified_base 19: mod_base = OTHER; note = 2'-O-methyluridine-3'-phosphate
  modified_base 20: mod_base = OTHER; note = 2'-O-methyladenosine-3'-phosphate
  modified_base 21: mod_base = OTHER; note = 2'-O-methyluridine-3'-phosphate N-[tris(GalNAc-alkyl)-amidodecanoyl)]-4-hydroxyprolinol (Hyp-(GalNAc-alkyl)3)
gacaccagcagcccttcctat

SEQ ID NO: 444 - RNA, 21 nt, synthetic construct
  source 1..21: mol_type = other RNA
  modified_base 1: mod_base = OTHER; note = 2'-O-methylcytidine-3'-phosphorothioate
  modified_base 2: mod_base = OTHER; note = 2'-O-methylcytidine-3'-phosphorothioate
  modified_base 3: mod_base = OTHER; note = 2'-O-methyluridine-3'-phosphate
  modified_base 4: mod_base = OTHER; note = 2'-O-methyluridine-3'-phosphate
  modified_base 5: mod_base = OTHER; note = 2'-O-methylcytidine-3'-phosphate
  modified_base 6: mod_base = OTHER; note = 2'-O-methylcytidine-3'-phosphate
  modified_base 7: mod_base = OTHER; note = 2'-fluorouridine-3'-phosphate
  modified_base 8: mod_base = OTHER; note = 2'-O-methyladenosine-3'-phosphate
  modified_base 9: mod_base = OTHER; note = 2'-fluoroguanosine-3'-phosphate
  modified_base 10: mod_base = OTHER; note = 2'-fluoroadenosine-3'-phosphate
  modified_base 11: mod_base = OTHER; note = 2'-fluoroguanosine-3'-phosphate
  modified_base 12: mod_base = OTHER; note = 2'-O-methylcytidine-3'-phosphate
  modified_base 13: mod_base = OTHER; note = 2'-O-methyluridine-3'-phosphate
  modified_base 14: mod_base = OTHER; note = 2'-O-methyluridine-3'-phosphate
  modified_base 15: mod_base = OTHER; note = 2'-O-methyladenosine-3'-phosphate
  modified_base 16: mod_base = OTHER; note = 2'-O-methyladenosine-3'-phosphate
  modified_base 17: mod_base = OTHER; note = 2'-O-methylguanosine-3'-phosphate
  modified_base 18: mod_base = OTHER; note = 2'-O-methyladenosine-3'-phosphate
  modified_base 19: mod_base = OTHER; note = 2'-O-methyluridine-3'-phosphate
  modified_base 20: mod_base = OTHER; note = 2'-O-methylcytidine-3'-phosphate
  modified_base 21: mod_base = OTHER; note = 2'-O-methyluridine-3'-phosphate N-[tris(GalNAc-alkyl)-amidodecanoyl)]-4-hydroxyprolinol (Hyp-(GalNAc-alkyl)3)
ccttcctagagcttaagatct

SEQ ID NO: 445 - RNA, 21 nt, synthetic construct
  source 1..21: mol_type = other RNA
  modified_base 1: mod_base = OTHER; note = 2'-O-methylcytidine-3'-phosphorothioate
  modified_base 2: mod_base = OTHER; note = 2'-O-methyluridine-3'-phosphorothioate
  modified_base 3: mod_base = OTHER; note = 2'-O-methyluridine-3'-phosphate
  modified_base 4: mod_base = OTHER; note = 2'-O-methyladenosine-3'-phosphate
  modified_base 5: mod_base = OTHER; note = 2'-O-methyladenosine-3'-phosphate
  modified_base 6: mod_base = OTHER; note = 2'-O-methylguanosine-3'-phosphate
  modified_base 7: mod_base = OTHER; note = 2'-fluoroadenosine-3'-phosphate
  modified_base 8: mod_base = OTHER; note = 2'-O-methyluridine-3'-phosphate
  modified_base 9: mod_base = OTHER; note = 2'-fluorocytidine-3'-phosphate
  modified_base 10: mod_base = OTHER; note = 2'-fluorocytidine-3'-phosphate
  modified_base 11: mod_base = OTHER; note = 2'-fluoroguanosine-3'-phosphate
  modified_base 12: mod_base = OTHER; note = 2'-O-methyladenosine-3'-phosphate
  modified_base 13: mod_base = OTHER; note = 2'-O-methylguanosine-3'-phosphate
  modified_base 14: mod_base = OTHER; note = 2'-O-methylcytidine-3'-phosphate
  modified_base 15: mod_base = OTHER; note = 2'-O-methylcytidine-3'-phosphate
  modified_base 16: mod_base = OTHER; note = 2'-O-methyladenosine-3'-phosphate
  modified_base 17: mod_base = OTHER; note = 2'-O-methyladenosine-3'-phosphate
  modified_base 18: mod_base = OTHER; note = 2'-O-methyluridine-3'-phosphate
  modified_base 19: mod_base = OTHER; note = 2'-O-methylguanosine-3'-phosphate
  modified_base 20: mod_base = OTHER; note = 2'-O-methyladenosine-3'-phosphate
  modified_base 21: mod_base = OTHER; note = 2'-O-methyluridine-3'-phosphate N-[tris(GalNAc-alkyl)-amidodecanoyl)]-4-hydroxyprolinol (Hyp-(GalNAc-alkyl)3)
cttaagatccgagccaatgat

SEQ ID NO: 446 - RNA, 21 nt, synthetic construct
  source 1..21: mol_type = other RNA
  modified_base 1: mod_base = OTHER; note = 2'-O-methyladenosine-3'-phosphorothioate
  modified_base 2: mod_base = OTHER; note = 2'-O-methylguanosine-3'-phosphorothioate
  modified_base 3: mod_base = OTHER; note = 2'-O-methylcytidine-3'-phosphate
  modified_base 4: mod_base = OTHER; note = 2'-O-methylcytidine-3'-phosphate
  modified_base 5: mod_base = OTHER; note = 2'-O-methyladenosine-3'-phosphate
  modified_base 6: mod_base = OTHER; note = 2'-O-methyladenosine-3'-phosphate
  modified_base 7: mod_base = OTHER; note = 2'-fluorouridine-3'-phosphate
  modified_base 8: mod_base = OTHER; note = 2'-O-methylguanosine-3'-phosphate
  modified_base 9: mod_base = OTHER; note = 2'-fluoroadenosine-3'-phosphate
  modified_base 10: mod_base = OTHER; note = 2'-fluoroguanosine-3'-phosphate
  modified_base 11: mod_base = OTHER; note = 2'-fluorocytidine-3'-phosphate
  modified_base 12: mod_base = OTHER; note = 2'-O-methylcytidine-3'-phosphate
  modified_base 13: mod_base = OTHER; note = 2'-O-methyluridine-3'-phosphate
  modified_base 14: mod_base = OTHER; note = 2'-O-methylguanosine-3'-phosphate
  modified_base 15: mod_base = OTHER; note = 2'-O-methylguanosine-3'-phosphate
  modified_base 16: mod_base = OTHER; note = 2'-O-methyladenosine-3'-phosphate
  modified_base 17: mod_base = OTHER; note = 2'-O-methylguanosine-3'-phosphate
  modified_base 18: mod_base = OTHER; note = 2'-O-methylcytidine-3'-phosphate
  modified_base 19: mod_base = OTHER; note = 2'-O-methyladenosine-3'-phosphate
  modified_base 20: mod_base = OTHER; note = 2'-O-methylguanosine-3'-phosphate
  modified_base 21: mod_base = OTHER; note = 2'-O-methyluridine-3'-phosphate N-[tris(GalNAc-alkyl)-amidodecanoyl)]-4-hydroxyprolinol (Hyp-(GalNAc-alkyl)3)
agccaatgagcctggagcagt

SEQ ID NO: 447 - RNA, 21 nt, synthetic construct
  source 1..21: mol_type = other RNA
  modified_base 1: mod_base = OTHER; note = 2'-O-methyladenosine-3'-phosphorothioate
  modified_base 2: mod_base = OTHER; note = 2'-O-methylguanosine-3'-phosphorothioate
  modified_base 3: mod_base = OTHER; note = 2'-O-methylguanosine-3'-phosphate
  modified_base 4: mod_base = OTHER; note = 2'-O-methylcytidine-3'-phosphate
  modified_base 5: mod_base = OTHER; note = 2'-O-methylguanosine-3'-phosphate
  modified_base 6: mod_base = OTHER; note = 2'-O-methyladenosine-3'-phosphate
  modified_base 7: mod_base = OTHER; note = 2'-fluoroguanosine-3'-phosphate
  modified_base 8: mod_base = OTHER; note = 2'-O-methyladenosine-3'-phosphate
  modified_base 9: mod_base = OTHER; note = 2'-fluorocytidine-3'-phosphate
  modified_base 10: mod_base = OTHER; note = 2'-fluorocytidine-3'-phosphate
  modified_base 11: mod_base = OTHER; note = 2'-fluoroadenosine-3'-phosphate
  modified_base 12: mod_base = OTHER; note = 2'-O-methyluridine-3'-phosphate
  modified_base 13: mod_base = OTHER; note = 2'-O-methyluridine-3'-phosphate
  modified_base 14: mod_base = OTHER; note = 2'-O-methyladenosine-3'-phosphate
  modified_base 15: mod_base = OTHER; note = 2'-O-methylcytidine-3'-phosphate
  modified_base 16: mod_base = OTHER; note = 2'-O-methylguanosine-3'-phosphate
  modified_base 17: mod_base = OTHER; note = 2'-O-methyluridine-3'-phosphate
  modified_base 18: mod_base = OTHER; note = 2'-O-methyladenosine-3'-phosphate
  modified_base 19: mod_base = OTHER; note = 2'-O-methylguanosine-3'-phosphate
  modified_base 20: mod_base = OTHER; note = 2'-O-methyladenosine-3'-phosphate
  modified_base 21: mod_base = OTHER; note = 2'-O-methyluridine-3'-phosphate N-[tris(GalNAc-alkyl)-amidodecanoyl)]-4-hydroxyprolinol (Hyp-(GalNAc-alkyl)3)
aggcgagaccattacgtagat

SEQ ID NO: 448 - RNA, 21 nt, synthetic construct
  source 1..21: mol_type = other RNA
  modified_base 1: mod_base = OTHER; note = 2'-O-methyluridine-3'-phosphorothioate
  modified_base 2: mod_base = OTHER; note = 2'-O-methyladenosine-3'-phosphorothioate
  modified_base 3: mod_base = OTHER; note = 2'-O-methylcytidine-3'-phosphate
  modified_base 4: mod_base = OTHER; note = 2'-O-methylguanosine-3'-phosphate
  modified_base 5: mod_base = OTHER; note = 2'-O-methyluridine-3'-phosphate
  modified_base 6: mod_base = OTHER; note = 2'-O-methyladenosine-3'-phosphate
  modified_base 7: mod_base = OTHER; note = 2'-fluoroguanosine-3'-phosphate
  modified_base 8: mod_base = OTHER; note = 2'-O-methyladenosine-3'-phosphate
  modified_base 9: mod_base = OTHER; note = 2'-fluorocytidine-3'-phosphate
  modified_base 10: mod_base = OTHER; note = 2'-fluorouridine-3'-phosphate
  modified_base 11: mod_base = OTHER; note = 2'-fluorouridine-3'-phosphate
  modified_base 12: mod_base = OTHER; note = 2'-O-methylcytidine-3'-phosphate
  modified_base 13: mod_base = OTHER; note = 2'-O-methylcytidine-3'-phosphate
  modified_base 14: mod_base = OTHER; note = 2'-O-methyladenosine-3'-phosphate
  modified_base 15: mod_base = OTHER; note = 2'-O-methylguanosine-3'-phosphate
  modified_base 16: mod_base = OTHER; note = 2'-O-methylguanosine-3'-phosphate
  modified_base 17: mod_base = OTHER; note = 2'-O-methyladenosine-3'-phosphate
  modified_base 18: mod_base = OTHER; note = 2'-O-methyladenosine-3'-phosphate
  modified_base 19: mod_base = OTHER; note = 2'-O-methylcytidine-3'-phosphate
  modified_base 20: mod_base = OTHER; note = 2'-O-methyluridine-3'-phosphate
  modified_base 21: mod_base = OTHER; note = 2'-O-methyluridine-3'-phosphate N-[tris(GalNAc-alkyl)-amidodecanoyl)]-4-hydroxyprolinol (Hyp-(GalNAc-alkyl)3)
tacgtagacttccaggaactt

SEQ ID NO: 449 - RNA, 21 nt, synthetic construct
  source 1..21: mol_type = other RNA
  modified_base 1: mod_base = OTHER; note = 2'-O-methylcytidine-3'-phosphorothioate
  modified_base 2: mod_base = OTHER; note = 2'-O-methyladenosine-3'-phosphorothioate
  modified_base 3: mod_base = OTHER; note = 2'-O-methylguanosine-3'-phosphate
  modified_base 4: mod_base = OTHER; note = 2'-O-methylguanosine-3'-phosphate
  modified_base 5: mod_base = OTHER; note = 2'-O-methyladenosine-3'-phosphate
  modified_base 6: mod_base = OTHER; note = 2'-O-methyladenosine-3'-phosphate
  modified_base 7: mod_base = OTHER; note = 2'-fluorocytidine-3'-phosphate
  modified_base 8: mod_base = OTHER; note = 2'-O-methyluridine-3'-phosphate
  modified_base 9: mod_base = OTHER; note = 2'-fluoroguanosine-3'-phosphate
  modified_base 10: mod_base = OTHER; note = 2'-fluoroguanosine-3'-phosphate
  modified_base 11: mod_base = OTHER; note = 2'-fluoroguanosine-3'-phosphate
  modified_base 12: mod_base = OTHER; note = 2'-O-methyladenosine-3'-phosphate
  modified_base 13: mod_base = OTHER; note = 2'-O-methyluridine-3'-phosphate
  modified_base 14: mod_base = OTHER; note = 2'-O-methylguanosine-3'-phosphate
  modified_base 15: mod_base = OTHER; note = 2'-O-methylguanosine-3'-phosphate
  modified_base 16: mod_base = OTHER; note = 2'-O-methylcytidine-3'-phosphate
  modified_base 17: mod_base = OTHER; note = 2'-O-methylguanosine-3'-phosphate
  modified_base 18: mod_base = OTHER; note = 2'-O-methylguanosine-3'-phosphate
  modified_base 19: mod_base = OTHER; note = 2'-O-methylguanosine-3'-phosphate
  modified_base 20: mod_base = OTHER; note = 2'-O-methyladenosine-3'-phosphate
  modified_base 21: mod_base = OTHER; note = 2'-O-methyluridine-3'-phosphate N-[tris(GalNAc-alkyl)-amidodecanoyl)]-4-hydroxyprolinol (Hyp-(GalNAc-alkyl)3)
caggaactgggatggcgggat

SEQ ID NO: 450 - RNA, 21 nt, synthetic construct
  source 1..21: mol_type = other RNA
  modified_base 1: mod_base = OTHER; note = 2'-O-methylguanosine-3'-phosphorothioate
  modified_base 2: mod_base = OTHER; note = 2'-O-methylcytidine-3'-phosphorothioate
  modified_base 3: mod_base = OTHER; note = 2'-O-methylguanosine-3'-phosphate
  modified_base 4: mod_base = OTHER; note = 2'-O-methylguanosine-3'-phosphate
  modified_base 5: mod_base = OTHER; note = 2'-O-methylguanosine-3'-phosphate
  modified_base 6: mod_base = OTHER; note = 2'-O-methyladenosine-3'-phosphate
  modified_base 7: mod_base = OTHER; note = 2'-fluorocytidine-3'-phosphate
  modified_base 8: mod_base = OTHER; note = 2'-O-methyluridine-3'-phosphate
  modified_base 9: mod_base = OTHER; note = 2'-fluoroguanosine-3'-phosphate
  modified_base 10: mod_base = OTHER; note = 2'-fluoroguanosine-3'-phosphate
  modified_base 11: mod_base = OTHER; note = 2'-fluoroadenosine-3'-phosphate
  modified_base 12: mod_base = OTHER; note = 2'-O-methyluridine-3'-phosphate
  modified_base 13: mod_base = OTHER; note = 2'-O-methyladenosine-3'-phosphate
  modified_base 14: mod_base = OTHER; note = 2'-O-methylcytidine-3'-phosphate
  modified_base 15: mod_base = OTHER; note = 2'-O-methyluridine-3'-phosphate
  modified_base 16: mod_base = OTHER; note = 2'-O-methylguanosine-3'-phosphate
  modified_base 17: mod_base = OTHER; note = 2'-O-methylcytidine-3'-phosphate
  modified_base 18: mod_base = OTHER; note = 2'-O-methyladenosine-3'-phosphate
  modified_base 19: mod_base = OTHER; note = 2'-O-methylguanosine-3'-phosphate
  modified_base 20: mod_base = OTHER; note = 2'-O-methylcytidine-3'-phosphate
  modified_base 21: mod_base = OTHER; note = 2'-O-methyluridine-3'-phosphate N-[tris(GalNAc-alkyl)-amidodecanoyl)]-4-hydroxyprolinol (Hyp-(GalNAc-alkyl)3)
gcgggactggatactgcagct

SEQ ID NO: 451 - RNA, 21 nt, synthetic construct
  source 1..21: mol_type = other RNA
  modified_base 1: mod_base = OTHER; note = 2'-O-methyluridine-3'-phosphorothioate
  modified_base 2: mod_base = OTHER; note = 2'-O-methyladenosine-3'-phosphorothioate
  modified_base 3: mod_base = OTHER; note = 2'-O-methylcytidine-3'-phosphate
  modified_base 4: mod_base = OTHER; note = 2'-O-methylcytidine-3'-phosphate
  modified_base 5: mod_base = OTHER; note = 2'-O-methyladenosine-3'-phosphate
  modified_base 6: mod_base = OTHER; note = 2'-O-methylguanosine-3'-phosphate
  modified_base 7: mod_base = OTHER; note = 2'-fluorocytidine-3'-phosphate
  modified_base 8: mod_base = OTHER; note = 2'-O-methyluridine-3'-phosphate
  modified_base 9: mod_base = OTHER; note = 2'-fluoroguanosine-3'-phosphate
  modified_base 10: mod_base = OTHER; note = 2'-fluoroadenosine-3'-phosphate
  modified_base 11: mod_base = OTHER; note = 2'-fluoroadenosine-3'-phosphate
  modified_base 12: mod_base = OTHER; note = 2'-O-methyluridine-3'-phosphate
  modified_base 13: mod_base = OTHER; note = 2'-O-methyluridine-3'-phosphate
  modified_base 14: mod_base = OTHER; note = 2'-O-methyladenosine-3'-phosphate
  modified_base 15: mod_base = OTHER; note = 2'-O-methylcytidine-3'-phosphate
  modified_base 16: mod_base = OTHER; note = 2'-O-methyluridine-3'-phosphate
  modified_base 17: mod_base = OTHER; note = 2'-O-methylguanosine-3'-phosphate
  modified_base 18: mod_base = OTHER; note = 2'-O-methylcytidine-3'-phosphate
  modified_base 19: mod_base = OTHER; note = 2'-O-methyladenosine-3'-phosphate
  modified_base 20: mod_base = OTHER; note = 2'-O-methylguanosine-3'-phosphate
  modified_base 21: mod_base = OTHER; note = 2'-O-methyluridine-3'-phosphate N-[tris(GalNAc-alkyl)-amidodecanoyl)]-4-hydroxyprolinol (Hyp-(GalNAc-alkyl)3)
taccagctgaattactgcagt

SEQ ID NO: 452 - RNA, 21 nt, synthetic construct
  source 1..21: mol_type = other RNA
  modified_base 1: mod_base = OTHER; note = 2'-O-methyladenosine-3'-phosphorothioate
  modified_base 2: mod_base = OTHER; note = 2'-O-methylcytidine-3'-phosphorothioate
  modified_base 3: mod_base = OTHER; note = 2'-O-methyluridine-3'-phosphate
  modified_base 4: mod_base = OTHER; note = 2'-O-methylguanosine-3'-phosphate
  modified_base 5: mod_base = OTHER; note = 2'-O-methylcytidine-3'-phosphate
  modified_base 6: mod_base = OTHER; note = 2'-O-methyladenosine-3'-phosphate
  modified_base 7: mod_base = OTHER; note = 2'-fluoroguanosine-3'-phosphate
  modified_base 8: mod_base = OTHER; note = 2'-O-methyluridine-3'-phosphate
  modified_base 9: mod_base = OTHER; note = 2'-fluoroguanosine-3'-phosphate
  modified_base 10: mod_base = OTHER; note = 2'-fluoroguanosine-3'-phosphate
  modified_base 11: mod_base = OTHER; note = 2'-fluoroguanosine-3'-phosphate
  modified_base 12: mod_base = OTHER; note = 2'-O-methylcytidine-3'-phosphate
  modified_base 13: mod_base = OTHER; note = 2'-O-methyladenosine-3'-phosphate
  modified_base 14: mod_base = OTHER; note = 2'-O-methylguanosine-3'-phosphate
  modified_base 15: mod_base = OTHER; note = 2'-O-methyluridine-3'-phosphate
  modified_base 16: mod_base = OTHER; note = 2'-O-methylguanosine-3'-phosphate
  modified_base 17: mod_base = OTHER; note = 2'-O-methylcytidine-3'-phosphate
  modified_base 18: mod_base = OTHER; note = 2'-O-methylcytidine-3'-phosphate
  modified_base 19: mod_base = OTHER; note = 2'-O-methylcytidine-3'-phosphate
  modified_base 20: mod_base = OTHER; note = 2'-O-methyluridine-3'-phosphate
  modified_base 21: mod_base = OTHER; note = 2'-O-methyluridine-3'-phosphate N-[tris(GalNAc-alkyl)-amidodecanoyl)]-4-hydroxyprolinol (Hyp-(GalNAc-alkyl)3)
actgcagtgggcagtgccctt

SEQ ID NO: 453 - RNA, 21 nt, synthetic construct
  source 1..21: mol_type = other RNA
  modified_base 1: mod_base = OTHER; note = 2'-O-methylcytidine-3'-phosphorothioate
  modified_base 2: mod_base = OTHER; note = 2'-O-methyladenosine-3'-phosphorothioate
  modified_base 3: mod_base = OTHER; note = 2'-O-methylguanosine-3'-phosphate
  modified_base 4: mod_base = OTHER; note = 2'-O-methylguanosine-3'-phosphate
  modified_base 5: mod_base = OTHER; note = 2'-O-methylcytidine-3'-phosphate
  modified_base 6: mod_base = OTHER; note = 2'-O-methyladenosine-3'-phosphate
  modified_base 7: mod_base = OTHER; note = 2'-fluorouridine-3'-phosphate
  modified_base 8: mod_base = OTHER; note = 2'-O-methyluridine-3'-phosphate
  modified_base 9: mod_base = OTHER; note = 2'-fluoroguanosine-3'-phosphate
  modified_base 10: mod_base = OTHER; note = 2'-fluorocytidine-3'-phosphate
  modified_base 11: mod_base = OTHER; note = 2'-fluorouridine-3'-phosphate
  modified_base 12: mod_base = OTHER; note = 2'-O-methylguanosine-3'-phosphate
  modified_base 13: mod_base = OTHER; note = 2'-O-methylcytidine-3'-phosphate
  modified_base 14: mod_base = OTHER; note = 2'-O-methylcytidine-3'-phosphate
  modified_base 15: mod_base = OTHER; note = 2'-O-methyluridine-3'-phosphate
  modified_base 16: mod_base = OTHER; note = 2'-O-methylcytidine-3'-phosphate
  modified_base 17: mod_base = OTHER; note = 2'-O-methyluridine-3'-phosphate
  modified_base 18: mod_base = OTHER; note = 2'-O-methyluridine-3'-phosphate
  modified_base 19: mod_base = OTHER; note = 2'-O-methyluridine-3'-phosphate
  modified_base 20: mod_base = OTHER; note = 2'-O-methylcytidine-3'-phosphate
  modified_base 21: mod_base = OTHER; note = 2'-O-methyluridine-3'-phosphate N-[tris(GalNAc-alkyl)-amidodecanoyl)]-4-hydroxyprolinol (Hyp-(GalNAc-alkyl)3)
caggcattgctgcctctttct

SEQ ID NO: 454 - RNA, 21 nt, synthetic construct
  source 1..21: mol_type = other RNA
  modified_base 1: mod_base = OTHER; note = 2'-O-methyluridine-3'-phosphorothioate
  modified_base 2: mod_base = OTHER; note = 2'-O-methyluridine-3'-phosphorothioate
  modified_base 3: mod_base = OTHER; note = 2'-O-methyluridine-3'-phosphate
  modified_base 4: mod_base = OTHER; note = 2'-O-methylcytidine-3'-phosphate
  modified_base 5: mod_base = OTHER; note = 2'-O-methylcytidine-3'-phosphate
  modified_base 6: mod_base = OTHER; note = 2'-O-methyladenosine-3'-phosphate
  modified_base 7: mod_base = OTHER; note = 2'-fluorouridine-3'-phosphate
  modified_base 8: mod_base = OTHER; note = 2'-O-methyluridine-3'-phosphate
  modified_base 9: mod_base = OTHER; note = 2'-fluorocytidine-3'-phosphate
  modified_base 10: mod_base = OTHER; note = 2'-fluorouridine-3'-phosphate
  modified_base 11: mod_base = OTHER; note = 2'-fluoroguanosine-3'-phosphate
  modified_base 12: mod_base = OTHER; note = 2'-O-methylcytidine-3'-phosphate
  modified_base 13: mod_base = OTHER; note = 2'-O-methylcytidine-3'-phosphate
  modified_base 14: mod_base = OTHER; note = 2'-O-methylguanosine-3'-phosphate
  modified_base 15: mod_base = OTHER; note = 2'-O-methyluridine-3'-phosphate
  modified_base 16: mod_base = OTHER; note = 2'-O-methylcytidine-3'-phosphate
  modified_base 17: mod_base = OTHER; note = 2'-O-methyluridine-3'-phosphate
  modified_base 18: mod_base = OTHER; note = 2'-O-methyluridine-3'-phosphate
  modified_base 19: mod_base = OTHER; note = 2'-O-methylcytidine-3'-phosphate
  modified_base 20: mod_base = OTHER; note = 2'-O-methyladenosine-3'-phosphate
  modified_base 21: mod_base = OTHER; note = 2'-O-methyluridine-3'-phosphate N-[tris(GalNAc-alkyl)-amidodecanoyl)]-4-hydroxyprolinol (Hyp-(GalNAc-alkyl)3)
tttccattctgccgtcttcat

SEQ ID NO: 455 - RNA, 21 nt, synthetic construct
  source 1..21: mol_type = other RNA
  modified_base 1: mod_base = OTHER; note = 2'-O-methylcytidine-3'-phosphorothioate
  modified_base 2: mod_base = OTHER; note = 2'-O-methylguanosine-3'-phosphorothioate
  modified_base 3: mod_base = OTHER; note = 2'-O-methyluridine-3'-phosphate
  modified_base 4: mod_base = OTHER; note = 2'-O-methylcytidine-3'-phosphate
  modified_base 5: mod_base = OTHER; note = 2'-O-methyluridine-3'-phosphate
  modified_base 6: mod_base = OTHER; note = 2'-O-methyluridine-3'-phosphate
  modified_base 7: mod_base = OTHER; note = 2'-fluorocytidine-3'-phosphate
  modified_base 8: mod_base = OTHER; note = 2'-O-methyladenosine-3'-phosphate
  modified_base 9: mod_base = OTHER; note = 2'-fluoroguanosine-3'-phosphate
  modified_base 10: mod_base = OTHER; note = 2'-fluorocytidine-3'-phosphate
  modified_base 11: mod_base = OTHER; note = 2'-fluorocytidine-3'-phosphate
  modified_base 12: mod_base = OTHER; note = 2'-O-methyluridine-3'-phosphate
  modified_base 13: mod_base = OTHER; note = 2'-O-methylcytidine-3'-phosphate
  modified_base 14: mod_base = OTHER; note = 2'-O-methylcytidine-3'-phosphate
  modified_base 15: mod_base = OTHER; note = 2'-O-methyluridine-3'-phosphate
  modified_base 16: mod_base = OTHER; note = 2'-O-methylcytidine-3'-phosphate
  modified_base 17: mod_base = OTHER; note = 2'-O-methyladenosine-3'-phosphate
  modified_base 18: mod_base = OTHER; note = 2'-O-methyladenosine-3'-phosphate
  modified_base 19: mod_base = OTHER; note = 2'-O-methyladenosine-3'-phosphate
  modified_base 20: mod_base = OTHER; note = 2'-O-methylguanosine-3'-phosphate
  modified_base 21: mod_base = OTHER; note = 2'-O-methyluridine-3'-phosphate N-[tris(GalNAc-alkyl)-amidodecanoyl)]-4-hydroxyprolinol (Hyp-(GalNAc-alkyl)3)
cgtcttcagcctcctcaaagt

SEQ ID NO: 456 - RNA, 21 nt, synthetic construct
  source 1..21: mol_type = other RNA
  modified_base 1: mod_base = OTHER; note = 2'-O-methylcytidine-3'-phosphorothioate
  modified_base 2: mod_base = OTHER; note = 2'-O-methylcytidine-3'-phosphorothioate
  modified_base 3: mod_base = OTHER; note = 2'-O-methyluridine-3'-phosphate
  modified_base 4: mod_base = OTHER; note = 2'-O-methylcytidine-3'-phosphate
  modified_base 5: mod_base = OTHER; note = 2'-O-methyladenosine-3'-phosphate
  modified_base 6: mod_base = OTHER; note = 2'-O-methyladenosine-3'-phosphate
  modified_base 7: mod_base = OTHER; note = 2'-fluoroadenosine-3'-phosphate
  modified_base 8: mod_base = OTHER; note = 2'-O-methylguanosine-3'-phosphate
  modified_base 9: mod_base = OTHER; note = 2'-fluorocytidine-3'-phosphate
  modified_base 10: mod_base = OTHER; note = 2'-fluorocytidine-3'-phosphate
  modified_base 11: mod_base = OTHER; note = 2'-fluoroadenosine-3'-phosphate
  modified_base 12: mod_base = OTHER; note = 2'-O-methyladenosine-3'-phosphate
  modified_base 13: mod_base = OTHER; note = 2'-O-methylcytidine-3'-phosphate
  modified_base 14: mod_base = OTHER; note = 2'-O-methyladenosine-3'-phosphate
  modified_base 15: mod_base = OTHER; note = 2'-O-methyladenosine-3'-phosphate
  modified_base 16: mod_base = OTHER; note = 2'-O-methyluridine-3'-phosphate
  modified_base 17: mod_base = OTHER; note = 2'-O-methylcytidine-3'-phosphate
  modified_base 18: mod_base = OTHER; note = 2'-O-methylcytidine-3'-phosphate
  modified_base 19: mod_base = OTHER; note = 2'-O-methyluridine-3'-phosphate
  modified_base 20: mod_base = OTHER; note = 2'-O-methyluridine-3'-phosphate
  modified_base 21: mod_base = OTHER; note = 2'-O-methyluridine-3'-phosphate N-[tris(GalNAc-alkyl)-amidodecanoyl)]-4-hydroxyprolinol (Hyp-(GalNAc-alkyl)3)
cctcaaagccaacaatccttt

SEQ ID NO: 457 - RNA, 21 nt, synthetic construct
  source 1..21: mol_type = other RNA
  modified_base 1: mod_base = OTHER; note = 2'-O-methylcytidine-3'-phosphorothioate
  modified_base 2: mod_base = OTHER; note = 2'-O-methyluridine-3'-phosphorothioate
  modified_base 3: mod_base = OTHER; note = 2'-O-methyluridine-3'-phosphate
  modified_base 4: mod_base = OTHER; note = 2'-O-methylguanosine-3'-phosphate
  modified_base 5: mod_base = OTHER; note = 2'-O-methylguanosine-3'-phosphate
  modified_base 6: mod_base = OTHER; note = 2'-O-methylcytidine-3'-phosphate
  modified_base 7: mod_base = OTHER; note = 2'-fluorocytidine-3'-phosphate
  modified_base 8: mod_base = OTHER; note = 2'-O-methyluridine-3'-phosphate
  modified_base 9: mod_base = OTHER; note = 2'-fluoroguanosine-3'-phosphate
  modified_base 10: mod_base = OTHER; note = 2'-fluorocytidine-3'-phosphate
  modified_base 11: mod_base = OTHER; note = 2'-fluorocytidine-3'-phosphate
  modified_base 12: mod_base = OTHER; note = 2'-O-methyladenosine-3'-phosphate
  modified_base 13: mod_base = OTHER; note = 2'-O-methylguanosine-3'-phosphate
  modified_base 14: mod_base = OTHER; note = 2'-O-methyluridine-3'-phosphate
  modified_base 15: mod_base = OTHER; note = 2'-O-methyladenosine-3'-phosphate
  modified_base 16: mod_base = OTHER; note = 2'-O-methylcytidine-3'-phosphate
  modified_base 17: mod_base = OTHER; note = 2'-O-methylcytidine-3'-phosphate
  modified_base 18: mod_base = OTHER; note = 2'-O-methyluridine-3'-phosphate
  modified_base 19: mod_base = OTHER; note = 2'-O-methylcytidine-3'-phosphate
  modified_base 20: mod_base = OTHER; note = 2'-O-methylcytidine-3'-phosphate
  modified_base 21: mod_base = OTHER; note = 2'-O-methyluridine-3'-phosphate N-[tris(GalNAc-alkyl)-amidodecanoyl)]-4-hydroxyprolinol (Hyp-(GalNAc-alkyl)3)
cttggcctgccagtacctcct

SEQ ID NO: 458 - RNA, 21 nt, synthetic construct
  source 1..21: mol_type = other RNA
  modified_base 1: mod_base = OTHER; note = 2'-O-methyluridine-3'-phosphorothioate
  modified_base 2: mod_base = OTHER; note = 2'-O-methyladenosine-3'-phosphorothioate
  modified_base 3: mod_base = OTHER; note = 2'-O-methylcytidine-3'-phosphate
  modified_base 4: mod_base = OTHER; note = 2'-O-methylcytidine-3'-phosphate
  modified_base 5: mod_base = OTHER; note = 2'-O-methyluridine-3'-phosphate
  modified_base 6: mod_base = OTHER; note = 2'-O-methylcytidine-3'-phosphate
  modified_base 7: mod_base = OTHER; note = 2'-fluorocytidine-3'-phosphate
  modified_base 8: mod_base = OTHER; note = 2'-O-methyluridine-3'-phosphate
  modified_base 9: mod_base = OTHER; note = 2'-fluoroguanosine-3'-phosphate
  modified_base 10: mod_base = OTHER; note = 2'-fluorouridine-3'-phosphate
  modified_base 11: mod_base = OTHER; note = 2'-fluorouridine-3'-phosphate
  modified_base 12: mod_base = OTHER; note = 2'-O-methylguanosine-3'-phosphate
  modified_base 13: mod_base = OTHER; note = 2'-O-methyluridine-3'-phosphate
  modified_base 14: mod_base = OTHER; note = 2'-O-methylguanosine-3'-phosphate
  modified_base 15: mod_base = OTHER; note = 2'-O-methyluridine-3'-phosphate
  modified_base 16: mod_base = OTHER; note = 2'-O-methylcytidine-3'-phosphate
  modified_base 17: mod_base = OTHER; note = 2'-O-methylcytidine-3'-phosphate
  modified_base 18: mod_base = OTHER; note = 2'-O-methylcytidine-3'-phosphate
  modified_base 19: mod_base = OTHER; note = 2'-O-methyluridine-3'-phosphate
  modified_base 20: mod_base = OTHER; note = 2'-O-methyladenosine-3'-phosphate
  modified_base 21: mod_base = OTHER; note = 2'-O-methyluridine-3'-phosphate N-[tris(GalNAc-alkyl)-amidodecanoyl)]-4-hydroxyprolinol (Hyp-(GalNAc-alkyl)3)
tacctcctgttgtgtccctat

SEQ ID NO: 459 - RNA, 21 nt, synthetic construct
  source 1..21: mol_type = other RNA
  modified_base 1: mod_base = OTHER; note = 2'-O-methylguanosine-3'-phosphorothioate
  modified_base 2: mod_base = OTHER; note = 2'-O-methyluridine-3'-phosphorothioate
  modified_base 3: mod_base = OTHER; note = 2'-O-methylguanosine-3'-phosphate
  modified_base 4: mod_base = OTHER; note = 2'-O-methyluridine-3'-phosphate
  modified_base 5: mod_base = OTHER; note = 2'-O-methylcytidine-3'-phosphate
  modified_base 6: mod_base = OTHER; note = 2'-O-methylcytidine-3'-phosphate
  modified_base 7: mod_base = OTHER; note = 2'-fluorocytidine-3'-phosphate
  modified_base 8: mod_base = OTHER; note = 2'-O-methyluridine-3'-phosphate
  modified_base 9: mod_base = OTHER; note = 2'-fluoroadenosine-3'-phosphate
  modified_base 10: mod_base = OTHER; note = 2'-fluorocytidine-3'-phosphate
  modified_base 11: mod_base = OTHER; note = 2'-fluorouridine-3'-phosphate
  modified_base 12: mod_base = OTHER; note = 2'-O-methylguanosine-3'-phosphate
  modified_base 13: mod_base = OTHER; note = 2'-O-methylcytidine-3'-phosphate
  modified_base 14: mod_base = OTHER; note = 2'-O-methylcytidine-3'-phosphate
  modified_base 15: mod_base = OTHER; note = 2'-O-methylcytidine-3'-phosphate
  modified_base 16: mod_base = OTHER; note = 2'-O-methylguanosine-3'-phosphate
  modified_base 17: mod_base = OTHER; note = 2'-O-methyladenosine-3'-phosphate
  modified_base 18: mod_base = OTHER; note = 2'-O-methyladenosine-3'-phosphate
  modified_base 19: mod_base = OTHER; note = 2'-O-methylguanosine-3'-phosphate
  modified_base 20: mod_base = OTHER; note = 2'-O-methylguanosine-3'-phosphate
  modified_base 21: mod_base = OTHER; note = 2'-O-methyluridine-3'-phosphate N-[tris(GalNAc-alkyl)-amidodecanoyl)]-4-hydroxyprolinol (Hyp-(GalNAc-alkyl)3)
gtgtccctactgcccgaaggt

SEQ ID NO: 460 - RNA, 21 nt, synthetic construct
  source 1..21: mol_type = other RNA
  modified_base 1: mod_base = OTHER; note = 2'-O-methylcytidine-3'-phosphorothioate
  modified_base 2: mod_base = OTHER; note = 2'-O-methyluridine-3'-phosphorothioate
  modified_base 3: mod_base = OTHER; note = 2'-O-methylcytidine-3'-phosphate
  modified_base 4: mod_base = OTHER; note = 2'-O-methyluridine-3'-phosphate
  modified_base 5: mod_base = OTHER; note = 2'-O-methylcytidine-3'-phosphate
  modified_base 6: mod_base = OTHER; note = 2'-O-methyluridine-3'-phosphate
  modified_base 7: mod_base = OTHER; note = 2'-fluorocytidine-3'-phosphate
  modified_base 8: mod_base = OTHER; note = 2'-O-methyluridine-3'-phosphate
  modified_base 9: mod_base = OTHER; note = 2'-fluorocytidine-3'-phosphate
  modified_base 10: mod_base = OTHER; note = 2'-fluorocytidine-3'-phosphate
  modified_base 11: mod_base = OTHER; note = 2'-fluorouridine-3'-phosphate
  modified_base 12: mod_base = OTHER; note = 2'-O-methylcytidine-3'-phosphate
  modified_base 13: mod_base = OTHER; note = 2'-O-methyluridine-3'-phosphate
  modified_base 14: mod_base = OTHER; note = 2'-O-methyladenosine-3'-phosphate
  modified_base 15: mod_base = OTHER; note = 2'-O-methylcytidine-3'-phosphate
  modified_base 16: mod_base = OTHER; note = 2'-O-methylcytidine-3'-phosphate
  modified_base 17: mod_base = OTHER; note = 2'-O-methyluridine-3'-phosphate
  modified_base 18: mod_base = OTHER; note = 2'-O-methylguanosine-3'-phosphate
  modified_base 19: mod_base = OTHER; note = 2'-O-methylguanosine-3'-phosphate
  modified_base 20: mod_base = OTHER; note = 2'-O-methyladenosine-3'-phosphate
  modified_base 21: mod_base = OTHER; note = 2'-O-methyluridine-3'-phosphate N-[tris(GalNAc-alkyl)-amidodecanoyl)]-4-hydroxyprolinol (Hyp-(GalNAc-alkyl)3)
ctctctctcctctacctggat

SEQ ID NO: 461 - RNA, 21 nt, synthetic construct
  source 1..21: mol_type = other RNA
  modified_base 1: mod_base = OTHER; note = 2'-O-methyluridine-3'-phosphorothioate
  modified_base 2: mod_base = OTHER; note = 2'-O-methyladenosine-3'-phosphorothioate
  modified_base 3: mod_base = OTHER; note = 2'-O-methylcytidine-3'-phosphate
  modified_base 4: mod_base = OTHER; note = 2'-O-methylcytidine-3'-phosphate
  modified_base 5: mod_base = OTHER; note = 2'-O-methyluridine-3'-phosphate
  modified_base 6: mod_base = OTHER; note = 2'-O-methylguanosine-3'-phosphate
  modified_base 7: mod_base = OTHER; note = 2'-fluoroguanosine-3'-phosphate
  modified_base 8: mod_base = OTHER; note = 2'-O-methyladenosine-3'-phosphate
  modified_base 9: mod_base = OTHER; note = 2'-fluorouridine-3'-phosphate
  modified_base 10: mod_base = OTHER; note = 2'-fluorocytidine-3'-phosphate
  modified_base 11: mod_base = OTHER; note = 2'-fluoroadenosine-3'-phosphate
  modified_base 12: mod_base = OTHER; note = 2'-O-methyluridine-3'-phosphate
  modified_base 13: mod_base = OTHER; note = 2'-O-methyladenosine-3'-phosphate
  modified_base 14: mod_base = OTHER; note = 2'-O-methyladenosine-3'-phosphate
  modified_base 15: mod_base = OTHER; note = 2'-O-methyluridine-3'-phosphate
  modified_base 16: mod_base = OTHER; note = 2'-O-methylguanosine-3'-phosphate
  modified_base 17: mod_base = OTHER; note = 2'-O-methylguanosine-3'-phosphate
  modified_base 18: mod_base = OTHER; note = 2'-O-methylcytidine-3'-phosphate
  modified_base 19: mod_base = OTHER; note = 2'-O-methyladenosine-3'-phosphate
  modified_base 20: mod_base = OTHER; note = 2'-O-methyladenosine-3'-phosphate
  modified_base 21: mod_base = OTHER; note = 2'-O-methyluridine-3'-phosphate N-[tris(GalNAc-alkyl)-amidodecanoyl)]-4-hydroxyprolinol (Hyp-(GalNAc-alkyl)3)
tacctggatcataatggcaat

SEQ ID NO: 462 - RNA, 21 nt, synthetic construct
  source 1..21: mol_type = other RNA
  modified_base 1: mod_base = OTHER; note = 2'-O-methyladenosine-3'-phosphorothioate
  modified_base 2: mod_base = OTHER; note = 2'-O-methyladenosine-3'-phosphorothioate
  modified_base 3: mod_base = OTHER; note = 2'-O-methyluridine-3'-phosphate
  modified_base 4: mod_base = OTHER; note = 2'-O-methylguanosine-3'-phosphate
  modified_base 5: mod_base = OTHER; note = 2'-O-methylguanosine-3'-phosphate
  modified_base 6: mod_base = OTHER; note = 2'-O-methylcytidine-3'-phosphate
  modified_base 7: mod_base = OTHER; note = 2'-fluoroadenosine-3'-phosphate
  modified_base 8: mod_base = OTHER; note = 2'-O-methyladenosine-3'-phosphate
  modified_base 9: mod_base = OTHER; note = 2'-fluorouridine-3'-phosphate
  modified_base 10: mod_base = OTHER; note = 2'-fluoroguanosine-3'-phosphate
  modified_base 11: mod_base = OTHER; note = 2'-fluorouridine-3'-phosphate
  modified_base 12: mod_base = OTHER; note = 2'-O-methylguanosine-3'-phosphate
  modified_base 13: mod_base = OTHER; note = 2'-O-methylguanosine-3'-phosphate
  modified_base 14: mod_base = OTHER; note = 2'-O-methyluridine-3'-phosphate
  modified_base 15: mod_base = OTHER; note = 2'-O-methylcytidine-3'-phosphate
  modified_base 16: mod_base = OTHER; note = 2'-O-methyladenosine-3'-phosphate
  modified_base 17: mod_base = OTHER; note = 2'-O-methyladenosine-3'-phosphate
  modified_base 18: mod_base = OTHER; note = 2'-O-methylguanosine-3'-phosphate
  modified_base 19: mod_base = OTHER; note = 2'-O-methyladenosine-3'-phosphate
  modified_base 20: mod_base = OTHER; note = 2'-O-methylcytidine-3'-phosphate
  modified_base 21: mod_base = OTHER; note = 2'-O-methyluridine-3'-phosphate N-[tris(GalNAc-alkyl)-amidodecanoyl)]-4-hydroxyprolinol (Hyp-(GalNAc-alkyl)3)
aatggcaatgtggtcaagact

SEQ ID NO: 463 - RNA, 21 nt, synthetic construct
  source 1..21: mol_type = other RNA
  modified_base 1: mod_base = OTHER; note = 2'-O-methyladenosine-3'-phosphorothioate
  modified_base 2: mod_base = OTHER; note = 2'-O-methyladenosine-3'-phosphorothioate
  modified_base 3: mod_base = OTHER; note = 2'-O-methylguanosine-3'-phosphate
  modified_base 4: mod_base = OTHER; note = 2'-O-methyladenosine-3'-phosphate
  modified_base 5: mod_base = OTHER; note = 2'-O-methylcytidine-3'-phosphate
  modified_base 6: mod_base = OTHER; note = 2'-O-methylguanosine-3'-phosphate
  modified_base 7: mod_base = OTHER; note = 2'-fluoroguanosine-3'-phosphate
  modified_base 8: mod_base = OTHER; note = 2'-O-methyladenosine-3'-phosphate
  modified_base 9: mod_base = OTHER; note = 2'-fluorouridine-3'-phosphate
  modified_base 10: mod_base = OTHER; note = 2'-fluoroguanosine-3'-phosphate
  modified_base 11: mod_base = OTHER; note = 2'-fluorouridine-3'-phosphate
  modified_base 12: mod_base = OTHER; note = 2'-O-methylguanosine-3'-phosphate
  modified_base 13: mod_base = OTHER; note = 2'-O-methylcytidine-3'-phosphate
  modified_base 14: mod_base = OTHER; note = 2'-O-methylcytidine-3'-phosphate
  modified_base 15: mod_base = OTHER; note = 2'-O-methyladenosine-3'-phosphate
  modified_base 16: mod_base = OTHER; note = 2'-O-methylguanosine-3'-phosphate
  modified_base 17: mod_base = OTHER; note = 2'-O-methyladenosine-3'-phosphate
  modified_base 18: mod_base = OTHER; note = 2'-O-methyluridine-3'-phosphate
  modified_base 19: mod_base = OTHER; note = 2'-O-methyladenosine-3'-phosphate
  modified_base 20: mod_base = OTHER; note = 2'-O-methyluridine-3'-phosphate
  modified_base 21: mod_base = OTHER; note = 2'-O-methyluridine-3'-phosphate N-[tris(GalNAc-alkyl)-amidodecanoyl)]-4-hydroxyprolinol (Hyp-(GalNAc-alkyl)3)
aagacggatgtgccagatatt

SEQ ID NO: 464 - RNA, 21 nt, synthetic construct
  source 1..21: mol_type = other RNA
  modified_base 1: mod_base = OTHER; note = 2'-O-methylguanosine-3'-phosphorothioate
  modified_base 2: mod_base = OTHER; note = 2'-O-methylcytidine-3'-phosphorothioate
  modified_base 3: mod_base = OTHER; note = 2'-O-methylcytidine-3'-phosphate
  modified_base 4: mod_base = OTHER; note = 2'-O-methyladenosine-3'-phosphate
  modified_base 5: mod_base = OTHER; note = 2'-O-methylguanosine-3'-phosphate
  modified_base 6: mod_base = OTHER; note = 2'-O-methyladenosine-3'-phosphate
  modified_base 7: mod_base = OTHER; note = 2'-fluorouridine-3'-phosphate
  modified_base 8: mod_base = OTHER; note = 2'-O-methyladenosine-3'-phosphate
  modified_base 9: mod_base = OTHER; note = 2'-fluorouridine-3'-phosphate
  modified_base 10: mod_base = OTHER; note = 2'-fluoroguanosine-3'-phosphate
  modified_base 11: mod_base = OTHER; note = 2'-fluoroguanosine-3'-phosphate
  modified_base 12: mod_base = OTHER; note = 2'-O-methyluridine-3'-phosphate
  modified_base 13: mod_base = OTHER; note = 2'-O-methylguanosine-3'-phosphate
  modified_base 14: mod_base = OTHER; note = 2'-O-methylguanosine-3'-phosphate
  modified_base 15: mod_base = OTHER; note = 2'-O-methyluridine-3'-phosphate
  modified_base 16: mod_base = OTHER; note = 2'-O-methylguanosine-3'-phosphate
  modified_base 17: mod_base = OTHER; note = 2'-O-methylguanosine-3'-phosphate
  modified_base 18: mod_base = OTHER; note = 2'-O-methyladenosine-3'-phosphate
  modified_base 19: mod_base = OTHER; note = 2'-O-methylguanosine-3'-phosphate
  modified_base 20: mod_base = OTHER; note = 2'-O-methylguanosine-3'-phosphate
  modified_base 21: mod_base = OTHER; note = 2'-O-methyluridine-3'-phosphate N-[tris(GalNAc-alkyl)-amidodecanoyl)]-4-hydroxyprolinol (Hyp-(GalNAc-alkyl)3)
gccagatatggtggtggaggt

SEQ ID NO: 465 - RNA, 21 nt, synthetic construct
  source 1..21: mol_type = other RNA
  modified_base 1: mod_base = OTHER; note = 2'-O-methylguanosine-3'-phosphorothioate
  modified_base 2: mod_base = OTHER; note = 2'-O-methyladenosine-3'-phosphorothioate
  modified_base 3: mod_base = OTHER; note = 2'-O-methylguanosine-3'-phosphate
  modified_base 4: mod_base = OTHER; note = 2'-O-methylguanosine-3'-phosphate
  modified_base 5: mod_base = OTHER; note = 2'-O-methylcytidine-3'-phosphate
  modified_base 6: mod_base = OTHER; note = 2'-O-methylcytidine-3'-phosphate
  modified_base 7: mod_base = OTHER; note = 2'-fluorouridine-3'-phosphate
  modified_base 8: mod_base = OTHER; note = 2'-O-methylguanosine-3'-phosphate
  modified_base 9: mod_base = OTHER; note = 2'-fluorouridine-3'-phosphate
  modified_base 10: mod_base = OTHER; note = 2'-fluoroguanosine-3'-phosphate
  modified_base 11: mod_base = OTHER; note = 2'-fluoroguanosine-3'-phosphate
  modified_base 12: mod_base = OTHER; note = 2'-O-methylcytidine-3'-phosphate
  modified_base 13: mod_base = OTHER; note = 2'-O-methyluridine-3'-phosphate
  modified_base 14: mod_base = OTHER; note = 2'-O-methylguanosine-3'-phosphate
  modified_base 15: mod_base = OTHER; note = 2'-O-methylcytidine-3'-phosphate
  modified_base 16: mod_base = OTHER; note = 2'-O-methyladenosine-3'-phosphate
  modified_base 17: mod_base = OTHER; note = 2'-O-methylguanosine-3'-phosphate
  modified_base 18: mod_base = OTHER; note = 2'-O-methylcytidine-3'-phosphate
  modified_base 19: mod_base = OTHER; note = 2'-O-methyluridine-3'-phosphate
  modified_base 20: mod_base = OTHER; note = 2'-O-methyladenosine-3'-phosphate
  modified_base 21: mod_base = OTHER; note = 2'-O-methyluridine-3'-phosphate N-[tris(GalNAc-alkyl)-amidodecanoyl)]-4-hydroxyprolinol (Hyp-(GalNAc-alkyl)3)
gaggcctgtggctgcagctat

SEQ ID NO: 466 - RNA, 21 nt, synthetic construct
  source 1..21: mol_type = other RNA
  modified_base 1: mod_base = OTHER; note = 2'-O-methyluridine-3'-phosphorothioate
  modified_base 2: mod_base = OTHER; note = 2'-O-methylguanosine-3'-phosphorothioate
  modified_base 3: mod_base = OTHER; note = 2'-O-methylcytidine-3'-phosphate
  modified_base 4: mod_base = OTHER; note = 2'-O-methyladenosine-3'-phosphate
  modified_base 5: mod_base = OTHER; note = 2'-O-methylguanosine-3'-phosphate
  modified_base 6: mod_base = OTHER; note = 2'-O-methylcytidine-3'-phosphate
  modified_base 7: mod_base = OTHER; note = 2'-fluorouridine-3'-phosphate
  modified_base 8: mod_base = OTHER; note = 2'-O-methyladenosine-3'-phosphate
  modified_base 9: mod_base = OTHER; note = 2'-fluoroguanosine-3'-phosphate
  modified_base 10: mod_base = OTHER; note = 2'-fluorocytidine-3'-phosphate
  modified_base 11: mod_base = OTHER; note = 2'-fluoroadenosine-3'-phosphate
  modified_base 12: mod_base = OTHER; note = 2'-O-methyladenosine-3'-phosphate
  modified_base 13: mod_base = OTHER; note = 2'-O-methylguanosine-3'-phosphate
  modified_base 14: mod_base = OTHER; note = 2'-O-methyladenosine-3'-phosphate
  modified_base 15: mod_base = OTHER; note = 2'-O-methylguanosine-3'-phosphate
  modified_base 16: mod_base = OTHER; note = 2'-O-methylguanosine-3'-phosphate
  modified_base 17: mod_base = OTHER; note = 2'-O-methyladenosine-3'-phosphate
  modified_base 18: mod_base = OTHER; note = 2'-O-methylcytidine-3'-phosphate
  modified_base 19: mod_base = OTHER; note = 2'-O-methylcytidine-3'-phosphate
  modified_base 20: mod_base = OTHER; note = 2'-O-methyluridine-3'-phosphate
  modified_base 21: mod_base = OTHER; note = 2'-O-methyluridine-3'-phosphate N-[tris(GalNAc-alkyl)-amidodecanoyl)]-4-hydroxyprolinol (Hyp-(GalNAc-alkyl)3)
tgcagctagcaagaggacctt

SEQ ID NO: 467 - RNA, 21 nt, synthetic construct
  source 1..21: mol_type = other RNA
  modified_base 1: mod_base = OTHER; note = 2'-O-methylcytidine-3'-phosphorothioate
  modified_base 2: mod_base = OTHER; note = 2'-O-methyluridine-3'-phosphorothioate
  modified_base 3: mod_base = OTHER; note = 2'-O-methyluridine-3'-phosphate
  modified_base 4: mod_base = OTHER; note = 2'-O-methyluridine-3'-phosphate
  modified_base 5: mod_base = OTHER; note = 2'-O-methylguanosine-3'-phosphate
  modified_base 6: mod_base = OTHER; note = 2'-O-methylguanosine-3'-phosphate
  modified_base 7: mod_base = OTHER; note = 2'-fluoroadenosine-3'-phosphate
  modified_base 8: mod_base = OTHER; note = 2'-O-methylguanosine-3'-phosphate
  modified_base 9: mod_base = OTHER; note = 2'-fluorouridine-3'-phosphate
  modified_base 10: mod_base = OTHER; note = 2'-fluoroguanosine-3'-phosphate
  modified_base 11: mod_base = OTHER; note = 2'-fluoroadenosine-3'-phosphate
  modified_base 12: mod_base = OTHER; note = 2'-O-methyladenosine-3'-phosphate
  modified_base 13: mod_base = OTHER; note = 2'-O-methylguanosine-3'-phosphate
  modified_base 14: mod_base = OTHER; note = 2'-O-methyladenosine-3'-phosphate
  modified_base 15: mod_base = OTHER; note = 2'-O-methylguanosine-3'-phosphate
  modified_base 16: mod_base = OTHER; note = 2'-O-methyladenosine-3'-phosphate
  modified_base 17: mod_base = OTHER; note = 2'-O-methylcytidine-3'-phosphate
  modified_base 18: mod_base = OTHER; note = 2'-O-methylcytidine-3'-phosphate
  modified_base 19: mod_base = OTHER; note = 2'-O-methyladenosine-3'-phosphate
  modified_base 20: mod_base = OTHER; note = 2'-O-methyladenosine-3'-phosphate
  modified_base 21: mod_base = OTHER; note = 2'-O-methyluridine-3'-phosphate N-[tris(GalNAc-alkyl)-amidodecanoyl)]-4-hydroxyprolinol (Hyp-(GalNAc-alkyl)3)
ctttggagtgaagagaccaat

SEQ ID NO: 468 - RNA, 21 nt, synthetic construct
  source 1..21: mol_type = other RNA
  modified_base 1: mod_base = OTHER; note = 2'-O-methyladenosine-3'-phosphorothioate
  modified_base 2: mod_base = OTHER; note = 2'-O-methylguanosine-3'-phosphorothioate
  modified_base 3: mod_base = OTHER; note = 2'-O-methyladenosine-3'-phosphate
  modified_base 4: mod_base = OTHER; note = 2'-O-methylguanosine-3'-phosphate
  modified_base 5: mod_base = OTHER; note = 2'-O-methyladenosine-3'-phosphate
  modified_base 6: mod_base = OTHER; note = 2'-O-methylcytidine-3'-phosphate
  modified_base 7: mod_base = OTHER; note = 2'-fluorocytidine-3'-phosphate
  modified_base 8: mod_base = OTHER; note = 2'-O-methyladenosine-3'-phosphate
  modified_base 9: mod_base = OTHER; note = 2'-fluoroadenosine-3'-phosphate
  modified_base 10: mod_base = OTHER; note = 2'-fluoroguanosine-3'-phosphate
  modified_base 11: mod_base = OTHER; note = 2'-fluoroadenosine-3'-phosphate
  modified_base 12: mod_base = OTHER; note = 2'-O-methyluridine-3'-phosphate
  modified_base 13: mod_base = OTHER; note = 2'-O-methylguanosine-3'-phosphate
  modified_base 14: mod_base = OTHER; note = 2'-O-methyladenosine-3'-phosphate
  modified_base 15: mod_base = OTHER; note = 2'-O-methyladenosine-3'-phosphate
  modified_base 16: mod_base = OTHER; note = 2'-O-methylguanosine-3'-phosphate
  modified_base 17: mod_base = OTHER; note = 2'-O-methyluridine-3'-phosphate
  modified_base 18: mod_base = OTHER; note = 2'-O-methyluridine-3'-phosphate
  modified_base 19: mod_base = OTHER; note = 2'-O-methyluridine-3'-phosphate
  modified_base 20: mod_base = OTHER; note = 2'-O-methylcytidine-3'-phosphate
  modified_base 21: mod_base = OTHER; note = 2'-O-methyluridine-3'-phosphate N-[tris(GalNAc-alkyl)-amidodecanoyl)]-4-hydroxyprolinol (Hyp-(GalNAc-alkyl)3)
agagaccaagatgaagtttct

SEQ ID NO: 469 - RNA, 21 nt, synthetic construct
  source 1..21: mol_type = other RNA
  modified_base 1: mod_base = OTHER; note = 2'-O-methylcytidine-3'-phosphorothioate
  modified_base 2: mod_base = OTHER; note = 2'-O-methyladenosine-3'-phosphorothioate
  modified_base 3: mod_base = OTHER; note = 2'-O-methylguanosine-3'-phosphate
  modified_base 4: mod_base = OTHER; note = 2'-O-methylguanosine-3'-phosphate
  modified_base 5: mod_base = OTHER; note = 2'-O-methylguanosine-3'-phosphate
  modified_base 6: mod_base = OTHER; note = 2'-O-methylcytidine-3'-phosphate
  modified_base 7: mod_base = OTHER; note = 2'-fluoroadenosine-3'-phosphate
  modified_base 8: mod_base = OTHER; note = 2'-O-methyluridine-3'-phosphate
  modified_base 9: mod_base = OTHER; note = 2'-fluorocytidine-3'-phosphate
  modified_base 10: mod_base = OTHER; note = 2'-fluorouridine-3'-phosphate
  modified_base 11: mod_base = OTHER; note = 2'-fluoroguanosine-3'-phosphate
  modified_base 12: mod_base = OTHER; note = 2'-O-methyluridine-3'-phosphate
  modified_base 13: mod_base = OTHER; note = 2'-O-methylguanosine-3'-phosphate
  modified_base 14: mod_base = OTHER; note = 2'-O-methyladenosine-3'-phosphate
  modified_base 15: mod_base = OTHER; note = 2'-O-methylcytidine-3'-phosphate
  modified_base 16: mod_base = OTHER; note = 2'-O-methyluridine-3'-phosphate
  modified_base 17: mod_base = OTHER; note = 2'-O-methylguanosine-3'-phosphate
  modified_base 18: mod_base = OTHER; note = 2'-O-methylguanosine-3'-phosphate
  modified_base 19: mod_base = OTHER; note = 2'-O-methyladenosine-3'-phosphate
  modified_base 20: mod_base = OTHER; note = 2'-O-methylguanosine-3'-phosphate
  modified_base 21: mod_base = OTHER; note = 2'-O-methyluridine-3'-phosphate N-[tris(GalNAc-alkyl)-amidodecanoyl)]-4-hydroxyprolinol (Hyp-(GalNAc-alkyl)3)
cagggcatctgtgactggagt

SEQ ID NO: 470 - RNA, 21 nt, synthetic construct
  source 1..21: mol_type = other RNA
  modified_base 1: mod_base = OTHER; note = 2'-O-methylguanosine-3'-phosphorothioate
  modified_base 2: mod_base = OTHER; note = 2'-O-methyladenosine-3'-phosphorothioate
  modified_base 3: mod_base = OTHER; note = 2'-O-methylguanosine-3'-phosphate
  modified_base 4: mod_base = OTHER; note = 2'-O-methylguanosine-3'-phosphate
  modified_base 5: mod_base = OTHER; note = 2'-O-methylcytidine-3'-phosphate
  modified_base 6: mod_base = OTHER; note = 2'-O-methyladenosine-3'-phosphate
  modified_base 7: mod_base = OTHER; note = 2'-fluorouridine-3'-phosphate
  modified_base 8: mod_base = OTHER; note = 2'-O-methylcytidine-3'-phosphate
  modified_base 9: mod_base = OTHER; note = 2'-fluoroadenosine-3'-phosphate
  modified_base 10: mod_base = OTHER; note = 2'-fluoroguanosine-3'-phosphate
  modified_base 11: mod_base = OTHER; note = 2'-fluoroadenosine-3'-phosphate
  modified_base 12: mod_base = OTHER; note = 2'-O-methyluridine-3'-phosphate
  modified_base 13: mod_base = OTHER; note = 2'-O-methyluridine-3'-phosphate
  modified_base 14: mod_base = OTHER; note = 2'-O-methylcytidine-3'-phosphate
  modified_base 15: mod_base = OTHER; note = 2'-O-methylcytidine-3'-phosphate
  modified_base 16: mod_base = OTHER; note = 2'-O-methyluridine-3'-phosphate
  modified_base 17: mod_base = OTHER; note = 2'-O-methylguanosine-3'-phosphate
  modified_base 18: mod_base = OTHER; note = 2'-O-methyladenosine-3'-phosphate
  modified_base 19: mod_base = OTHER; note = 2'-O-methyluridine-3'-phosphate
  modified_base 20: mod_base = OTHER; note = 2'-O-methylcytidine-3'-phosphate
  modified_base 21: mod_base = OTHER; note = 2'-O-methyluridine-3'-phosphate N-[tris(GalNAc-alkyl)-amidodecanoyl)]-4-hydroxyprolinol (Hyp-(GalNAc-alkyl)3)
gaggcatcagattcctgatct

SEQ ID NO: 471 - RNA, 21 nt, synthetic construct
  source 1..21: mol_type = other RNA
  modified_base 1: mod_base = OTHER; note = 2'-O-methyladenosine-3'-phosphorothioate
  modified_base 2: mod_base = OTHER; note = 2'-O-methylcytidine-3'-phosphorothioate
  modified_base 3: mod_base = OTHER; note = 2'-O-methylcytidine-3'-phosphate
  modified_base 4: mod_base = OTHER; note = 2'-O-methylcytidine-3'-phosphate
  modified_base 5: mod_base = OTHER; note = 2'-O-methyladenosine-3'-phosphate
  modified_base 6: mod_base = OTHER; note = 2'-O-methyladenosine-3'-phosphate
  modified_base 7: mod_base = OTHER; note = 2'-fluorocytidine-3'-phosphate
  modified_base 8: mod_base = OTHER; note = 2'-O-methyladenosine-3'-phosphate
  modified_base 9: mod_base = OTHER; note = 2'-fluoroadenosine-3'-phosphate
  modified_base 10: mod_base = OTHER; note = 2'-fluorocytidine-3'-phosphate
  modified_base 11: mod_base = OTHER; note = 2'-fluorocytidine-3'-phosphate
  modified_base 12: mod_base = OTHER; note = 2'-O-methyladenosine-3'-phosphate
  modified_base 13: mod_base = OTHER; note = 2'-O-methylcytidine-3'-phosphate
  modified_base 14: mod_base = OTHER; note = 2'-O-methylcytidine-3'-phosphate
  modified_base 15: mod_base = OTHER; note = 2'-O-methyluridine-3'-phosphate
  modified_base 16: mod_base = OTHER; note = 2'-O-methylguanosine-3'-phosphate
  modified_base 17: mod_base = OTHER; note = 2'-O-methylguanosine-3'-phosphate
  modified_base 18: mod_base = OTHER; note = 2'-O-methylcytidine-3'-phosphate
  modified_base 19: mod_base = OTHER; note = 2'-O-methyladenosine-3'-phosphate
  modified_base 20: mod_base = OTHER; note = 2'-O-methyladenosine-3'-phosphate
  modified_base 21: mod_base = OTHER; note = 2'-O-methyluridine-3'-phosphate N-[tris(GalNAc-alkyl)-amidodecanoyl)]-4-hydroxyprolinol (Hyp-(GalNAc-alkyl)3)
acccaacaaccacctggcaat

SEQ ID NO: 472 - RNA, 21 nt, synthetic construct
  source 1..21: mol_type = other RNA
  modified_base 1: mod_base = OTHER; note = 2'-O-methylguanosine-3'-phosphorothioate
  modified_base 2: mod_base = OTHER; note = 2'-O-methylguanosine-3'-phosphorothioate
  modified_base 3: mod_base = OTHER; note = 2'-O-methylcytidine-3'-phosphate
  modified_base 4: mod_base = OTHER; note = 2'-O-methyladenosine-3'-phosphate
  modified_base 5: mod_base = OTHER; note = 2'-O-methyladenosine-3'-phosphate
  modified_base 6: mod_base = OTHER; note = 2'-O-methyluridine-3'-phosphate
  modified_base 7: mod_base = OTHER; note = 2'-fluoroadenosine-3'-phosphate
  modified_base 8: mod_base = OTHER; note = 2'-O-methyluridine-3'-phosphate
  modified_base 9: mod_base = OTHER; note = 2'-fluoroguanosine-3'-phosphate
  modified_base 10: mod_base = OTHER; note = 2'-fluoroadenosine-3'-phosphate
  modified_base 11: mod_base = OTHER; note = 2'-fluorocytidine-3'-phosphate
  modified_base 12: mod_base = OTHER; note = 2'-O-methyluridine-3'-phosphate
  modified_base 13: mod_base = OTHER; note = 2'-O-methylcytidine-3'-phosphate
  modified_base 14: mod_base = OTHER; note = 2'-O-methyladenosine-3'-phosphate
  modified_base 15: mod_base = OTHER; note = 2'-O-methylcytidine-3'-phosphate
  modified_base 16: mod_base = OTHER; note = 2'-O-methyluridine-3'-phosphate
  modified_base 17: mod_base = OTHER; note = 2'-O-methyluridine-3'-phosphate
  modified_base 18: mod_base = OTHER; note = 2'-O-methylguanosine-3'-phosphate
  modified_base 19: mod_base = OTHER; note = 2'-O-methyladenosine-3'-phosphate
  modified_base 20: mod_base = OTHER; note = 2'-O-methylcytidine-3'-phosphate
  modified_base 21: mod_base = OTHER; note = 2'-O-methyluridine-3'-phosphate N-[tris(GalNAc-alkyl)-amidodecanoyl)]-4-hydroxyprolinol (Hyp-(GalNAc-alkyl)3)
ggcaatatgactcacttgact

SEQ ID NO: 473 - RNA, 21 nt, synthetic construct
  source 1..21: mol_type = other RNA
  modified_base 1: mod_base = OTHER; note = 2'-O-methylguanosine-3'-phosphorothioate
  modified_base 2: mod_base = OTHER; note = 2'-O-methyladenosine-3'-phosphorothioate
  modified_base 3: mod_base = OTHER; note = 2'-O-methylcytidine-3'-phosphate
  modified_base 4: mod_base = OTHER; note = 2'-O-methylcytidine-3'-phosphate
  modified_base 5: mod_base = OTHER; note = 2'-O-methylcytidine-3'-phosphate
  modified_base 6: mod_base = OTHER; note = 2'-O-methyladenosine-3'-phosphate
  modified_base 7: mod_base = OTHER; note = 2'-fluoroadenosine-3'-phosphate
  modified_base 8: mod_base = OTHER; note = 2'-O-methyladenosine-3'-phosphate
  modified_base 9: mod_base = OTHER; note = 2'-fluorouridine-3'-phosphate
  modified_base 10: mod_base = OTHER; note = 2'-fluoroguanosine-3'-phosphate
  modified_base 11: mod_base = OTHER; note = 2'-fluoroguanosine-3'-phosphate
  modified_base 12: mod_base = OTHER; note = 2'-O-methylguanosine-3'-phosphate
  modified_base 13: mod_base = OTHER; note = 2'-O-methylcytidine-3'-phosphate
  modified_base 14: mod_base = OTHER; note = 2'-O-methyladenosine-3'-phosphate
  modified_base 15: mod_base = OTHER; note = 2'-O-methylcytidine-3'-phosphate
  modified_base 16: mod_base = OTHER; note = 2'-O-methyluridine-3'-phosphate
  modified_base 17: mod_base = OTHER; note = 2'-O-methyluridine-3'-phosphate
  modified_base 18: mod_base = OTHER; note = 2'-O-methyluridine-3'-phosphate
  modified_base 19: mod_base = OTHER; note = 2'-O-methylcytidine-3'-phosphate
  modified_base 20: mod_base = OTHER; note = 2'-O-methyluridine-3'-phosphate
  modified_base 21: mod_base = OTHER; note = 2'-O-methyluridine-3'-phosphate N-[tris(GalNAc-alkyl)-amidodecanoyl)]-4-hydroxyprolinol (Hyp-(GalNAc-alkyl)3)
gacccaaatgggcactttctt

SEQ ID NO: 474 - RNA, 21 nt, synthetic construct
  source 1..21: mol_type = other RNA
  modified_base 1: mod_base = OTHER; note = 2'-O-methyladenosine-3'-phosphorothioate
  modified_base 2: mod_base = OTHER; note = 2'-O-methylcytidine-3'-phosphorothioate
  modified_base 3: mod_base = OTHER; note = 2'-O-methyluridine-3'-phosphate
  modified_base 4: mod_base = OTHER; note = 2'-O-methyluridine-3'-phosphate
  modified_base 5: mod_base = OTHER; note = 2'-O-methyluridine-3'-phosphate
  modified_base 6: mod_base = OTHER; note = 2'-O-methylcytidine-3'-phosphate
  modified_base 7: mod_base = OTHER; note = 2'-fluorouridine-3'-phosphate
  modified_base 8: mod_base = OTHER; note = 2'-O-methyluridine-3'-phosphate
  modified_base 9: mod_base = OTHER; note = 2'-fluoroguanosine-3'-phosphate
  modified_base 10: mod_base = OTHER; note = 2'-fluorouridine-3'-phosphate
  modified_base 11: mod_base = OTHER; note = 2'-fluorocytidine-3'-phosphate
  modified_base 12: mod_base = OTHER; note = 2'-O-methyluridine-3'-phosphate
  modified_base 13: mod_base = OTHER; note = 2'-O-methylguanosine-3'-phosphate
  modified_base 14: mod_base = OTHER; note = 2'-O-methyladenosine-3'-phosphate
  modified_base 15: mod_base = OTHER; note = 2'-O-methylguanosine-3'-phosphate
  modified_base 16: mod_base = OTHER; note = 2'-O-methyladenosine-3'-phosphate
  modified_base 17: mod_base = OTHER; note = 2'-O-methylcytidine-3'-phosphate
  modified_base 18: mod_base = OTHER; note = 2'-O-methyluridine-3'-phosphate
  modified_base 19: mod_base = OTHER; note = 2'-O-methylcytidine-3'-phosphate
  modified_base 20: mod_base = OTHER; note = 2'-O-methyluridine-3'-phosphate
  modified_base 21: mod_base = OTHER; note = 2'-O-methyluridine-3'-phosphate N-[tris(GalNAc-alkyl)-amidodecanoyl)]-4-hydroxyprolinol (Hyp-(GalNAc-alkyl)3)
actttcttgtctgagactctt

SEQ ID NO: 475 - RNA, 21 nt, synthetic construct
  source 1..21: mol_type = other RNA
  modified_base 1: mod_base = OTHER; note = 2'-O-methyluridine-3'-phosphorothioate
  modified_base 2: mod_base = OTHER; note = 2'-O-methylguanosine-3'-phosphorothioate
  modified_base 3: mod_base = OTHER; note = 2'-O-methyladenosine-3'-phosphate
  modified_base 4: mod_base = OTHER; note = 2'-O-methylguanosine-3'-phosphate
  modified_base 5: mod_base = OTHER; note = 2'-O-methyladenosine-3'-phosphate
  modified_base 6: mod_base = OTHER; note = 2'-O-methylcytidine-3'-phosphate
  modified_base 7: mod_base = OTHER; note = 2'-fluorouridine-3'-phosphate
  modified_base 8: mod_base = OTHER; note = 2'-O-methylcytidine-3'-phosphate
  modified_base 9: mod_base = OTHER; note = 2'-fluorouridine-3'-phosphate
  modified_base 10: mod_base = OTHER; note = 2'-fluoroguanosine-3'-phosphate
  modified_base 11: mod_base = OTHER; note = 2'-fluoroguanosine-3'-phosphate
  modified_base 12: mod_base = OTHER; note = 2'-O-methylcytidine-3'-phosphate
  modified_base 13: mod_base = OTHER; note = 2'-O-methyluridine-3'-phosphate
  modified_base 14: mod_base = OTHER; note = 2'-O-methyluridine-3'-phosphate
  modified_base 15: mod_base = OTHER; note = 2'-O-methyladenosine-3'-phosphate
  modified_base 16: mod_base = OTHER; note = 2'-O-methyluridine-3'-phosphate
  modified_base 17: mod_base = OTHER; note = 2'-O-methyluridine-3'-phosphate
  modified_base 18: mod_base = OTHER; note = 2'-O-methylcytidine-3'-phosphate
  modified_base 19: mod_base = OTHER; note = 2'-O-methylcytidine-3'-phosphate
  modified_base 20: mod_base = OTHER; note = 2'-O-methyladenosine-3'-phosphate
  modified_base 21: mod_base = OTHER; note = 2'-O-methyluridine-3'-phosphate N-[tris(GalNAc-alkyl)-amidodecanoyl)]-4-hydroxyprolinol (Hyp-(GalNAc-alkyl)3)
tgagactctggcttattccat

SEQ ID NO: 476 - RNA, 21 nt, synthetic construct
  source 1..21: mol_type = other RNA
  modified_base 1: mod_base = OTHER; note = 2'-O-methyluridine-3'-phosphorothioate
  modified_base 2: mod_base = OTHER; note = 2'-O-methylcytidine-3'-phosphorothioate
  modified_base 3: mod_base = OTHER; note = 2'-O-methylcytidine-3'-phosphate
  modified_base 4: mod_base = OTHER; note = 2'-O-methyladenosine-3'-phosphate
  modified_base 5: mod_base = OTHER; note = 2'-O-methylguanosine-3'-phosphate
  modified_base 6: mod_base = OTHER; note = 2'-O-methylguanosine-3'-phosphate
  modified_base 7: mod_base = OTHER; note = 2'-fluorouridine-3'-phosphate
  modified_base 8: mod_base = OTHER; note = 2'-O-methyluridine-3'-phosphate
  modified_base 9: mod_base = OTHER; note = 2'-fluoroguanosine-3'-phosphate
  modified_base 10: mod_base = OTHER; note = 2'-fluoroguanosine-3'-phosphate
  modified_base 11: mod_base = OTHER; note = 2'-fluorocytidine-3'-phosphate
  modified_base 12: mod_base = OTHER; note = 2'-O-methyluridine-3'-phosphate
  modified_base 13: mod_base = OTHER; note = 2'-O-methylguanosine-3'-phosphate
  modified_base 14: mod_base = OTHER; note = 2'-O-methyladenosine-3'-phosphate
  modified_base 15: mod_base = OTHER; note = 2'-O-methyluridine-3'-phosphate
  modified_base 16: mod_base = OTHER; note = 2'-O-methylguanosine-3'-phosphate
  modified_base 17: mod_base = OTHER; note = 2'-O-methyluridine-3'-phosphate
  modified_base 18: mod_base = OTHER; note = 2'-O-methylguanosine-3'-phosphate
  modified_base 19: mod_base = OTHER; note = 2'-O-methyluridine-3'-phosphate
  modified_base 20: mod_base = OTHER; note = 2'-O-methyluridine-3'-phosphate
  modified_base 21: mod_base = OTHER; note = 2'-O-methyluridine-3'-phosphate N-[tris(GalNAc-alkyl)-amidodecanoyl)]-4-hydroxyprolinol (Hyp-(GalNAc-alkyl)3)
tccaggttggctgatgtgttt

SEQ ID NO: 477 - RNA, 21 nt, synthetic construct
  source 1..21: mol_type = other RNA
  modified_base 1: mod_base = OTHER; note = 2'-O-methyluridine-3'-phosphorothioate
  modified_base 2: mod_base = OTHER; note = 2'-O-methylguanosine-3'-phosphorothioate
  modified_base 3: mod_base = OTHER; note = 2'-O-methyluridine-3'-phosphate
  modified_base 4: mod_base = OTHER; note = 2'-O-methylguanosine-3'-phosphate
  modified_base 5: mod_base = OTHER; note = 2'-O-methyluridine-3'-phosphate
  modified_base 6: mod_base = OTHER; note = 2'-O-methyluridine-3'-phosphate
  modified_base 7: mod_base = OTHER; note = 2'-fluoroguanosine-3'-phosphate
  modified_base 8: mod_base = OTHER; note = 2'-O-methylguanosine-3'-phosphate
  modified_base 9: mod_base = OTHER; note = 2'-fluoroguanosine-3'-phosphate
  modified_base 10: mod_base = OTHER; note = 2'-fluoroadenosine-3'-phosphate
  modified_base 11: mod_base = OTHER; note = 2'-fluoroguanosine-3'-phosphate
  modified_base 12: mod_base = OTHER; note = 2'-O-methyladenosine-3'-phosphate
  modified_base 13: mod_base = OTHER; note = 2'-O-methyluridine-3'-phosphate
  modified_base 14: mod_base = OTHER; note = 2'-O-methylguanosine-3'-phosphate
  modified_base 15: mod_base = OTHER; note = 2'-O-methylguanosine-3'-phosphate
  modified_base 16: mod_base = OTHER; note = 2'-O-methylguanosine-3'-phosphate
  modified_base 17: mod_base = OTHER; note = 2'-O-methyluridine-3'-phosphate
  modified_base 18: mod_base = OTHER; note = 2'-O-methyladenosine-3'-phosphate
  modified_base 19: mod_base = OTHER; note = 2'-O-methyladenosine-3'-phosphate
  modified_base 20: mod_base = OTHER; note = 2'-O-methyladenosine-3'-phosphate
  modified_base 21: mod_base = OTHER; note = 2'-O-methyluridine-3'-phosphate N-[tris(GalNAc-alkyl)-amidodecanoyl)]-4-hydroxyprolinol (Hyp-(GalNAc-alkyl)3)
tgtgttgggagatgggtaaat

SEQ ID NO: 478 - RNA, 21 nt, synthetic construct
  source 1..21: mol_type = other RNA
  modified_base 1: mod_base = OTHER; note = 2'-O-methylguanosine-3'-phosphorothioate
  modified_base 2: mod_base = OTHER; note = 2'-O-methylguanosine-3'-phosphorothioate
  modified_base 3: mod_base = OTHER; note = 2'-O-methyluridine-3'-phosphate
  modified_base 4: mod_base = OTHER; note = 2'-O-methyladenosine-3'-phosphate
  modified_base 5: mod_base = OTHER; note = 2'-O-methyladenosine-3'-phosphate
  modified_base 6: mod_base = OTHER; note = 2'-O-methyladenosine-3'-phosphate
  modified_base 7: mod_base = OTHER; note = 2'-fluoroguanosine-3'-phosphate
  modified_base 8: mod_base = OTHER; note = 2'-O-methylcytidine-3'-phosphate
  modified_base 9: mod_base = OTHER; note = 2'-fluoroguanosine-3'-phosphate
  modified_base 10: mod_base = OTHER; note = 2'-fluorouridine-3'-phosphate
  modified_base 11: mod_base = OTHER; note = 2'-fluorouridine-3'-phosphate
  modified_base 12: mod_base = OTHER; note = 2'-O-methyluridine-3'-phosphate
  modified_base 13: mod_base = OTHER; note = 2'-O-methylcytidine-3'-phosphate
  modified_base 14: mod_base = OTHER; note = 2'-O-methyluridine-3'-phosphate
  modified_base 15: mod_base = OTHER; note = 2'-O-methyluridine-3'-phosphate
  modified_base 16: mod_base = OTHER; note = 2'-O-methylcytidine-3'-phosphate
  modified_base 17: mod_base = OTHER; note = 2'-O-methyluridine-3'-phosphate
  modified_base 18: mod_base = OTHER; note = 2'-O-methyladenosine-3'-phosphate
  modified_base 19: mod_base = OTHER; note = 2'-O-methyladenosine-3'-phosphate
  modified_base 20: mod_base = OTHER; note = 2'-O-methyladenosine-3'-phosphate
  modified_base 21: mod_base = OTHER; note = 2'-O-methyluridine-3'-phosphate N-[tris(GalNAc-alkyl)-amidodecanoyl)]-4-hydroxyprolinol (Hyp-(GalNAc-alkyl)3)
ggtaaagcgtttcttctaaat

SEQ ID NO: 479 - RNA, 21 nt, synthetic construct
  source 1..21: mol_type = other RNA
  modified_base 1: mod_base = OTHER; note = 2'-O-methyluridine-3'-phosphorothioate
  modified_base 2: mod_base = OTHER; note = 2'-O-methyladenosine-3'-phosphorothioate
  modified_base 3: mod_base = OTHER; note = 2'-O-methylcytidine-3'-phosphate
  modified_base 4: mod_base = OTHER; note = 2'-O-methylcytidine-3'-phosphate
  modified_base 5: mod_base = OTHER; note = 2'-O-methylcytidine-3'-phosphate
  modified_base 6: mod_base = OTHER; note = 2'-O-methyladenosine-3'-phosphate
  modified_base 7: mod_base = OTHER; note = 2'-fluoroguanosine-3'-phosphate
  modified_base 8: mod_base = OTHER; note = 2'-O-methyladenosine-3'-phosphate
  modified_base 9: mod_base = OTHER; note = 2'-fluoroadenosine-3'-phosphate
  modified_base 10: mod_base = OTHER; note = 2'-fluoroadenosine-3'-phosphate
  modified_base 11: mod_base = OTHER; note = 2'-fluoroguanosine-3'-phosphate
  modified_base 12: mod_base = OTHER; note = 2'-O-methylcytidine-3'-phosphate
  modified_base 13: mod_base = OTHER; note = 2'-O-methyladenosine-3'-phosphate
  modified_base 14: mod_base = OTHER; note = 2'-O-methyluridine-3'-phosphate
  modified_base 15: mod_base = OTHER; note = 2'-O-methylguanosine-3'-phosphate
  modified_base 16: mod_base = OTHER; note = 2'-O-methyladenosine-3'-phosphate
  modified_base 17: mod_base = OTHER; note = 2'-O-methyluridine-3'-phosphate
  modified_base 18: mod_base = OTHER; note = 2'-O-methyluridine-3'-phosphate
  modified_base 19: mod_base = OTHER; note = 2'-O-methyluridine-3'-phosphate
  modified_base 20: mod_base = OTHER; note = 2'-O-methylcytidine-3'-phosphate
  modified_base 21: mod_base = OTHER; note = 2'-O-methyluridine-3'-phosphate N-[tris(GalNAc-alkyl)-amidodecanoyl)]-4-hydroxyprolinol (Hyp-(GalNAc-alkyl)3)
tacccagaaagcatgatttct

SEQ ID NO: 480 - RNA, 21 nt, synthetic construct
  source 1..21: mol_type = other RNA
  modified_base 1: mod_base = OTHER; note = 2'-O-methylguanosine-3'-phosphorothioate
  modified_base 2: mod_base = OTHER; note = 2'-O-methyladenosine-3'-phosphorothioate
  modified_base 3: mod_base = OTHER; note = 2'-O-methyluridine-3'-phosphate
  modified_base 4: mod_base = OTHER; note = 2'-O-methyluridine-3'-phosphate
  modified_base 5: mod_base = OTHER; note = 2'-O-methyluridine-3'-phosphate
  modified_base 6: mod_base = OTHER; note = 2'-O-methylcytidine-3'-phosphate
  modified_base 7: mod_base = OTHER; note = 2'-fluorocytidine-3'-phosphate
  modified_base 8: mod_base = OTHER; note = 2'-O-methyluridine-3'-phosphate
  modified_base 9: mod_base = OTHER; note = 2'-fluoroguanosine-3'-phosphate
  modified_base 10: mod_base = OTHER; note = 2'-fluorocytidine-3'-phosphate
  modified_base 11: mod_base = OTHER; note = 2'-fluorocytidine-3'-phosphate
  modified_base 12: mod_base = OTHER; note = 2'-O-methylcytidine-3'-phosphate
  modified_base 13: mod_base = OTHER; note = 2'-O-methyluridine-3'-phosphate
  modified_base 14: mod_base = OTHER; note = 2'-O-methyladenosine-3'-phosphate
  modified_base 15: mod_base = OTHER; note = 2'-O-methyladenosine-3'-phosphate
  modified_base 16: mod_base = OTHER; note = 2'-O-methylguanosine-3'-phosphate
  modified_base 17: mod_base = OTHER; note = 2'-O-methyluridine-3'-phosphate
  modified_base 18: mod_base = OTHER; note = 2'-O-methylcytidine-3'-phosphate
  modified_base 19: mod_base = OTHER; note = 2'-O-methylcytidine-3'-phosphate
  modified_base 20: mod_base = OTHER; note = 2'-O-methyluridine-3'-phosphate
  modified_base 21: mod_base = OTHER; note = 2'-O-methyluridine-3'-phosphate N-[tris(GalNAc-alkyl)-amidodecanoyl)]-4-hydroxyprolinol (Hyp-(GalNAc-alkyl)3)
gatttcctgccctaagtcctt

SEQ ID NO: 481 - RNA, 21 nt, synthetic construct
  source 1..21: mol_type = other RNA
  modified_base 1: mod_base = OTHER; note = 2'-O-methyladenosine-3'-phosphorothioate
  modified_base 2: mod_base = OTHER; note = 2'-O-methylguanosine-3'-phosphorothioate
  modified_base 3: mod_base = OTHER; note = 2'-O-methyluridine-3'-phosphate
  modified_base 4: mod_base = OTHER; note = 2'-O-methylcytidine-3'-phosphate
  modified_base 5: mod_base = OTHER; note = 2'-O-methylcytidine-3'-phosphate
  modified_base 6: mod_base = OTHER; note = 2'-O-methyluridine-3'-phosphate
  modified_base 7: mod_base = OTHER; note = 2'-fluoroguanosine-3'-phosphate
  modified_base 8: mod_base = OTHER; note = 2'-O-methyluridine-3'-phosphate
  modified_base 9: mod_base = OTHER; note = 2'-fluoroguanosine-3'-phosphate
  modified_base 10: mod_base = OTHER; note = 2'-fluoroadenosine-3'-phosphate
  modified_base 11: mod_base = OTHER; note = 2'-fluoroguanosine-3'-phosphate
  modified_base 12: mod_base = OTHER; note = 2'-O-methyladenosine-3'-phosphate
  modified_base 13: mod_base = OTHER; note = 2'-O-methyladenosine-3'-phosphate
  modified_base 14: mod_base = OTHER; note = 2'-O-methylguanosine-3'-phosphate
  modified_base 15: mod_base = OTHER; note = 2'-O-methyladenosine-3'-phosphate
  modified_base 16: mod_base = OTHER; note = 2'-O-methyluridine-3'-phosphate
  modified_base 17: mod_base = OTHER; note = 2'-O-methylguanosine-3'-phosphate
  modified_base 18: mod_base = OTHER; note = 2'-O-methyluridine-3'-phosphate
  modified_base 19: mod_base = OTHER; note = 2'-O-methylcytidine-3'-phosphate
  modified_base 20: mod_base = OTHER; note = 2'-O-methyladenosine-3'-phosphate
  modified_base 21: mod_base = OTHER; note = 2'-O-methyluridine-3'-phosphate N-[tris(GalNAc-alkyl)-amidodecanoyl)]-4-hydroxyprolinol (Hyp-(GalNAc-alkyl)3)
agtcctgtgagaagatgtcat

SEQ ID NO: 482 - RNA, 21 nt, synthetic construct
  source 1..21: mol_type = other RNA
  modified_base 1: mod_base = OTHER; note = 2'-O-methyluridine-3'-phosphorothioate
  modified_base 2: mod_base = OTHER; note = 2'-O-methylcytidine-3'-phosphorothioate
  modified_base 3: mod_base = OTHER; note = 2'-O-methyladenosine-3'-phosphate
  modified_base 4: mod_base = OTHER; note = 2'-O-methylguanosine-3'-phosphate
  modified_base 5: mod_base = OTHER; note = 2'-O-methylguanosine-3'-phosphate
  modified_base 6: mod_base = OTHER; note = 2'-O-methylguanosine-3'-phosphate
  modified_base 7: mod_base = OTHER; note = 2'-fluoroadenosine-3'-phosphate
  modified_base 8: mod_base = OTHER; note = 2'-O-methylcytidine-3'-phosphate
  modified_base 9: mod_base = OTHER; note = 2'-fluorouridine-3'-phosphate
  modified_base 10: mod_base = OTHER; note = 2'-fluoroadenosine-3'-phosphate
  modified_base 11: mod_base = OTHER; note = 2'-fluoroguanosine-3'-phosphate
  modified_base 12: mod_base = OTHER; note = 2'-O-methylguanosine-3'-phosphate
  modified_base 13: mod_base = OTHER; note = 2'-O-methylguanosine-3'-phosphate
  modified_base 14: mod_base = OTHER; note = 2'-O-methyladenosine-3'-phosphate
  modified_base 15: mod_base = OTHER; note = 2'-O-methylguanosine-3'-phosphate
  modified_base 16: mod_base = OTHER; note = 2'-O-methylguanosine-3'-phosphate
  modified_base 17: mod_base = OTHER; note = 2'-O-methylguanosine-3'-phosphate
  modified_base 18: mod_base = OTHER; note = 2'-O-methyladenosine-3'-phosphate
  modified_base 19: mod_base = OTHER; note = 2'-O-methylguanosine-3'-phosphate
  modified_base 20: mod_base = OTHER; note = 2'-O-methylguanosine-3'-phosphate
  modified_base 21: mod_base = OTHER; note = 2'-O-methyluridine-3'-phosphate N-[tris(GalNAc-alkyl)-amidodecanoyl)]-4-hydroxyprolinol (Hyp-(GalNAc-alkyl)3)
tcagggactagggagggaggt

SEQ ID NO: 483 - RNA, 21 nt, synthetic construct
  source 1..21: mol_type = other RNA
  modified_base 1: mod_base = OTHER; note = 2'-O-methyladenosine-3'-phosphorothioate
  modified_base 2: mod_base = OTHER; note = 2'-O-methyladenosine-3'-phosphorothioate
  modified_base 3: mod_base = OTHER; note = 2'-O-methyluridine-3'-phosphate
  modified_base 4: mod_base = OTHER; note = 2'-O-methyluridine-3'-phosphate
  modified_base 5: mod_base = OTHER; note = 2'-O-methyladenosine-3'-phosphate
  modified_base 6: mod_base = OTHER; note = 2'-O-methylcytidine-3'-phosphate
  modified_base 7: mod_base = OTHER; note = 2'-fluorouridine-3'-phosphate
  modified_base 8: mod_base = OTHER; note = 2'-O-methyluridine-3'-phosphate
  modified_base 9: mod_base = OTHER; note = 2'-fluoroadenosine-3'-phosphate
  modified_base 10: mod_base = OTHER; note = 2'-fluoroguanosine-3'-phosphate
  modified_base 11: mod_base = OTHER; note = 2'-fluorocytidine-3'-phosphate
  modified_base 12: mod_base = OTHER; note = 2'-O-methylcytidine-3'-phosphate
  modified_base 13: mod_base = OTHER; note = 2'-O-methyluridine-3'-phosphate
  modified_base 14: mod_base = OTHER; note = 2'-O-methylcytidine-3'-phosphate
  modified_base 15: mod_base = OTHER; note = 2'-O-methyluridine-3'-phosphate
  modified_base 16: mod_base = OTHER; note = 2'-O-methylcytidine-3'-phosphate
  modified_base 17: mod_base = OTHER; note = 2'-O-methylcytidine-3'-phosphate
  modified_base 18: mod_base = OTHER; note = 2'-O-methylcytidine-3'-phosphate
  modified_base 19: mod_base = OTHER; note = 2'-O-methyladenosine-3'-phosphate
  modified_base 20: mod_base = OTHER; note = 2'-O-methyladenosine-3'-phosphate
  modified_base 21: mod_base = OTHER; note = 2'-O-methyluridine-3'-phosphate N-[tris(GalNAc-alkyl)-amidodecanoyl)]-4-hydroxyprolinol (Hyp-(GalNAc-alkyl)3)
aattacttagcctctcccaat

SEQ ID NO: 484 - RNA, 21 nt, synthetic construct
  source 1..21: mol_type = other RNA
  modified_base 1: mod_base = OTHER; note = 2'-O-methylcytidine-3'-phosphorothioate
  modified_base 2: mod_base = OTHER; note = 2'-O-methyladenosine-3'-phosphorothioate
  modified_base 3: mod_base = OTHER; note = 2'-O-methyladenosine-3'-phosphate
  modified_base 4: mod_base = OTHER; note = 2'-O-methylguanosine-3'-phosphate
  modified_base 5: mod_base = OTHER; note = 2'-O-methyladenosine-3'-phosphate
  modified_base 6: mod_base = OTHER; note = 2'-O-methyluridine-3'-phosphate
  modified_base 7: mod_base = OTHER; note = 2'-fluoroguanosine-3'-phosphate
  modified_base 8: mod_base = OTHER; note = 2'-O-methyladenosine-3'-phosphate
  modified_base 9: mod_base = OTHER; note = 2'-fluoroguanosine-3'-phosphate
  modified_base 10: mod_base = OTHER; note = 2'-fluoroadenosine-3'-phosphate
  modified_base 11: mod_base = OTHER; note = 2'-fluoroadenosine-3'-phosphate
  modified_base 12: mod_base = OTHER; note = 2'-O-methyladenosine-3'-phosphate
  modified_base 13: mod_base = OTHER; note = 2'-O-methylguanosine-3'-phosphate
  modified_base 14: mod_base = OTHER; note = 2'-O-methyluridine-3'-phosphate
  modified_base 15: mod_base = OTHER; note = 2'-O-methylcytidine-3'-phosphate
  modified_base 16: mod_base = OTHER; note = 2'-O-methylcytidine-3'-phosphate
  modified_base 17: mod_base = OTHER; note = 2'-O-methyluridine-3'-phosphate
  modified_base 18: mod_base = OTHER; note = 2'-O-methylcytidine-3'-phosphate
  modified_base 19: mod_base = OTHER; note = 2'-O-methyladenosine-3'-phosphate
  modified_base 20: mod_base = OTHER; note = 2'-O-methyladenosine-3'-phosphate
  modified_base 21: mod_base = OTHER; note = 2'-O-methyluridine-3'-phosphate N-[tris(GalNAc-alkyl)-amidodecanoyl)]-4-hydroxyprolinol (Hyp-(GalNAc-alkyl)3)
caagatgagaaagtcctcaat

SEQ ID NO: 485 - RNA, 21 nt, synthetic construct
  source 1..21: mol_type = other RNA
  modified_base 1: mod_base = OTHER; note = 2'-O-methylguanosine-3'-phosphorothioate
  modified_base 2: mod_base = OTHER; note = 2'-O-methylguanosine-3'-phosphorothioate
  modified_base 3: mod_base = OTHER; note = 2'-O-methyladenosine-3'-phosphate
  modified_base 4: mod_base = OTHER; note = 2'-O-methylguanosine-3'-phosphate
  modified_base 5: mod_base = OTHER; note = 2'-O-methylguanosine-3'-phosphate
  modified_base 6: mod_base = OTHER; note = 2'-O-methyladenosine-3'-phosphate
  modified_base 7: mod_base = OTHER; note = 2'-fluoroadenosine-3'-phosphate
  modified_base 8: mod_base = OTHER; note = 2'-O-methylguanosine-3'-phosphate
  modified_base 9: mod_base = OTHER; note = 2'-fluorocytidine-3'-phosphate
  modified_base 10: mod_base = OTHER; note = 2'-fluoroadenosine-3'-phosphate
  modified_base 11: mod_base = OTHER; note = 2'-fluoroguanosine-3'-phosphate
  modified_base 12: mod_base = OTHER; note = 2'-O-methyladenosine-3'-phosphate
  modified_base 13: mod_base = OTHER; note = 2'-O-methyluridine-3'-phosphate
  modified_base 14: mod_base = OTHER; note = 2'-O-methyladenosine-3'-phosphate
  modified_base 15: mod_base = OTHER; note = 2'-O-methylguanosine-3'-phosphate
  modified_base 16: mod_base = OTHER; note = 2'-O-methyladenosine-3'-phosphate
  modified_base 17: mod_base = OTHER; note = 2'-O-methyluridine-3'-phosphate
  modified_base 18: mod_base = OTHER; note = 2'-O-methylguanosine-3'-phosphate
  modified_base 19: mod_base = OTHER; note = 2'-O-methylguanosine-3'-phosphate
  modified_base 20: mod_base = OTHER; note = 2'-O-methyluridine-3'-phosphate
  modified_base 21: mod_base = OTHER; note = 2'-O-methyluridine-3'-phosphate N-[tris(GalNAc-alkyl)-amidodecanoyl)]-4-hydroxyprolinol (Hyp-(GalNAc-alkyl)3)
ggaggaagcagatagatggtt

SEQ ID NO: 486 - RNA, 21 nt, synthetic construct
  source 1..21: mol_type = other RNA
  modified_base 1: mod_base = OTHER; note = 2'-O-methylguanosine-3'-phosphorothioate
  modified_base 2: mod_base = OTHER; note = 2'-O-methylcytidine-3'-phosphorothioate
  modified_base 3: mod_base = OTHER; note = 2'-O-methyladenosine-3'-phosphate
  modified_base 4: mod_base = OTHER; note = 2'-O-methylguanosine-3'-phosphate
  modified_base 5: mod_base = OTHER; note = 2'-O-methylguanosine-3'-phosphate
  modified_base 6: mod_base = OTHER; note = 2'-O-methylcytidine-3'-phosphate
  modified_base 7: mod_base = OTHER; note = 2'-fluorouridine-3'-phosphate
  modified_base 8: mod_base = OTHER; note = 2'-O-methyluridine-3'-phosphate
  modified_base 9: mod_base = OTHER; note = 2'-fluoroguanosine-3'-phosphate
  modified_base 10: mod_base = OTHER; note = 2'-fluoroadenosine-3'-phosphate
  modified_base 11: mod_base = OTHER; note = 2'-fluoroadenosine-3'-phosphate
  modified_base 12: mod_base = OTHER; note = 2'-O-methylguanosine-3'-phosphate
  modified_base 13: mod_base = OTHER; note = 2'-O-methylcytidine-3'-phosphate
  modified_base 14: mod_base = OTHER; note = 2'-O-methyladenosine-3'-phosphate
  modified_base 15: mod_base = OTHER; note = 2'-O-methylguanosine-3'-phosphate
  modified_base 16: mod_base = OTHER; note = 2'-O-methylguanosine-3'-phosphate
  modified_base 17: mod_base = OTHER; note = 2'-O-methylguanosine-3'-phosphate
  modified_base 18: mod_base = OTHER; note = 2'-O-methyluridine-3'-phosphate
  modified_base 19: mod_base = OTHER; note = 2'-O-methyladenosine-3'-phosphate
  modified_base 20: mod_base = OTHER; note = 2'-O-methyladenosine-3'-phosphate
  modified_base 21: mod_base = OTHER; note = 2'-O-methyluridine-3'-phosphate N-[tris(GalNAc-alkyl)-amidodecanoyl)]-4-hydroxyprolinol (Hyp-(GalNAc-alkyl)3)
gcaggcttgaagcagggtaat

SEQ ID NO: 487 - RNA, 21 nt, synthetic construct
  source 1..21: mol_type = other RNA
  modified_base 1: mod_base = OTHER; note = 2'-O-methylguanosine-3'-phosphorothioate
  modified_base 2: mod_base = OTHER; note = 2'-O-methylcytidine-3'-phosphorothioate
  modified_base 3: mod_base = OTHER; note = 2'-O-methyladenosine-3'-phosphate
  modified_base 4: mod_base = OTHER; note = 2'-O-methylguanosine-3'-phosphate
  modified_base 5: mod_base = OTHER; note = 2'-O-methylguanosine-3'-phosphate
  modified_base 6: mod_base = OTHER; note = 2'-O-methylguanosine-3'-phosphate
  modified_base 7: mod_base = OTHER; note = 2'-fluorouridine-3'-phosphate
  modified_base 8: mod_base = OTHER; note = 2'-O-methyladenosine-3'-phosphate
  modified_base 9: mod_base = OTHER; note = 2'-fluoroadenosine-3'-phosphate
  modified_base 10: mod_base = OTHER; note = 2'-fluoroguanosine-3'-phosphate
  modified_base 11: mod_base = OTHER; note = 2'-fluorocytidine-3'-phosphate
  modified_base 12: mod_base = OTHER; note = 2'-O-methyladenosine-3'-phosphate
  modified_base 13: mod_base = OTHER; note = 2'-O-methylguanosine-3'-phosphate
  modified_base 14: mod_base = OTHER; note = 2'-O-methylguanosine-3'-phosphate
  modified_base 15: mod_base = OTHER; note = 2'-O-methylcytidine-3'-phosphate
  modified_base 16: mod_base = OTHER; note = 2'-O-methyluridine-3'-phosphate
  modified_base 17: mod_base = OTHER; note = 2'-O-methylguanosine-3'-phosphate
  modified_base 18: mod_base = OTHER; note = 2'-O-methylguanosine-3'-phosphate
  modified_base 19: mod_base = OTHER; note = 2'-O-methylcytidine-3'-phosphate
  modified_base 20: mod_base = OTHER; note = 2'-O-methylcytidine-3'-phosphate
  modified_base 21: mod_base = OTHER; note = 2'-O-methyluridine-3'-phosphate N-[tris(GalNAc-alkyl)-amidodecanoyl)]-4-hydroxyprolinol (Hyp-(GalNAc-alkyl)3)
gcagggtaagcaggctggcct

SEQ ID NO: 488 - RNA, 21 nt, synthetic construct
  source 1..21: mol_type = other RNA
  modified_base 1: mod_base = OTHER; note = 2'-O-methylguanosine-3'-phosphorothioate
  modified_base 2: mod_base = OTHER; note = 2'-O-methylguanosine-3'-phosphorothioate
  modified_base 3: mod_base = OTHER; note = 2'-O-methylcytidine-3'-phosphate
  modified_base 4: mod_base = OTHER; note = 2'-O-methylcytidine-3'-phosphate
  modified_base 5: mod_base = OTHER; note = 2'-O-methylcytidine-3'-phosphate
  modified_base 6: mod_base = OTHER; note = 2'-O-methyladenosine-3'-phosphate
  modified_base 7: mod_base = OTHER; note = 2'-fluoroguanosine-3'-phosphate
  modified_base 8: mod_base = OTHER; note = 2'-O-methylguanosine-3'-phosphate
  modified_base 9: mod_base = OTHER; note = 2'-fluoroguanosine-3'-phosphate
  modified_base 10: mod_base = OTHER; note = 2'-fluorouridine-3'-phosphate
  modified_base 11: mod_base = OTHER; note = 2'-fluoroadenosine-3'-phosphate
  modified_base 12: mod_base = OTHER; note = 2'-O-methyladenosine-3'-phosphate
  modified_base 13: mod_base = OTHER; note = 2'-O-methylguanosine-3'-phosphate
  modified_base 14: mod_base = OTHER; note = 2'-O-methylguanosine-3'-phosphate
  modified_base 15: mod_base = OTHER; note = 2'-O-methylguanosine-3'-phosphate
  modified_base 16: mod_base = OTHER; note = 2'-O-methylcytidine-3'-phosphate
  modified_base 17: mod_base = OTHER; note = 2'-O-methyluridine-3'-phosphate
  modified_base 18: mod_base = OTHER; note = 2'-O-methylguanosine-3'-phosphate
  modified_base 19: mod_base = OTHER; note = 2'-O-methyluridine-3'-phosphate
  modified_base 20: mod_base = OTHER; note = 2'-O-methyluridine-3'-phosphate
  modified_base 21: mod_base = OTHER; note = 2'-O-methyluridine-3'-phosphate N-[tris(GalNAc-alkyl)-amidodecanoyl)]-4-hydroxyprolinol (Hyp-(GalNAc-alkyl)3)
ggcccagggtaagggctgttt

SEQ ID NO: 489 - RNA, 21 nt, synthetic construct
  source 1..21: mol_type = other RNA
  modified_base 1: mod_base = OTHER; note = 2'-O-methylguanosine-3'-phosphorothioate
  modified_base 2: mod_base = OTHER; note = 2'-O-methylguanosine-3'-phosphorothioate
  modified_base 3: mod_base = OTHER; note = 2'-O-methylcytidine-3'-phosphate
  modified_base 4: mod_base = OTHER; note = 2'-O-methyluridine-3'-phosphate
  modified_base 5: mod_base = OTHER; note = 2'-O-methylguanosine-3'-phosphate
  modified_base 6: mod_base = OTHER; note = 2'-O-methyluridine-3'-phosphate
  modified_base 7: mod_base = OTHER; note = 2'-fluorouridine-3'-phosphate
  modified_base 8: mod_base = OTHER; note = 2'-O-methylguanosine-3'-phosphate
  modified_base 9: mod_base = OTHER; note = 2'-fluoroadenosine-3'-phosphate
  modified_base 10: mod_base = OTHER; note = 2'-fluoroguanosine-3'-phosphate
  modified_base 11: mod_base = OTHER; note = 2'-fluoroguanosine-3'-phosphate
  modified_base 12: mod_base = OTHER; note = 2'-O-methyluridine-3'-phosphate
  modified_base 13: mod_base = OTHER; note = 2'-O-methyladenosine-3'-phosphate
  modified_base 14: mod_base = OTHER; note = 2'-O-methylcytidine-3'-phosphate
  modified_base 15: mod_base = OTHER; note = 2'-O-methylcytidine-3'-phosphate
  modified_base 16: mod_base = OTHER; note = 2'-O-methyluridine-3'-phosphate
  modified_base 17: mod_base = OTHER; note = 2'-O-methyluridine-3'-phosphate
  modified_base 18: mod_base = OTHER; note = 2'-O-methyladenosine-3'-phosphate
  modified_base 19: mod_base = OTHER; note = 2'-O-methyladenosine-3'-phosphate
  modified_base 20: mod_base = OTHER; note = 2'-O-methylguanosine-3'-phosphate
  modified_base 21: mod_base = OTHER; note = 2'-O-methyluridine-3'-phosphate N-[tris(GalNAc-alkyl)-amidodecanoyl)]-4-hydroxyprolinol (Hyp-(GalNAc-alkyl)3)
ggctgttgaggtaccttaagt

SEQ ID NO: 490 - RNA, 21 nt, synthetic construct
  source 1..21: mol_type = other RNA
  modified_base 1: mod_base = OTHER; note = 2'-O-methyladenosine-3'-phosphorothioate
  modified_base 2: mod_base = OTHER; note = 2'-O-methylcytidine-3'-phosphorothioate
  modified_base 3: mod_base = OTHER; note = 2'-O-methylcytidine-3'-phosphate
  modified_base 4: mod_base = OTHER; note = 2'-O-methyluridine-3'-phosphate
  modified_base 5: mod_base = OTHER; note = 2'-O-methyluridine-3'-phosphate
  modified_base 6: mod_base = OTHER; note = 2'-O-methyladenosine-3'-phosphate
  modified_base 7: mod_base = OTHER; note = 2'-fluoroadenosine-3'-phosphate
  modified_base 8: mod_base = OTHER; note = 2'-O-methylguanosine-3'-phosphate
  modified_base 9: mod_base = OTHER; note = 2'-fluoroguanosine-3'-phosphate
  modified_base 10: mod_base = OTHER; note = 2'-fluoroguanosine-3'-phosphate
  modified_base 11: mod_base = OTHER; note = 2'-fluoroadenosine-3'-phosphate
  modified_base 12: mod_base = OTHER; note = 2'-O-methyladenosine-3'-phosphate
  modified_base 13: mod_base = OTHER; note = 2'-O-methylguanosine-3'-phosphate
  modified_base 14: mod_base = OTHER; note = 2'-O-methylguanosine-3'-phosphate
  modified_base 15: mod_base = OTHER; note = 2'-O-methyluridine-3'-phosphate
  modified_base 16: mod_base = OTHER; note = 2'-O-methylcytidine-3'-phosphate
  modified_base 17: mod_base = OTHER; note = 2'-O-methyladenosine-3'-phosphate
  modified_base 18: mod_base = OTHER; note = 2'-O-methyladenosine-3'-phosphate
  modified_base 19: mod_base = OTHER; note = 2'-O-methylguanosine-3'-phosphate
  modified_base 20: mod_base = OTHER; note = 2'-O-methyladenosine-3'-phosphate
  modified_base 21: mod_base = OTHER; note = 2'-O-methyluridine-3'-phosphate N-[tris(GalNAc-alkyl)-amidodecanoyl)]-4-hydroxyprolinol (Hyp-(GalNAc-alkyl)3)
accttaagggaaggtcaagat

SEQ ID NO: 491 - RNA, 21 nt, synthetic construct
  source 1..21: mol_type = other RNA
  modified_base 1: mod_base = OTHER; note = 2'-O-methylguanosine-3'-phosphorothioate
  modified_base 2: mod_base = OTHER; note = 2'-O-methyluridine-3'-phosphorothioate
  modified_base 3: mod_base = OTHER; note = 2'-O-methylcytidine-3'-phosphate
  modified_base 4: mod_base = OTHER; note = 2'-O-methyladenosine-3'-phosphate
  modified_base 5: mod_base = OTHER; note = 2'-O-methyladenosine-3'-phosphate
  modified_base 6: mod_base = OTHER; note = 2'-O-methylguanosine-3'-phosphate
  modified_base 7: mod_base = OTHER; note = 2'-fluoroadenosine-3'-phosphate
  modified_base 8: mod_base = OTHER; note = 2'-O-methylguanosine-3'-phosphate
  modified_base 9: mod_base = OTHER; note = 2'-fluoroguanosine-3'-phosphate
  modified_base 10: mod_base = OTHER; note = 2'-fluoroguanosine-3'-phosphate
  modified_base 11: mod_base = OTHER; note = 2'-fluoroadenosine-3'-phosphate
  modified_base 12: mod_base = OTHER; note = 2'-O-methylguanosine-3'-phosphate
  modified_base 13: mod_base = OTHER; note = 2'-O-methyladenosine-3'-phosphate
  modified_base 14: mod_base = OTHER; note = 2'-O-methyluridine-3'-phosphate
  modified_base 15: mod_base = OTHER; note = 2'-O-methylguanosine-3'-phosphate
  modified_base 16: mod_base = OTHER; note = 2'-O-methylguanosine-3'-phosphate
  modified_base 17: mod_base = OTHER; note = 2'-O-methylguanosine-3'-phosphate
  modified_base 18: mod_base = OTHER; note = 2'-O-methylcytidine-3'-phosphate
  modified_base 19: mod_base = OTHER; note = 2'-O-methyladenosine-3'-phosphate
  modified_base 20: mod_base = OTHER; note = 2'-O-methyladenosine-3'-phosphate
  modified_base 21: mod_base = OTHER; note = 2'-O-methyluridine-3'-phosphate N-[tris(GalNAc-alkyl)-amidodecanoyl)]-4-hydroxyprolinol (Hyp-(GalNAc-alkyl)3)
gtcaagagggagatgggcaat

SEQ ID NO: 492 - RNA, 21 nt, synthetic construct
  source 1..21: mol_type = other RNA
  modified_base 1: mod_base = OTHER; note = 2'-O-methylguanosine-3'-phosphorothioate
  modified_base 2: mod_base = OTHER; note = 2'-O-methylcytidine-3'-phosphorothioate
  modified_base 3: mod_base = OTHER; note = 2'-O-methyluridine-3'-phosphate
  modified_base 4: mod_base = OTHER; note = 2'-O-methylguanosine-3'-phosphate
  modified_base 5: mod_base = OTHER; note = 2'-O-methyladenosine-3'-phosphate
  modified_base 6: mod_base = OTHER; note = 2'-O-methylguanosine-3'-phosphate
  modified_base 7: mod_base = OTHER; note = 2'-fluoroguanosine-3'-phosphate
  modified_base 8: mod_base = OTHER; note = 2'-O-methylguanosine-3'-phosphate
  modified_base 9: mod_base = OTHER; note = 2'-fluoroadenosine-3'-phosphate
  modified_base 10: mod_base = OTHER; note = 2'-fluoroguanosine-3'-phosphate
  modified_base 11: mod_base = OTHER; note = 2'-fluoroguanosine-3'-phosphate
  modified_base 12: mod_base = OTHER; note = 2'-O-methyladenosine-3'-phosphate
  modified_base 13: mod_base = OTHER; note = 2'-O-methyluridine-3'-phosphate
  modified_base 14: mod_base = OTHER; note = 2'-O-methylguanosine-3'-phosphate
  modified_base 15: mod_base = OTHER; note = 2'-O-methylcytidine-3'-phosphate
  modified_base 16: mod_base = OTHER; note = 2'-O-methyluridine-3'-phosphate
  modified_base 17: mod_base = OTHER; note = 2'-O-methyluridine-3'-phosphate
  modified_base 18: mod_base = OTHER; note = 2'-O-methyladenosine-3'-phosphate
  modified_base 19: mod_base = OTHER; note = 2'-O-methylguanosine-3'-phosphate
  modified_base 20: mod_base = OTHER; note = 2'-O-methylguanosine-3'-phosphate
  modified_base 21: mod_base = OTHER; note = 2'-O-methyluridine-3'-phosphate N-[tris(GalNAc-alkyl)-amidodecanoyl)]-4-hydroxyprolinol (Hyp-(GalNAc-alkyl)3)
gctgagggaggatgcttaggt

SEQ ID NO: 493 - RNA, 21 nt, synthetic construct
  source 1..21: mol_type = other RNA
  modified_base 1: mod_base = OTHER; note = 2'-O-methyladenosine-3'-phosphorothioate
  modified_base 2: mod_base = OTHER; note = 2'-O-methylguanosine-3'-phosphorothioate
  modified_base 3: mod_base = OTHER; note = 2'-O-methyladenosine-3'-phosphate
  modified_base 4: mod_base = OTHER; note = 2'-O-methyladenosine-3'-phosphate
  modified_base 5: mod_base = OTHER; note = 2'-O-methyladenosine-3'-phosphate
  modified_base 6: mod_base = OTHER; note = 2'-O-methylcytidine-3'-phosphate
  modified_base 7: mod_base = OTHER; note = 2'-fluoroadenosine-3'-phosphate
  modified_base 8: mod_base = OTHER; note = 2'-O-methylguanosine-3'-phosphate
  modified_base 9: mod_base = OTHER; note = 2'-fluoroguanosine-3'-phosphate
  modified_base 10: mod_base = OTHER; note = 2'-fluoroadenosine-3'-phosphate
  modified_base 11: mod_base = OTHER; note = 2'-fluoroguanosine-3'-phosphate
  modified_base 12: mod_base = OTHER; note = 2'-O-methyluridine-3'-phosphate
  modified_base 13: mod_base = OTHER; note = 2'-O-methylcytidine-3'-phosphate
  modified_base 14: mod_base = OTHER; note = 2'-O-methyladenosine-3'-phosphate
  modified_base 15: mod_base = OTHER; note = 2'-O-methylguanosine-3'-phosphate
  modified_base 16: mod_base = OTHER; note = 2'-O-methylguanosine-3'-phosphate
  modified_base 17: mod_base = OTHER; note = 2'-O-methyladenosine-3'-phosphate
  modified_base 18: mod_base = OTHER; note = 2'-O-methyladenosine-3'-phosphate
  modified_base 19: mod_base = OTHER; note = 2'-O-methyladenosine-3'-phosphate
  modified_base 20: mod_base = OTHER; note = 2'-O-methyladenosine-3'-phosphate
  modified_base 21: mod_base = OTHER; note = 2'-O-methyluridine-3'-phosphate N-[tris(GalNAc-alkyl)-amidodecanoyl)]-4-hydroxyprolinol (Hyp-(GalNAc-alkyl)3)
agaaacaggagtcaggaaaat

SEQ ID NO: 494 - RNA, 21 nt, synthetic construct
  source 1..21: mol_type = other RNA
  modified_base 1: mod_base = OTHER; note = 2'-O-methyluridine-3'-phosphorothioate
  modified_base 2: mod_base = OTHER; note = 2'-O-methylcytidine-3'-phosphorothioate
  modified_base 3: mod_base = OTHER; note = 2'-O-methyladenosine-3'-phosphate
  modified_base 4: mod_base = OTHER; note = 2'-O-methylguanosine-3'-phosphate
  modified_base 5: mod_base = OTHER; note = 2'-O-methylguanosine-3'-phosphate
  modified_base 6: mod_base = OTHER; note = 2'-O-methyladenosine-3'-phosphate
  modified_base 7: mod_base = OTHER; note = 2'-fluoroadenosine-3'-phosphate
  modified_base 8: mod_base = OTHER; note = 2'-O-methyladenosine-3'-phosphate
  modified_base 9: mod_base = OTHER; note = 2'-fluoroadenosine-3'-phosphate
  modified_base 10: mod_base = OTHER; note = 2'-fluorouridine-3'-phosphate
  modified_base 11: mod_base = OTHER; note = 2'-fluoroguanosine-3'-phosphate
  modified_base 12: mod_base = OTHER; note = 2'-O-methyladenosine-3'-phosphate
  modified_base 13: mod_base = OTHER; note = 2'-O-methylguanosine-3'-phosphate
  modified_base 14: mod_base = OTHER; note = 2'-O-methylguanosine-3'-phosphate
  modified_base 15: mod_base = OTHER; note = 2'-O-methylcytidine-3'-phosphate
  modified_base 16: mod_base = OTHER; note = 2'-O-methyladenosine-3'-phosphate
  modified_base 17: mod_base = OTHER; note = 2'-O-methylcytidine-3'-phosphate
  modified_base 18: mod_base = OTHER; note = 2'-O-methyluridine-3'-phosphate
  modified_base 19: mod_base = OTHER; note = 2'-O-methyladenosine-3'-phosphate
  modified_base 20: mod_base = OTHER; note = 2'-O-methyladenosine-3'-phosphate
  modified_base 21: mod_base = OTHER; note = 2'-O-methyluridine-3'-phosphate N-[tris(GalNAc-alkyl)-amidodecanoyl)]-4-hydroxyprolinol (Hyp-(GalNAc-alkyl)3)
tcaggaaaatgaggcactaat

SEQ ID NO: 495 - RNA, 21 nt, synthetic construct
  source 1..21: mol_type = other RNA
  modified_base 1: mod_base = OTHER; note = 2'-O-methylguanosine-3'-phosphorothioate
  modified_base 2: mod_base = OTHER; note = 2'-O-methylguanosine-3'-phosphorothioate
  modified_base 3: mod_base = OTHER; note = 2'-O-methylcytidine-3'-phosphate
  modified_base 4: mod_base = OTHER; note = 2'-O-methyladenosine-3'-phosphate
  modified_base 5: mod_base = OTHER; note = 2'-O-methylcytidine-3'-phosphate
  modified_base 6: mod_base = OTHER; note = 2'-O-methyluridine-3'-phosphate
  modified_base 7: mod_base = OTHER; note = 2'-fluoroadenosine-3'-phosphate
  modified_base 8: mod_base = OTHER; note = 2'-O-methyladenosine-3'-phosphate
  modified_base 9: mod_base = OTHER; note = 2'-fluoroguanosine-3'-phosphate
  modified_base 10: mod_base = OTHER; note = 2'-fluorocytidine-3'-phosphate
  modified_base 11: mod_base = OTHER; note = 2'-fluorocytidine-3'-phosphate
  modified_base 12: mod_base = OTHER; note = 2'-O-methyluridine-3'-phosphate
  modified_base 13: mod_base = OTHER; note = 2'-O-methyladenosine-3'-phosphate
  modified_base 14: mod_base = OTHER; note = 2'-O-methyladenosine-3'-phosphate
  modified_base 15: mod_base = OTHER; note = 2'-O-methylguanosine-3'-phosphate
  modified_base 16: mod_base = OTHER; note = 2'-O-methyladenosine-3'-phosphate
  modified_base 17: mod_base = OTHER; note = 2'-O-methyladenosine-3'-phosphate
  modified_base 18: mod_base = OTHER; note = 2'-O-methylguanosine-3'-phosphate
  modified_base 19: mod_base = OTHER; note = 2'-O-methyluridine-3'-phosphate
  modified_base 20: mod_base = OTHER; note = 2'-O-methyluridine-3'-phosphate
  modified_base 21: mod_base = OTHER; note = 2'-O-methyluridine-3'-phosphate N-[tris(GalNAc-alkyl)-amidodecanoyl)]-4-hydroxyprolinol (Hyp-(GalNAc-alkyl)3)
ggcactaagcctaagaagttt

SEQ ID NO: 496 - RNA, 21 nt, synthetic construct
  source 1..21: mol_type = other RNA
  modified_base 1: mod_base = OTHER; note = 2'-O-methyladenosine-3'-phosphorothioate
  modified_base 2: mod_base = OTHER; note = 2'-O-methyladenosine-3'-phosphorothioate
  modified_base 3: mod_base = OTHER; note = 2'-O-methylguanosine-3'-phosphate
  modified_base 4: mod_base = OTHER; note = 2'-O-methyladenosine-3'-phosphate
  modified_base 5: mod_base = OTHER; note = 2'-O-methyladenosine-3'-phosphate
  modified_base 6: mod_base = OTHER; note = 2'-O-methylguanosine-3'-phosphate
  modified_base 7: mod_base = OTHER; note = 2'-fluorouridine-3'-phosphate
  modified_base 8: mod_base = OTHER; note = 2'-O-methyluridine-3'-phosphate
  modified_base 9: mod_base = OTHER; note = 2'-fluorocytidine-3'-phosphate
  modified_base 10: mod_base = OTHER; note = 2'-fluorocytidine-3'-phosphate
  modified_base 11: mod_base = OTHER; note = 2'-fluorocytidine-3'-phosphate
  modified_base 12: mod_base = OTHER; note = 2'-O-methyluridine-3'-phosphate
  modified_base 13: mod_base = OTHER; note = 2'-O-methylguanosine-3'-phosphate
  modified_base 14: mod_base = OTHER; note = 2'-O-methylguanosine-3'-phosphate
  modified_base 15: mod_base = OTHER; note = 2'-O-methyluridine-3'-phosphate
  modified_base 16: mod_base = OTHER; note = 2'-O-methyluridine-3'-phosphate
  modified_base 17: mod_base = OTHER; note = 2'-O-methyluridine-3'-phosphate
  modified_base 18: mod_base = OTHER; note = 2'-O-methyluridine-3'-phosphate
  modified_base 19: mod_base = OTHER; note = 2'-O-methyluridine-3'-phosphate
  modified_base 20: mod_base = OTHER; note = 2'-O-methylcytidine-3'-phosphate
  modified_base 21: mod_base = OTHER; note = 2'-O-methyluridine-3'-phosphate N-[tris(GalNAc-alkyl)-amidodecanoyl)]-4-hydroxyprolinol (Hyp-(GalNAc-alkyl)3)
aagaagttccctggtttttct

SEQ ID NO: 497 - RNA, 21 nt, synthetic construct
  source 1..21: mol_type = other RNA
  modified_base 1: mod_base = OTHER; note = 2'-O-methylcytidine-3'-phosphorothioate
  modified_base 2: mod_base = OTHER; note = 2'-O-methyladenosine-3'-phosphorothioate
  modified_base 3: mod_base = OTHER; note = 2'-O-methylcytidine-3'-phosphate
  modified_base 4: mod_base = OTHER; note = 2'-O-methyluridine-3'-phosphate
  modified_base 5: mod_base = OTHER; note = 2'-O-methylguanosine-3'-phosphate
  modified_base 6: mod_base = OTHER; note = 2'-O-methylguanosine-3'-phosphate
  modified_base 7: mod_base = OTHER; note = 2'-fluoroguanosine-3'-phosphate
  modified_base 8: mod_base = OTHER; note = 2'-O-methyladenosine-3'-phosphate
  modified_base 9: mod_base = OTHER; note = 2'-fluoroguanosine-3'-phosphate
  modified_base 10: mod_base = OTHER; note = 2'-fluoroadenosine-3'-phosphate
  modified_base 11: mod_base = OTHER; note = 2'-fluorocytidine-3'-phosphate
  modified_base 12: mod_base = OTHER; note = 2'-O-methyladenosine-3'-phosphate
  modified_base 13: mod_base = OTHER; note = 2'-O-methyladenosine-3'-phosphate
  modified_base 14: mod_base = OTHER; note = 2'-O-methylguanosine-3'-phosphate
  modified_base 15: mod_base = OTHER; note = 2'-O-methylcytidine-3'-phosphate
  modified_base 16: mod_base = OTHER; note = 2'-O-methyladenosine-3'-phosphate
  modified_base 17: mod_base = OTHER; note = 2'-O-methyluridine-3'-phosphate
  modified_base 18: mod_base = OTHER; note = 2'-O-methyluridine-3'-phosphate
  modified_base 19: mod_base = OTHER; note = 2'-O-methyluridine-3'-phosphate
  modified_base 20: mod_base = OTHER; note = 2'-O-methyladenosine-3'-phosphate
  modified_base 21: mod_base = OTHER; note = 2'-O-methyluridine-3'-phosphate N-[tris(GalNAc-alkyl)-amidodecanoyl)]-4-hydroxyprolinol (Hyp-(GalNAc-alkyl)3)
cactgggagacaagcatttat

SEQ ID NO: 498 - RNA, 21 nt, synthetic construct
  source 1..21: mol_type = other RNA
  modified_base 1: mod_base = OTHER; note = 2'-O-methyladenosine-3'-phosphorothioate
  modified_base 2: mod_base = OTHER; note = 2'-O-methyladenosine-3'-phosphorothioate
  modified_base 3: mod_base = OTHER; note = 2'-O-methylguanosine-3'-phosphate
  modified_base 4: mod_base = OTHER; note = 2'-O-methylcytidine-3'-phosphate
  modified_base 5: mod_base = OTHER; note = 2'-O-methyladenosine-3'-phosphate
  modified_base 6: mod_base = OTHER; note = 2'-O-methyluridine-3'-phosphate
  modified_base 7: mod_base = OTHER; note = 2'-fluorouridine-3'-phosphate
  modified_base 8: mod_base = OTHER; note = 2'-O-methyluridine-3'-phosphate
  modified_base 9: mod_base = OTHER; note = 2'-fluoroadenosine-3'-phosphate
  modified_base 10: mod_base = OTHER; note = 2'-fluorouridine-3'-phosphate
  modified_base 11: mod_base = OTHER; note = 2'-fluoroadenosine-3'-phosphate
  modified_base 12: mod_base = OTHER; note = 2'-O-methylcytidine-3'-phosphate
  modified_base 13: mod_base = OTHER; note = 2'-O-methyluridine-3'-phosphate
  modified_base 14: mod_base = OTHER; note = 2'-O-methyluridine-3'-phosphate
  modified_base 15: mod_base = OTHER; note = 2'-O-methyluridine-3'-phosphate
  modified_base 16: mod_base = OTHER; note = 2'-O-methylcytidine-3'-phosphate
  modified_base 17: mod_base = OTHER; note = 2'-O-methyluridine-3'-phosphate
  modified_base 18: mod_base = OTHER; note = 2'-O-methyluridine-3'-phosphate
  modified_base 19: mod_base = OTHER; note = 2'-O-methyluridine-3'-phosphate
  modified_base 20: mod_base = OTHER; note = 2'-O-methylcytidine-3'-phosphate
  modified_base 21: mod_base = OTHER; note = 2'-O-methyluridine-3'-phosphate N-[tris(GalNAc-alkyl)-amidodecanoyl)]-4-hydroxyprolinol (Hyp-(GalNAc-alkyl)3)
aagcatttatactttctttct

SEQ ID NO: 499 - RNA, 21 nt, synthetic construct
  source 1..21: mol_type = other RNA
  modified_base 1: mod_base = OTHER; note = 2'-O-methyluridine-3'-phosphorothioate
  modified_base 2: mod_base = OTHER; note = 2'-O-methyluridine-3'-phosphorothioate
  modified_base 3: mod_base = OTHER; note = 2'-O-methyluridine-3'-phosphate
  modified_base 4: mod_base = OTHER; note = 2'-O-methyluridine-3'-phosphate
  modified_base 5: mod_base = OTHER; note = 2'-O-methylguanosine-3'-phosphate
  modified_base 6: mod_base = OTHER; note = 2'-O-methyladenosine-3'-phosphate
  modified_base 7: mod_base = OTHER; note = 2'-fluoroguanosine-3'-phosphate
  modified_base 8: mod_base = OTHER; note = 2'-O-methyladenosine-3'-phosphate
  modified_base 9: mod_base = OTHER; note = 2'-fluorouridine-3'-phosphate
  modified_base 10: mod_base = OTHER; note = 2'-fluorocytidine-3'-phosphate
  modified_base 11: mod_base = OTHER; note = 2'-fluoroguanosine-3'-phosphate
  modified_base 12: mod_base = OTHER; note = 2'-O-methyladenosine-3'-phosphate
  modified_base 13: mod_base = OTHER; note = 2'-O-methylguanosine-3'-phosphate
  modified_base 14: mod_base = OTHER; note = 2'-O-methyluridine-3'-phosphate
  modified_base 15: mod_base = OTHER; note = 2'-O-methylcytidine-3'-phosphate
  modified_base 16: mod_base = OTHER; note = 2'-O-methyluridine-3'-phosphate
  modified_base 17: mod_base = OTHER; note = 2'-O-methylcytidine-3'-phosphate
  modified_base 18: mod_base = OTHER; note = 2'-O-methylguanosine-3'-phosphate
  modified_base 19: mod_base = OTHER; note = 2'-O-methylcytidine-3'-phosphate
  modified_base 20: mod_base = OTHER; note = 2'-O-methyluridine-3'-phosphate
  modified_base 21: mod_base = OTHER; note = 2'-O-methyluridine-3'-phosphate N-[tris(GalNAc-alkyl)-amidodecanoyl)]-4-hydroxyprolinol (Hyp-(GalNAc-alkyl)3)
ttttgagatcgagtctcgctt

SEQ ID NO: 500 - RNA, 21 nt, synthetic construct
  source 1..21: mol_type = other RNA
  modified_base 1: mod_base = OTHER; note = 2'-O-methyluridine-3'-phosphorothioate
  modified_base 2: mod_base = OTHER; note = 2'-O-methylcytidine-3'-phosphorothioate
  modified_base 3: mod_base = OTHER; note = 2'-O-methyluridine-3'-phosphate
  modified_base 4: mod_base = OTHER; note = 2'-O-methylcytidine-3'-phosphate
  modified_base 5: mod_base = OTHER; note = 2'-O-methylguanosine-3'-phosphate
  modified_base 6: mod_base = OTHER; note = 2'-O-methylcytidine-3'-phosphate
  modified_base 7: mod_base = OTHER; note = 2'-fluorouridine-3'-phosphate
  modified_base 8: mod_base = OTHER; note = 2'-O-methylcytidine-3'-phosphate
  modified_base 9: mod_base = OTHER; note = 2'-fluorouridine-3'-phosphate
  modified_base 10: mod_base = OTHER; note = 2'-fluoroguanosine-3'-phosphate
  modified_base 11: mod_base = OTHER; note = 2'-fluorouridine-3'-phosphate
  modified_base 12: mod_base = OTHER; note = 2'-O-methylcytidine-3'-phosphate
  modified_base 13: mod_base = OTHER; note = 2'-O-methyladenosine-3'-phosphate
  modified_base 14: mod_base = OTHER; note = 2'-O-methylcytidine-3'-phosphate
  modified_base 15: mod_base = OTHER; note = 2'-O-methylcytidine-3'-phosphate
  modified_base 16: mod_base = OTHER; note = 2'-O-methyladenosine-3'-phosphate
  modified_base 17: mod_base = OTHER; note = 2'-O-methylguanosine-3'-phosphate
  modified_base 18: mod_base = OTHER; note = 2'-O-methylguanosine-3'-phosphate
  modified_base 19: mod_base = OTHER; note = 2'-O-methylcytidine-3'-phosphate
  modified_base 20: mod_base = OTHER; note = 2'-O-methyluridine-3'-phosphate
  modified_base 21: mod_base = OTHER; note = 2'-O-methyluridine-3'-phosphate N-[tris(GalNAc-alkyl)-amidodecanoyl)]-4-hydroxyprolinol (Hyp-(GalNAc-alkyl)3)
tctcgctctgtcaccaggctt

SEQ ID NO: 501 - RNA, 21 nt, synthetic construct
  source 1..21: mol_type = other RNA
  modified_base 1: mod_base = OTHER; note = 2'-O-methyladenosine-3'-phosphorothioate
  modified_base 2: mod_base = OTHER; note = 2'-O-methylguanosine-3'-phosphorothioate
  modified_base 3: mod_base = OTHER; note = 2'-O-methyluridine-3'-phosphate
  modified_base 4: mod_base = OTHER; note = 2'-O-methylguanosine-3'-phosphate
  modified_base 5: mod_base = OTHER; note = 2'-O-methylcytidine-3'-phosphate
  modified_base 6: mod_base = OTHER; note = 2'-O-methyladenosine-3'-phosphate
  modified_base 7: mod_base = OTHER; note = 2'-fluoroguanosine-3'-phosphate
  modified_base 8: mod_base = OTHER; note = 2'-O-methyluridine-3'-phosphate
  modified_base 9: mod_base = OTHER; note = 2'-fluoroguanosine-3'-phosphate
  modified_base 10: mod_base = OTHER; note = 2'-fluoroadenosine-3'-phosphate
  modified_base 11: mod_base = OTHER; note = 2'-fluorocytidine-3'-phosphate
  modified_base 12: mod_base = OTHER; note = 2'-O-methyladenosine-3'-phosphate
  modified_base 13: mod_base = OTHER; note = 2'-O-methylcytidine-3'-phosphate
  modified_base 14: mod_base = OTHER; note = 2'-O-methylguanosine-3'-phosphate
  modified_base 15: mod_base = OTHER; note = 2'-O-methyladenosine-3'-phosphate
  modified_base 16: mod_base = OTHER; note = 2'-O-methyluridine-3'-phosphate
  modified_base 17: mod_base = OTHER; note = 2'-O-methylcytidine-3'-phosphate
  modified_base 18: mod_base = OTHER; note = 2'-O-methyluridine-3'-phosphate
  modified_base 19: mod_base = OTHER; note = 2'-O-methyluridine-3'-phosphate
  modified_base 20: mod_base = OTHER; note = 2'-O-methylguanosine-3'-phosphate
  modified_base 21: mod_base = OTHER; note = 2'-O-methyluridine-3'-phosphate N-[tris(GalNAc-alkyl)-amidodecanoyl)]-4-hydroxyprolinol (Hyp-(GalNAc-alkyl)3)
agtgcagtgacacgatcttgt

SEQ ID NO: 502 - RNA, 21 nt, synthetic construct
  source 1..21: mol_type = other RNA
  modified_base 1: mod_base = OTHER; note = 2'-O-methylguanosine-3'-phosphorothioate
  modified_base 2: mod_base = OTHER; note = 2'-O-methylcytidine-3'-phosphorothioate
  modified_base 3: mod_base = OTHER; note = 2'-O-methyluridine-3'-phosphate
  modified_base 4: mod_base = OTHER; note = 2'-O-methylcytidine-3'-phosphate
  modified_base 5: mod_base = OTHER; note = 2'-O-methyladenosine-3'-phosphate
  modified_base 6: mod_base = OTHER; note = 2'-O-methylcytidine-3'-phosphate
  modified_base 7: mod_base = OTHER; note = 2'-fluorouridine-3'-phosphate
  modified_base 8: mod_base = OTHER; note = 2'-O-methylguanosine-3'-phosphate
  modified_base 9: mod_base = OTHER; note = 2'-fluorocytidine-3'-phosphate
  modified_base 10: mod_base = OTHER; note = 2'-fluoroadenosine-3'-phosphate
  modified_base 11: mod_base = OTHER; note = 2'-fluoroadenosine-3'-phosphate
  modified_base 12: mod_base = OTHER; note = 2'-O-methylcytidine-3'-phosphate
  modified_base 13: mod_base = OTHER; note = 2'-O-methylcytidine-3'-phosphate
  modified_base 14: mod_base = OTHER; note = 2'-O-methyluridine-3'-phosphate
  modified_base 15: mod_base = OTHER; note = 2'-O-methylcytidine-3'-phosphate
  modified_base 16: mod_base = OTHER; note = 2'-O-methylcytidine-3'-phosphate
  modified_base 17: mod_base = OTHER; note = 2'-O-methylguanosine-3'-phosphate
  modified_base 18: mod_base = OTHER; note = 2'-O-methyluridine-3'-phosphate
  modified_base 19: mod_base = OTHER; note = 2'-O-methylcytidine-3'-phosphate
  modified_base 20: mod_base = OTHER; note = 2'-O-methyluridine-3'-phosphate
  modified_base 21: mod_base = OTHER; note = 2'-O-methyluridine-3'-phosphate N-[tris(GalNAc-alkyl)-amidodecanoyl)]-4-hydroxyprolinol (Hyp-(GalNAc-alkyl)3)
gctcactgcaacctccgtctt

SEQ ID NO: 503 - RNA, 21 nt, synthetic construct
  source 1..21: mol_type = other RNA
  modified_base 1: mod_base = OTHER; note = 2'-O-methylcytidine-3'-phosphorothioate
  modified_base 2: mod_base = OTHER; note = 2'-O-methylcytidine-3'-phosphorothioate
  modified_base 3: mod_base = OTHER; note = 2'-O-methyluridine-3'-phosphate
  modified_base 4: mod_base = OTHER; note = 2'-O-methylcytidine-3'-phosphate
  modified_base 5: mod_base = OTHER; note = 2'-O-methylcytidine-3'-phosphate
  modified_base 6: mod_base = OTHER; note = 2'-O-methylguanosine-3'-phosphate
  modified_base 7: mod_base = OTHER; note = 2'-fluorouridine-3'-phosphate
  modified_base 8: mod_base = OTHER; note = 2'-O-methylcytidine-3'-phosphate
  modified_base 9: mod_base = OTHER; note = 2'-fluorouridine-3'-phosphate
  modified_base 10: mod_base = OTHER; note = 2'-fluorocytidine-3'-phosphate
  modified_base 11: mod_base = OTHER; note = 2'-fluorocytidine-3'-phosphate
  modified_base 12: mod_base = OTHER; note = 2'-O-methyluridine-3'-phosphate
  modified_base 13: mod_base = OTHER; note = 2'-O-methylguanosine-3'-phosphate
  modified_base 14: mod_base = OTHER; note = 2'-O-methylguanosine-3'-phosphate
  modified_base 15: mod_base = OTHER; note = 2'-O-methylguanosine-3'-phosphate
  modified_base 16: mod_base = OTHER; note = 2'-O-methyluridine-3'-phosphate
  modified_base 17: mod_base = OTHER; note = 2'-O-methyluridine-3'-phosphate
  modified_base 18: mod_base = OTHER; note = 2'-O-methylcytidine-3'-phosphate
  modified_base 19: mod_base = OTHER; note = 2'-O-methyladenosine-3'-phosphate
  modified_base 20: mod_base = OTHER; note = 2'-O-methyladenosine-3'-phosphate
  modified_base 21: mod_base = OTHER; note = 2'-O-methyluridine-3'-phosphate N-[tris(GalNAc-alkyl)-amidodecanoyl)]-4-hydroxyprolinol (Hyp-(GalNAc-alkyl)3)
cctccgtctcctgggttcaat

SEQ ID NO: 504 - RNA, 21 nt, synthetic construct
  source 1..21: mol_type = other RNA
  modified_base 1: mod_base = OTHER; note = 2'-O-methyluridine-3'-phosphorothioate
  modified_base 2: mod_base = OTHER; note = 2'-O-methyluridine-3'-phosphorothioate
  modified_base 3: mod_base = OTHER; note = 2'-O-methylcytidine-3'-phosphate
  modified_base 4: mod_base = OTHER; note = 2'-O-methyluridine-3'-phosphate
  modified_base 5: mod_base = OTHER; note = 2'-O-methylguanosine-3'-phosphate
  modified_base 6: mod_base = OTHER; note = 2'-O-methylcytidine-3'-phosphate
  modified_base 7: mod_base = OTHER; note = 2'-fluorocytidine-3'-phosphate
  modified_base 8: mod_base = OTHER; note = 2'-O-methyluridine-3'-phosphate
  modified_base 9: mod_base = OTHER; note = 2'-fluorocytidine-3'-phosphate
  modified_base 10: mod_base = OTHER; note = 2'-fluoroadenosine-3'-phosphate
  modified_base 11: mod_base = OTHER; note = 2'-fluoroguanosine-3'-phosphate
  modified_base 12: mod_base = OTHER; note = 2'-O-methylcytidine-3'-phosphate
  modified_base 13: mod_base = OTHER; note = 2'-O-methylcytidine-3'-phosphate
  modified_base 14: mod_base = OTHER; note = 2'-O-methyluridine-3'-phosphate
  modified_base 15: mod_base = OTHER; note = 2'-O-methylcytidine-3'-phosphate
  modified_base 16: mod_base = OTHER; note = 2'-O-methylcytidine-3'-phosphate
  modified_base 17: mod_base = OTHER; note = 2'-O-methylcytidine-3'-phosphate
  modified_base 18: mod_base = OTHER; note = 2'-O-methylguanosine-3'-phosphate
  modified_base 19: mod_base = OTHER; note = 2'-O-methyladenosine-3'-phosphate
  modified_base 20: mod_base = OTHER; note = 2'-O-methylguanosine-3'-phosphate
  modified_base 21: mod_base = OTHER; note = 2'-O-methyluridine-3'-phosphate N-[tris(GalNAc-alkyl)-amidodecanoyl)]-4-hydroxyprolinol (Hyp-(GalNAc-alkyl)3)
ttctgcctcagcctcccgagt

SEQ ID NO: 505 - RNA, 21 nt, synthetic construct
  source 1..21: mol_type = other RNA
  modified_base 1: mod_base = OTHER; note = 2'-O-methyluridine-3'-phosphorothioate
  modified_base 2: mod_base = OTHER; note = 2'-O-methylguanosine-3'-phosphorothioate
  modified_base 3: mod_base = OTHER; note = 2'-O-methylguanosine-3'-phosphate
  modified_base 4: mod_base = OTHER; note = 2'-O-methylguanosine-3'-phosphate
  modified_base 5: mod_base = OTHER; note = 2'-O-methyluridine-3'-phosphate
  modified_base 6: mod_base = OTHER; note = 2'-O-methyluridine-3'-phosphate
  modified_base 7: mod_base = OTHER; note = 2'-fluorocytidine-3'-phosphate
  modified_base 8: mod_base = OTHER; note = 2'-O-methyladenosine-3'-phosphate
  modified_base 9: mod_base = OTHER; note = 2'-fluoroadenosine-3'-phosphate
  modified_base 10: mod_base = OTHER; note = 2'-fluoroguanosine-3'-phosphate
  modified_base 11: mod_base = OTHER; note = 2'-fluorouridine-3'-phosphate
  modified_base 12: mod_base = OTHER; note = 2'-O-methylguanosine-3'-phosphate
  modified_base 13: mod_base = OTHER; note = 2'-O-methyladenosine-3'-phosphate
  modified_base 14: mod_base = OTHER; note = 2'-O-methyluridine-3'-phosphate
  modified_base 15: mod_base = OTHER; note = 2'-O-methyluridine-3'-phosphate
  modified_base 16: mod_base = OTHER; note = 2'-O-methylcytidine-3'-phosphate
  modified_base 17: mod_base = OTHER; note = 2'-O-methyluridine-3'-phosphate
  modified_base 18: mod_base = OTHER; note = 2'-O-methyluridine-3'-phosphate
  modified_base 19: mod_base = OTHER; note = 2'-O-methylcytidine-3'-phosphate
  modified_base 20: mod_base = OTHER; note = 2'-O-methyluridine-3'-phosphate
  modified_base 21: mod_base = OTHER; note = 2'-O-methyluridine-3'-phosphate N-[tris(GalNAc-alkyl)-amidodecanoyl)]-4-hydroxyprolinol (Hyp-(GalNAc-alkyl)3)
tgggttcaagtgattcttctt

SEQ ID NO: 506 - RNA, 21 nt, synthetic construct
  source 1..21: mol_type = other RNA
  modified_base 1: mod_base = OTHER; note = 2'-O-methylguanosine-3'-phosphorothioate
  modified_base 2: mod_base = OTHER; note = 2'-O-methyladenosine-3'-phosphorothioate
  modified_base 3: mod_base = OTHER; note = 2'-O-methylguanosine-3'-phosphate
  modified_base 4: mod_base = OTHER; note = 2'-O-methylcytidine-3'-phosphate
  modified_base 5: mod_base = OTHER; note = 2'-O-methyladenosine-3'-phosphate
  modified_base 6: mod_base = OTHER; note = 2'-O-methylguanosine-3'-phosphate
  modified_base 7: mod_base = OTHER; note = 2'-fluorocytidine-3'-phosphate
  modified_base 8: mod_base = OTHER; note = 2'-O-methyluridine-3'-phosphate
  modified_base 9: mod_base = OTHER; note = 2'-fluoroguanosine-3'-phosphate
  modified_base 10: mod_base = OTHER; note = 2'-fluoroguanosine-3'-phosphate
  modified_base 11: mod_base = OTHER; note = 2'-fluoroguanosine-3'-phosphate
  modified_base 12: mod_base = OTHER; note = 2'-O-methyladenosine-3'-phosphate
  modified_base 13: mod_base = OTHER; note = 2'-O-methyluridine-3'-phosphate
  modified_base 14: mod_base = OTHER; note = 2'-O-methyluridine-3'-phosphate
  modified_base 15: mod_base = OTHER; note = 2'-O-methyladenosine-3'-phosphate
  modified_base 16: mod_base = OTHER; note = 2'-O-methylcytidine-3'-phosphate
  modified_base 17: mod_base = OTHER; note = 2'-O-methyladenosine-3'-phosphate
  modified_base 18: mod_base = OTHER; note = 2'-O-methylguanosine-3'-phosphate
  modified_base 19: mod_base = OTHER; note = 2'-O-methylguanosine-3'-phosphate
  modified_base 20: mod_base = OTHER; note = 2'-O-methylcytidine-3'-phosphate
  modified_base 21: mod_base = OTHER; note = 2'-O-methyluridine-3'-phosphate N-[tris(GalNAc-alkyl)-amidodecanoyl)]-4-hydroxyprolinol (Hyp-(GalNAc-alkyl)3)
gagcagctgggattacaggct

SEQ ID NO: 507 - RNA, 21 nt, synthetic construct
  source 1..21: mol_type = other RNA
  modified_base 1: mod_base = OTHER; note = 2'-O-methylcytidine-3'-phosphorothioate
  modified_base 2: mod_base = OTHER; note = 2'-O-methylguanosine-3'-phosphorothioate
  modified_base 3: mod_base = OTHER; note = 2'-O-methylcytidine-3'-phosphate
  modified_base 4: mod_base = OTHER; note = 2'-O-methylcytidine-3'-phosphate
  modified_base 5: mod_base = OTHER; note = 2'-O-methylcytidine-3'-phosphate
  modified_base 6: mod_base = OTHER; note = 2'-O-methyladenosine-3'-phosphate
  modified_base 7: mod_base = OTHER; note = 2'-fluorocytidine-3'-phosphate
  modified_base 8: mod_base = OTHER; note = 2'-O-methyluridine-3'-phosphate
  modified_base 9: mod_base = OTHER; note = 2'-fluoroadenosine-3'-phosphate
  modified_base 10: mod_base = OTHER; note = 2'-fluoroadenosine-3'-phosphate
  modified_base 11: mod_base = OTHER; note = 2'-fluorouridine-3'-phosphate
  modified_base 12: mod_base = OTHER; note = 2'-O-methyluridine-3'-phosphate
  modified_base 13: mod_base = OTHER; note = 2'-O-methyluridine-3'-phosphate
  modified_base 14: mod_base = OTHER; note = 2'-O-methyluridine-3'-phosphate
  modified_base 15: mod_base = OTHER; note = 2'-O-methyluridine-3'-phosphate
  modified_base 16: mod_base = OTHER; note = 2'-O-methylguanosine-3'-phosphate
  modified_base 17: mod_base = OTHER; note = 2'-O-methyluridine-3'-phosphate
  modified_base 18: mod_base = OTHER; note = 2'-O-methyladenosine-3'-phosphate
  modified_base 19: mod_base = OTHER; note = 2'-O-methyluridine-3'-phosphate
  modified_base 20: mod_base = OTHER; note = 2'-O-methyluridine-3'-phosphate
  modified_base 21: mod_base = OTHER; note = 2'-O-methyluridine-3'-phosphate N-[tris(GalNAc-alkyl)-amidodecanoyl)]-4-hydroxyprolinol (Hyp-(GalNAc-alkyl)3)
cgcccactaatttttgtattt

SEQ ID NO: 508 - RNA, 21 nt, synthetic construct
  source 1..21: mol_type = other RNA
  modified_base 1: mod_base = OTHER; note = 2'-O-methyluridine-3'-phosphorothioate
  modified_base 2: mod_base = OTHER; note = 2'-O-methylguanosine-3'-phosphorothioate
  modified_base 3: mod_base = OTHER; note = 2'-O-methyluridine-3'-phosphate
  modified_base 4: mod_base = OTHER; note = 2'-O-methyladenosine-3'-phosphate
  modified_base 5: mod_base = OTHER; note = 2'-O-methyluridine-3'-phosphate
  modified_base 6: mod_base = OTHER; note = 2'-O-methyluridine-3'-phosphate
  modified_base 7: mod_base = OTHER; note = 2'-fluorocytidine-3'-phosphate
  modified_base 8: mod_base = OTHER; note = 2'-O-methyluridine-3'-phosphate
  modified_base 9: mod_base = OTHER; note = 2'-fluorouridine-3'-phosphate
  modified_base 10: mod_base = OTHER; note = 2'-fluoroadenosine-3'-phosphate
  modified_base 11: mod_base = OTHER; note = 2'-fluoroguanosine-3'-phosphate
  modified_base 12: mod_base = OTHER; note = 2'-O-methyluridine-3'-phosphate
  modified_base 13: mod_base = OTHER; note = 2'-O-methyladenosine-3'-phosphate
  modified_base 14: mod_base = OTHER; note = 2'-O-methylguanosine-3'-phosphate
  modified_base 15: mod_base = OTHER; note = 2'-O-methyladenosine-3'-phosphate
  modified_base 16: mod_base = OTHER; note = 2'-O-methyladenosine-3'-phosphate
  modified_base 17: mod_base = OTHER; note = 2'-O-methyladenosine-3'-phosphate
  modified_base 18: mod_base = OTHER; note = 2'-O-methylcytidine-3'-phosphate
  modified_base 19: mod_base = OTHER; note = 2'-O-methylguanosine-3'-phosphate
  modified_base 20: mod_base = OTHER; note = 2'-O-methyladenosine-3'-phosphate
  modified_base 21: mod_base = OTHER; note = 2'-O-methyluridine-3'-phosphate N-[tris(GalNAc-alkyl)-amidodecanoyl)]-4-hydroxyprolinol (Hyp-(GalNAc-alkyl)3)
tgtattcttagtagaaacgat

SEQ ID NO: 509 - RNA, 21 nt, synthetic construct
  source 1..21: mol_type = other RNA
  modified_base 1: mod_base = OTHER; note = 2'-O-methyluridine-3'-phosphorothioate
  modified_base 2: mod_base = OTHER; note = 2'-O-methyladenosine-3'-phosphorothioate
  modified_base 3: mod_base = OTHER; note = 2'-O-methylguanosine-3'-phosphate
  modified_base 4: mod_base = OTHER; note = 2'-O-methyladenosine-3'-phosphate
  modified_base 5: mod_base = OTHER; note = 2'-O-methyladenosine-3'-phosphate
  modified_base 6: mod_base = OTHER; note = 2'-O-methyladenosine-3'-phosphate
  modified_base 7: mod_base = OTHER; note = 2'-fluorocytidine-3'-phosphate
  modified_base 8: mod_base = OTHER; note = 2'-O-methylguanosine-3'-phosphate
  modified_base 9: mod_base = OTHER; note = 2'-fluoroadenosine-3'-phosphate
  modified_base 10: mod_base = OTHER; note = 2'-fluoroguanosine-3'-phosphate
  modified_base 11: mod_base = OTHER; note = 2'-fluoroguanosine-3'-phosphate
  modified_base 12: mod_base = OTHER; note = 2'-O-methyluridine-3'-phosphate
  modified_base 13: mod_base = OTHER; note = 2'-O-methyluridine-3'-phosphate
  modified_base 14: mod_base = OTHER; note = 2'-O-methyluridine-3'-phosphate
  modified_base 15: mod_base = OTHER; note = 2'-O-methylcytidine-3'-phosphate
  modified_base 16: mod_base = OTHER; note = 2'-O-methyladenosine-3'-phosphate
  modified_base 17: mod_base = OTHER; note = 2'-O-methyladenosine-3'-phosphate
  modified_base 18: mod_base = OTHER; note = 2'-O-methylcytidine-3'-phosphate
  modified_base 19: mod_base = OTHER; note = 2'-O-methyladenosine-3'-phosphate
  modified_base 20: mod_base = OTHER; note = 2'-O-methyluridine-3'-phosphate
  modified_base 21: mod_base = OTHER; note = 2'-O-methyluridine-3'-phosphate N-[tris(GalNAc-alkyl)-amidodecanoyl)]-4-hydroxyprolinol (Hyp-(GalNAc-alkyl)3)
tagaaacgaggtttcaacatt

SEQ ID NO: 510 - RNA, 21 nt, synthetic construct
  source 1..21: mol_type = other RNA
  modified_base 1: mod_base = OTHER; note = 2'-O-methyluridine-3'-phosphorothioate
  modified_base 2: mod_base = OTHER; note = 2'-O-methyluridine-3'-phosphorothioate
  modified_base 3: mod_base = OTHER; note = 2'-O-methylcytidine-3'-phosphate
  modified_base 4: mod_base = OTHER; note = 2'-O-methyladenosine-3'-phosphate
  modified_base 5: mod_base = OTHER; note = 2'-O-methyladenosine-3'-phosphate
  modified_base 6: mod_base = OTHER; note = 2'-O-methylcytidine-3'-phosphate
  modified_base 7: mod_base = OTHER; note = 2'-fluoroadenosine-3'-phosphate
  modified_base 8: mod_base = OTHER; note = 2'-O-methyluridine-3'-phosphate
  modified_base 9: mod_base = OTHER; note = 2'-fluoroguanosine-3'-phosphate
  modified_base 10: mod_base = OTHER; note = 2'-fluorouridine-3'-phosphate
  modified_base 11: mod_base = OTHER; note = 2'-fluorouridine-3'-phosphate
  modified_base 12: mod_base = OTHER; note = 2'-O-methylguanosine-3'-phosphate
  modified_base 13: mod_base = OTHER; note = 2'-O-methylguanosine-3'-phosphate
  modified_base 14: mod_base = OTHER; note = 2'-O-methylcytidine-3'-phosphate
  modified_base 15: mod_base = OTHER; note = 2'-O-methylcytidine-3'-phosphate
  modified_base 16: mod_base = OTHER; note = 2'-O-methyladenosine-3'-phosphate
  modified_base 17: mod_base = OTHER; note = 2'-O-methylguanosine-3'-phosphate
  modified_base 18: mod_base = OTHER; note = 2'-O-methylguanosine-3'-phosphate
  modified_base 19: mod_base = OTHER; note = 2'-O-methyladenosine-3'-phosphate
  modified_base 20: mod_base = OTHER; note = 2'-O-methyluridine-3'-phosphate
  modified_base 21: mod_base = OTHER; note = 2'-O-methyluridine-3'-phosphate N-[tris(GalNAc-alkyl)-amidodecanoyl)]-4-hydroxyprolinol (Hyp-(GalNAc-alkyl)3)
ttcaacatgttggccaggatt

SEQ ID NO: 511 - RNA, 21 nt, synthetic construct
  source 1..21: mol_type = other RNA
  modified_base 1: mod_base = OTHER; note = 2'-O-methylcytidine-3'-phosphorothioate
  modified_base 2: mod_base = OTHER; note = 2'-O-methylcytidine-3'-phosphorothioate
  modified_base 3: mod_base = OTHER; note = 2'-O-methyladenosine-3'-phosphate
  modified_base 4: mod_base = OTHER; note = 2'-O-methylguanosine-3'-phosphate
  modified_base 5: mod_base = OTHER; note = 2'-O-methylguanosine-3'-phosphate
  modified_base 6: mod_base = OTHER; note = 2'-O-methyladenosine-3'-phosphate
  modified_base 7: mod_base = OTHER; note = 2'-fluorouridine-3'-phosphate
  modified_base 8: mod_base = OTHER; note = 2'-O-methylguanosine-3'-phosphate
  modified_base 9: mod_base = OTHER; note = 2'-fluoroguanosine-3'-phosphate
  modified_base 10: mod_base = OTHER; note = 2'-fluorouridine-3'-phosphate
  modified_base 11: mod_base = OTHER; note = 2'-fluorocytidine-3'-phosphate
  modified_base 12: mod_base = OTHER; note = 2'-O-methyluridine-3'-phosphate
  modified_base 13: mod_base = OTHER; note = 2'-O-methylcytidine-3'-phosphate
  modified_base 14: mod_base = OTHER; note = 2'-O-methyladenosine-3'-phosphate
  modified_base 15: mod_base = OTHER; note = 2'-O-methyladenosine-3'-phosphate
  modified_base 16: mod_base = OTHER; note = 2'-O-methyluridine-3'-phosphate
  modified_base 17: mod_base = OTHER; note = 2'-O-methylcytidine-3'-phosphate
  modified_base 18: mod_base = OTHER; note = 2'-O-methyluridine-3'-phosphate
  modified_base 19: mod_base = OTHER; note = 2'-O-methylcytidine-3'-phosphate
  modified_base 20: mod_base = OTHER; note = 2'-O-methyluridine-3'-phosphate
  modified_base 21: mod_base = OTHER; note = 2'-O-methyluridine-3'-phosphate N-[tris(GalNAc-alkyl)-amidodecanoyl)]-4-hydroxyprolinol (Hyp-(GalNAc-alkyl)3)
ccaggatggtctcaatctctt

SEQ ID NO: 512 - RNA, 21 nt, synthetic construct
  source 1..21: mol_type = other RNA
  modified_base 1: mod_base = OTHER; note = 2'-O-methyluridine-3'-phosphorothioate
  modified_base 2: mod_base = OTHER; note = 2'-O-methylcytidine-3'-phosphorothioate
  modified_base 3: mod_base = OTHER; note = 2'-O-methyladenosine-3'-phosphate
  modified_base 4: mod_base = OTHER; note = 2'-O-methyladenosine-3'-phosphate
  modified_base 5: mod_base = OTHER; note = 2'-O-methyluridine-3'-phosphate
  modified_base 6: mod_base = OTHER; note = 2'-O-methylcytidine-3'-phosphate
  modified_base 7: mod_base = OTHER; note = 2'-fluorouridine-3'-phosphate
  modified_base 8: mod_base = OTHER; note = 2'-O-methylcytidine-3'-phosphate
  modified_base 9: mod_base = OTHER; note = 2'-fluorouridine-3'-phosphate
  modified_base 10: mod_base = OTHER; note = 2'-fluorouridine-3'-phosphate
  modified_base 11: mod_base = OTHER; note = 2'-fluoroguanosine-3'-phosphate
  modified_base 12: mod_base = OTHER; note = 2'-O-methyladenosine-3'-phosphate
  modified_base 13: mod_base = OTHER; note = 2'-O-methylcytidine-3'-phosphate
  modified_base 14: mod_base = OTHER; note = 2'-O-methylcytidine-3'-phosphate
  modified_base 15: mod_base = OTHER; note = 2'-O-methyluridine-3'-phosphate
  modified_base 16: mod_base = OTHER; note = 2'-O-methylcytidine-3'-phosphate
  modified_base 17: mod_base = OTHER; note = 2'-O-methyluridine-3'-phosphate
  modified_base 18: mod_base = OTHER; note = 2'-O-methyluridine-3'-phosphate
  modified_base 19: mod_base = OTHER; note = 2'-O-methylguanosine-3'-phosphate
  modified_base 20: mod_base = OTHER; note = 2'-O-methyladenosine-3'-phosphate
  modified_base 21: mod_base = OTHER; note = 2'-O-methyluridine-3'-phosphate N-[tris(GalNAc-alkyl)-amidodecanoyl)]-4-hydroxyprolinol (Hyp-(GalNAc-alkyl)3)
tcaatctcttgacctcttgat

SEQ ID NO: 513 - RNA, 21 nt, synthetic construct
  source 1..21: mol_type = other RNA
  modified_base 1: mod_base = OTHER; note = 2'-O-methyladenosine-3'-phosphorothioate
  modified_base 2: mod_base = OTHER; note = 2'-O-methylcytidine-3'-phosphorothioate
  modified_base 3: mod_base = OTHER; note = 2'-O-methylcytidine-3'-phosphate
  modified_base 4: mod_base = OTHER; note = 2'-O-methyluridine-3'-phosphate
  modified_base 5: mod_base = OTHER; note = 2'-O-methylcytidine-3'-phosphate
  modified_base 6: mod_base = OTHER; note = 2'-O-methyluridine-3'-phosphate
  modified_base 7: mod_base = OTHER; note = 2'-fluorouridine-3'-phosphate
  modified_base 8: mod_base = OTHER; note = 2'-O-methylguanosine-3'-phosphate
  modified_base 9: mod_base = OTHER; note = 2'-fluoroadenosine-3'-phosphate
  modified_base 10: mod_base = OTHER; note = 2'-fluorouridine-3'-phosphate
  modified_base 11: mod_base = OTHER; note = 2'-fluorocytidine-3'-phosphate
  modified_base 12: mod_base = OTHER; note = 2'-O-methylcytidine-3'-phosphate
  modified_base 13: mod_base = OTHER; note = 2'-O-methyladenosine-3'-phosphate
  modified_base 14: mod_base = OTHER; note = 2'-O-methylcytidine-3'-phosphate
  modified_base 15: mod_base = OTHER; note = 2'-O-methylcytidine-3'-phosphate
  modified_base 16: mod_base = OTHER; note = 2'-O-methylcytidine-3'-phosphate
  modified_base 17: mod_base = OTHER; note = 2'-O-methylguanosine-3'-phosphate
  modified_base 18: mod_base = OTHER; note = 2'-O-methyladenosine-3'-phosphate
  modified_base 19: mod_base = OTHER; note = 2'-O-methylcytidine-3'-phosphate
  modified_base 20: mod_base = OTHER; note = 2'-O-methyluridine-3'-phosphate
  modified_base 21: mod_base = OTHER; note = 2'-O-methyluridine-3'-phosphate N-[tris(GalNAc-alkyl)-amidodecanoyl)]-4-hydroxyprolinol (Hyp-(GalNAc-alkyl)3)
acctcttgatccacccgactt

SEQ ID NO: 514 - RNA, 21 nt, synthetic construct
  source 1..21: mol_type = other RNA
  modified_base 1: mod_base = OTHER; note = 2'-O-methylcytidine-3'-phosphorothioate
  modified_base 2: mod_base = OTHER; note = 2'-O-methylcytidine-3'-phosphorothioate
  modified_base 3: mod_base = OTHER; note = 2'-O-methylguanosine-3'-phosphate
  modified_base 4: mod_base = OTHER; note = 2'-O-methyladenosine-3'-phosphate
  modified_base 5: mod_base = OTHER; note = 2'-O-methylcytidine-3'-phosphate
  modified_base 6: mod_base = OTHER; note = 2'-O-methyluridine-3'-phosphate
  modified_base 7: mod_base = OTHER; note = 2'-fluorouridine-3'-phosphate
  modified_base 8: mod_base = OTHER; note = 2'-O-methylguanosine-3'-phosphate
  modified_base 9: mod_base = OTHER; note = 2'-fluoroguanosine-3'-phosphate
  modified_base 10: mod_base = OTHER; note = 2'-fluorocytidine-3'-phosphate
  modified_base 11: mod_base = OTHER; note = 2'-fluorocytidine-3'-phosphate
  modified_base 12: mod_base = OTHER; note = 2'-O-methyluridine-3'-phosphate
  modified_base 13: mod_base = OTHER; note = 2'-O-methylcytidine-3'-phosphate
  modified_base 14: mod_base = OTHER; note = 2'-O-methylcytidine-3'-phosphate
  modified_base 15: mod_base = OTHER; note = 2'-O-methylcytidine-3'-phosphate
  modified_base 16: mod_base = OTHER; note = 2'-O-methylguanosine-3'-phosphate
  modified_base 17: mod_base = OTHER; note = 2'-O-methyladenosine-3'-phosphate
  modified_base 18: mod_base = OTHER; note = 2'-O-methyladenosine-3'-phosphate
  modified_base 19: mod_base = OTHER; note = 2'-O-methylguanosine-3'-phosphate
  modified_base 20: mod_base = OTHER; note = 2'-O-methyluridine-3'-phosphate
  modified_base 21: mod_base = OTHER; note = 2'-O-methyluridine-3'-phosphate N-[tris(GalNAc-alkyl)-amidodecanoyl)]-4-hydroxyprolinol (Hyp-(GalNAc-alkyl)3)
ccgacttggcctcccgaagtt

SEQ ID NO: 515 - RNA, 21 nt, synthetic construct
  source 1..21: mol_type = other RNA
  modified_base 1: mod_base = OTHER; note = 2'-O-methylguanosine-3'-phosphorothioate
  modified_base 2: mod_base = OTHER; note = 2'-O-methyladenosine-3'-phosphorothioate
  modified_base 3: mod_base = OTHER; note = 2'-O-methyladenosine-3'-phosphate
  modified_base 4: mod_base = OTHER; note = 2'-O-methylguanosine-3'-phosphate
  modified_base 5: mod_base = OTHER; note = 2'-O-methyluridine-3'-phosphate
  modified_base 6: mod_base = OTHER; note = 2'-O-methylguanosine-3'-phosphate
  modified_base 7: mod_base = OTHER; note = 2'-fluoroadenosine-3'-phosphate
  modified_base 8: mod_base = OTHER; note = 2'-O-methyluridine-3'-phosphate
  modified_base 9: mod_base = OTHER; note = 2'-fluoroguanosine-3'-phosphate
  modified_base 10: mod_base = OTHER; note = 2'-fluoroadenosine-3'-phosphate
  modified_base 11: mod_base = OTHER; note = 2'-fluoroguanosine-3'-phosphate
  modified_base 12: mod_base = OTHER; note = 2'-O-methyladenosine-3'-phosphate
  modified_base 13: mod_base = OTHER; note = 2'-O-methyluridine-3'-phosphate
  modified_base 14: mod_base = OTHER; note = 2'-O-methyluridine-3'-phosphate
  modified_base 15: mod_base = OTHER; note = 2'-O-methyladenosine-3'-phosphate
  modified_base 16: mod_base = OTHER; note = 2'-O-methyluridine-3'-phosphate
  modified_base 17: mod_base = OTHER; note = 2'-O-methyladenosine-3'-phosphate
  modified_base 18: mod_base = OTHER; note = 2'-O-methylguanosine-3'-phosphate
  modified_base 19: mod_base = OTHER; note = 2'-O-methylguanosine-3'-phosphate
  modified_base 20: mod_base = OTHER; note = 2'-O-methylcytidine-3'-phosphate
  modified_base 21: mod_base = OTHER; note = 2'-O-methyluridine-3'-phosphate N-[tris(GalNAc-alkyl)-amidodecanoyl)]-4-hydroxyprolinol (Hyp-(GalNAc-alkyl)3)
gaagtgatgagattataggct

SEQ ID NO: 516 - RNA, 21 nt, synthetic construct
  source 1..21: mol_type = other RNA
  modified_base 1: mod_base = OTHER; note = 2'-O-methylcytidine-3'-phosphorothioate
  modified_base 2: mod_base = OTHER; note = 2'-O-methylcytidine-3'-phosphorothioate
  modified_base 3: mod_base = OTHER; note = 2'-O-methyluridine-3'-phosphate
  modified_base 4: mod_base = OTHER; note = 2'-O-methylguanosine-3'-phosphate
  modified_base 5: mod_base = OTHER; note = 2'-O-methylguanosine-3'-phosphate
  modified_base 6: mod_base = OTHER; note = 2'-O-methylcytidine-3'-phosphate
  modified_base 7: mod_base = OTHER; note = 2'-fluorouridine-3'-phosphate
  modified_base 8: mod_base = OTHER; note = 2'-O-methyluridine-3'-phosphate
  modified_base 9: mod_base = OTHER; note = 2'-fluoroadenosine-3'-phosphate
  modified_base 10: mod_base = OTHER; note = 2'-fluorouridine-3'-phosphate
  modified_base 11: mod_base = OTHER; note = 2'-fluoroadenosine-3'-phosphate
  modified_base 12: mod_base = OTHER; note = 2'-O-methylcytidine-3'-phosphate
  modified_base 13: mod_base = OTHER; note = 2'-O-methyluridine-3'-phosphate
  modified_base 14: mod_base = OTHER; note = 2'-O-methyluridine-3'-phosphate
  modified_base 15: mod_base = OTHER; note = 2'-O-methyluridine-3'-phosphate
  modified_base 16: mod_base = OTHER; note = 2'-O-methylcytidine-3'-phosphate
  modified_base 17: mod_base = OTHER; note = 2'-O-methyluridine-3'-phosphate
  modified_base 18: mod_base = OTHER; note = 2'-O-methyluridine-3'-phosphate
  modified_base 19: mod_base = OTHER; note = 2'-O-methyladenosine-3'-phosphate
  modified_base 20: mod_base = OTHER; note = 2'-O-methyladenosine-3'-phosphate
  modified_base 21: mod_base = OTHER; note = 2'-O-methyluridine-3'-phosphate N-[tris(GalNAc-alkyl)-amidodecanoyl)]-4-hydroxyprolinol (Hyp-(GalNAc-alkyl)3)
cctggcttatactttcttaat

SEQ ID NO: 517 - RNA, 21 nt, synthetic construct
  source 1..21: mol_type = other RNA
  modified_base 1: mod_base = OTHER; note = 2'-O-methylguanosine-3'-phosphorothioate
  modified_base 2: mod_base = OTHER; note = 2'-O-methyladenosine-3'-phosphorothioate
  modified_base 3: mod_base = OTHER; note = 2'-O-methylguanosine-3'-phosphate
  modified_base 4: mod_base = OTHER; note = 2'-O-methyladenosine-3'-phosphate
  modified_base 5: mod_base = OTHER; note = 2'-O-methyladenosine-3'-phosphate
  modified_base 6: mod_base = OTHER; note = 2'-O-methyladenosine-3'-phosphate
  modified_base 7: mod_base = OTHER; note = 2'-fluoroguanosine-3'-phosphate
  modified_base 8: mod_base = OTHER; note = 2'-O-methyladenosine-3'-phosphate
  modified_base 9: mod_base = OTHER; note = 2'-fluoroadenosine-3'-phosphate
  modified_base 10: mod_base = OTHER; note = 2'-fluoroadenosine-3'-phosphate
  modified_base 11: mod_base = OTHER; note = 2'-fluoroadenosine-3'-phosphate
  modified_base 12: mod_base = OTHER; note = 2'-O-methyluridine-3'-phosphate
  modified_base 13: mod_base = OTHER; note = 2'-O-methylcytidine-3'-phosphate
  modified_base 14: mod_base = OTHER; note = 2'-O-methyladenosine-3'-phosphate
  modified_base 15: mod_base = OTHER; note = 2'-O-methyladenosine-3'-phosphate
  modified_base 16: mod_base = OTHER; note = 2'-O-methylcytidine-3'-phosphate
  modified_base 17: mod_base = OTHER; note = 2'-O-methyladenosine-3'-phosphate
  modified_base 18: mod_base = OTHER; note = 2'-O-methyladenosine-3'-phosphate
  modified_base 19: mod_base = OTHER; note = 2'-O-methyladenosine-3'-phosphate
  modified_base 20: mod_base = OTHER; note = 2'-O-methyluridine-3'-phosphate
  modified_base 21: mod_base = OTHER; note = 2'-O-methyluridine-3'-phosphate N-[tris(GalNAc-alkyl)-amidodecanoyl)]-4-hydroxyprolinol (Hyp-(GalNAc-alkyl)3)
gagaaagaaaatcaacaaatt

SEQ ID NO: 518 - RNA, 21 nt, synthetic construct
  source 1..21: mol_type = other RNA
  modified_base 1: mod_base = OTHER; note = 2'-O-methyluridine-3'-phosphorothioate
  modified_base 2: mod_base = OTHER; note = 2'-O-methylguanosine-3'-phosphorothioate
  modified_base 3: mod_base = OTHER; note = 2'-O-methyladenosine-3'-phosphate
  modified_base 4: mod_base = OTHER; note = 2'-O-methylguanosine-3'-phosphate
  modified_base 5: mod_base = OTHER; note = 2'-O-methyluridine-3'-phosphate
  modified_base 6: mod_base = OTHER; note = 2'-O-methylcytidine-3'-phosphate
  modified_base 7: mod_base = OTHER; note = 2'-fluoroadenosine-3'-phosphate
  modified_base 8: mod_base = OTHER; note = 2'-O-methyluridine-3'-phosphate
  modified_base 9: mod_base = OTHER; note = 2'-fluoroadenosine-3'-phosphate
  modified_base 10: mod_base = OTHER; note = 2'-fluoroadenosine-3'-phosphate
  modified_base 11: mod_base = OTHER; note = 2'-fluoroadenosine-3'-phosphate
  modified_base 12: mod_base = OTHER; note = 2'-O-methylguanosine-3'-phosphate
  modified_base 13: mod_base = OTHER; note = 2'-O-methyladenosine-3'-phosphate
  modified_base 14: mod_base = OTHER; note = 2'-O-methyladenosine-3'-phosphate
  modified_base 15: mod_base = OTHER; note = 2'-O-methylguanosine-3'-phosphate
  modified_base 16: mod_base = OTHER; note = 2'-O-methylguanosine-3'-phosphate
  modified_base 17: mod_base = OTHER; note = 2'-O-methylguanosine-3'-phosphate
  modified_base 18: mod_base = OTHER; note = 2'-O-methyluridine-3'-phosphate
  modified_base 19: mod_base = OTHER; note = 2'-O-methyluridine-3'-phosphate
  modified_base 20: mod_base = OTHER; note = 2'-O-methyladenosine-3'-phosphate
  modified_base 21: mod_base = OTHER; note = 2'-O-methyluridine-3'-phosphate N-[tris(GalNAc-alkyl)-amidodecanoyl)]-4-hydroxyprolinol (Hyp-(GalNAc-alkyl)3)
tgagtcataaagaagggttat

SEQ ID NO: 519 - RNA, 21 nt, synthetic construct
  source 1..21: mol_type = other RNA
  modified_base 1: mod_base = OTHER; note = 2'-O-methyladenosine-3'-phosphorothioate
  modified_base 2: mod_base = OTHER; note = 2'-O-methylguanosine-3'-phosphorothioate
  modified_base 3: mod_base = OTHER; note = 2'-O-methylguanosine-3'-phosphate
  modified_base 4: mod_base = OTHER; note = 2'-O-methylguanosine-3'-phosphate
  modified_base 5: mod_base = OTHER; note = 2'-O-methyluridine-3'-phosphate
  modified_base 6: mod_base = OTHER; note = 2'-O-methyluridine-3'-phosphate
  modified_base 7: mod_base = OTHER; note = 2'-fluoroadenosine-3'-phosphate
  modified_base 8: mod_base = OTHER; note = 2'-O-methylguanosine-3'-phosphate
  modified_base 9: mod_base = OTHER; note = 2'-fluoroguanosine-3'-phosphate
  modified_base 10: mod_base = OTHER; note = 2'-fluoroguanosine-3'-phosphate
  modified_base 11: mod_base = OTHER; note = 2'-fluorouridine-3'-phosphate
  modified_base 12: mod_base = OTHER; note = 2'-O-methylguanosine-3'-phosphate
  modified_base 13: mod_base = OTHER; note = 2'-O-methyladenosine-3'-phosphate
  modified_base 14: mod_base = OTHER; note = 2'-O-methyluridine-3'-phosphate
  modified_base 15: mod_base = OTHER; note = 2'-O-methylguanosine-3'-phosphate
  modified_base 16: mod_base = OTHER; note = 2'-O-methylguanosine-3'-phosphate
  modified_base 17: mod_base = OTHER; note = 2'-O-methyluridine-3'-phosphate
  modified_base 18: mod_base = OTHER; note = 2'-O-methylcytidine-3'-phosphate
  modified_base 19: mod_base = OTHER; note = 2'-O-methylcytidine-3'-phosphate
  modified_base 20: mod_base = OTHER; note = 2'-O-methyladenosine-3'-phosphate
  modified_base 21: mod_base = OTHER; note = 2'-O-methyluridine-3'-phosphate N-[tris(GalNAc-alkyl)-amidodecanoyl)]-4-hydroxyprolinol (Hyp-(GalNAc-alkyl)3)
agggttagggtgatggtccat

SEQ ID NO: 520 - RNA, 21 nt, synthetic construct
  source 1..21: mol_type = other RNA
  modified_base 1: mod_base = OTHER; note = 2'-O-methylcytidine-3'-phosphorothioate
  modified_base 2: mod_base = OTHER; note = 2'-O-methylcytidine-3'-phosphorothioate
  modified_base 3: mod_base = OTHER; note = 2'-O-methyladenosine-3'-phosphate
  modified_base 4: mod_base = OTHER; note = 2'-O-methylguanosine-3'-phosphate
  modified_base 5: mod_base = OTHER; note = 2'-O-methyladenosine-3'-phosphate
  modified_base 6: mod_base = OTHER; note = 2'-O-methylguanosine-3'-phosphate
  modified_base 7: mod_base = OTHER; note = 2'-fluorocytidine-3'-phosphate
  modified_base 8: mod_base = OTHER; note = 2'-O-methyladenosine-3'-phosphate
  modified_base 9: mod_base = OTHER; note = 2'-fluoroadenosine-3'-phosphate
  modified_base 10: mod_base = OTHER; note = 2'-fluorocytidine-3'-phosphate
  modified_base 11: mod_base = OTHER; note = 2'-fluoroadenosine-3'-phosphate
  modified_base 12: mod_base = OTHER; note = 2'-O-methylguanosine-3'-phosphate
  modified_base 13: mod_base = OTHER; note = 2'-O-methyluridine-3'-phosphate
  modified_base 14: mod_base = OTHER; note = 2'-O-methyluridine-3'-phosphate
  modified_base 15: mod_base = OTHER; note = 2'-O-methylcytidine-3'-phosphate
  modified_base 16: mod_base = OTHER; note = 2'-O-methyluridine-3'-phosphate
  modified_base 17: mod_base = OTHER; note = 2'-O-methyluridine-3'-phosphate
  modified_base 18: mod_base = OTHER; note = 2'-O-methylcytidine-3'-phosphate
  modified_base 19: mod_base = OTHER; note = 2'-O-methyladenosine-3'-phosphate
  modified_base 20: mod_base = OTHER; note = 2'-O-methyladenosine-3'-phosphate
  modified_base 21: mod_base = OTHER; note = 2'-O-methyluridine-3'-phosphate N-[tris(GalNAc-alkyl)-amidodecanoyl)]-4-hydroxyprolinol (Hyp-(GalNAc-alkyl)3)
ccagagcaacagttcttcaat

SEQ ID NO: 521 - RNA, 21 nt, synthetic construct
  source 1..21: mol_type = other RNA
  modified_base 1: mod_base = OTHER; note = 2'-O-methyluridine-3'-phosphorothioate
  modified_base 2: mod_base = OTHER; note = 2'-O-methyluridine-3'-phosphorothioate
  modified_base 3: mod_base = OTHER; note = 2'-O-methylcytidine-3'-phosphate
  modified_base 4: mod_base = OTHER; note = 2'-O-methyluridine-3'-phosphate
  modified_base 5: mod_base = OTHER; note = 2'-O-methyluridine-3'-phosphate
  modified_base 6: mod_base = OTHER; note = 2'-O-methylcytidine-3'-phosphate
  modified_base 7: mod_base = OTHER; note = 2'-fluoroadenosine-3'-phosphate
  modified_base 8: mod_base = OTHER; note = 2'-O-methyladenosine-3'-phosphate
  modified_base 9: mod_base = OTHER; note = 2'-fluoroguanosine-3'-phosphate
  modified_base 10: mod_base = OTHER; note = 2'-fluorouridine-3'-phosphate
  modified_base 11: mod_base = OTHER; note = 2'-fluoroguanosine-3'-phosphate
  modified_base 12: mod_base = OTHER; note = 2'-O-methyluridine-3'-phosphate
  modified_base 13: mod_base = OTHER; note = 2'-O-methyladenosine-3'-phosphate
  modified_base 14: mod_base = OTHER; note = 2'-O-methylcytidine-3'-phosphate
  modified_base 15: mod_base = OTHER; note = 2'-O-methyluridine-3'-phosphate
  modified_base 16: mod_base = OTHER; note = 2'-O-methylcytidine-3'-phosphate
  modified_base 17: mod_base = OTHER; note = 2'-O-methyluridine-3'-phosphate
  modified_base 18: mod_base = OTHER; note = 2'-O-methylguanosine-3'-phosphate
  modified_base 19: mod_base = OTHER; note = 2'-O-methyluridine-3'-phosphate
  modified_base 20: mod_base = OTHER; note = 2'-O-methyladenosine-3'-phosphate
  modified_base 21: mod_base = OTHER; note = 2'-O-methyluridine-3'-phosphate N-[tris(GalNAc-alkyl)-amidodecanoyl)]-4-hydroxyprolinol (Hyp-(GalNAc-alkyl)3)
ttcttcaagtgtactctgtat

SEQ ID NO: 522 - RNA, 21 nt, synthetic construct
  source 1..21: mol_type = other RNA
  modified_base 1: mod_base = OTHER; note = 2'-O-methyluridine-3'-phosphorothioate
  modified_base 2: mod_base = OTHER; note = 2'-O-methyladenosine-3'-phosphorothioate
  modified_base 3: mod_base = OTHER; note = 2'-O-methylcytidine-3'-phosphate
  modified_base 4: mod_base = OTHER; note = 2'-O-methyluridine-3'-phosphate
  modified_base 5: mod_base = OTHER; note = 2'-O-methylcytidine-3'-phosphate
  modified_base 6: mod_base = OTHER; note = 2'-O-methyluridine-3'-phosphate
  modified_base 7: mod_base = OTHER; note = 2'-fluoroguanosine-3'-phosphate
  modified_base 8: mod_base = OTHER; note = 2'-O-methyluridine-3'-phosphate
  modified_base 9: mod_base = OTHER; note = 2'-fluoroadenosine-3'-phosphate
  modified_base 10: mod_base = OTHER; note = 2'-fluoroguanosine-3'-phosphate
  modified_base 11: mod_base = OTHER; note = 2'-fluoroguanosine-3'-phosphate
  modified_base 12: mod_base = OTHER; note = 2'-O-methylcytidine-3'-phosphate
  modified_base 13: mod_base = OTHER; note = 2'-O-methyluridine-3'-phosphate
  modified_base 14: mod_base = OTHER; note = 2'-O-methyluridine-3'-phosphate
  modified_base 15: mod_base = OTHER; note = 2'-O-methylcytidine-3'-phosphate
  modified_base 16: mod_base = OTHER; note = 2'-O-methyluridine-3'-phosphate
  modified_base 17: mod_base = OTHER; note = 2'-O-methylguanosine-3'-phosphate
  modified_base 18: mod_base = OTHER; note = 2'-O-methylguanosine-3'-phosphate
  modified_base 19: mod_base = OTHER; note = 2'-O-methylguanosine-3'-phosphate
  modified_base 20: mod_base = OTHER; note = 2'-O-methyladenosine-3'-phosphate
  modified_base 21: mod_base = OTHER; note = 2'-O-methyluridine-3'-phosphate N-[tris(GalNAc-alkyl)-amidodecanoyl)]-4-hydroxyprolinol (Hyp-(GalNAc-alkyl)3)
tactctgtaggcttctgggat

SEQ ID NO: 523 - RNA, 21 nt, synthetic construct
  source 1..21: mol_type = other RNA
  modified_base 1: mod_base = OTHER; note = 2'-O-methylcytidine-3'-phosphorothioate
  modified_base 2: mod_base = OTHER; note = 2'-O-methyluridine-3'-phosphorothioate
  modified_base 3: mod_base = OTHER; note = 2'-O-methylguanosine-3'-phosphate
  modified_base 4: mod_base = OTHER; note = 2'-O-methylguanosine-3'-phosphate
  modified_base 5: mod_base = OTHER; note = 2'-O-methylguanosine-3'-phosphate
  modified_base 6: mod_base = OTHER; note = 2'-O-methyladenosine-3'-phosphate
  modified_base 7: mod_base = OTHER; note = 2'-fluoroguanosine-3'-phosphate
  modified_base 8: mod_base = OTHER; note = 2'-O-methylguanosine-3'-phosphate
  modified_base 9: mod_base = OTHER; note = 2'-fluorouridine-3'-phosphate
  modified_base 10: mod_base = OTHER; note = 2'-fluorocytidine-3'-phosphate
  modified_base 11: mod_base = OTHER; note = 2'-fluorocytidine-3'-phosphate
  modified_base 12: mod_base = OTHER; note = 2'-O-methylcytidine-3'-phosphate
  modified_base 13: mod_base = OTHER; note = 2'-O-methyluridine-3'-phosphate
  modified_base 14: mod_base = OTHER; note = 2'-O-methyluridine-3'-phosphate
  modified_base 15: mod_base = OTHER; note = 2'-O-methyluridine-3'-phosphate
  modified_base 16: mod_base = OTHER; note = 2'-O-methyluridine-3'-phosphate
  modified_base 17: mod_base = OTHER; note = 2'-O-methylcytidine-3'-phosphate
  modified_base 18: mod_base = OTHER; note = 2'-O-methyladenosine-3'-phosphate
  modified_base 19: mod_base = OTHER; note = 2'-O-methylguanosine-3'-phosphate
  modified_base 20: mod_base = OTHER; note = 2'-O-methylguanosine-3'-phosphate
  modified_base 21: mod_base = OTHER; note = 2'-O-methyluridine-3'-phosphate N-[tris(GalNAc-alkyl)-amidodecanoyl)]-4-hydroxyprolinol (Hyp-(GalNAc-alkyl)3)
ctgggaggtcccttttcaggt

SEQ ID NO: 524 - RNA, 21 nt, synthetic construct
  source 1..21: mol_type = other RNA
  modified_base 1: mod_base = OTHER; note = 2'-O-methylguanosine-3'-phosphorothioate
  modified_base 2: mod_base = OTHER; note = 2'-O-methyluridine-3'-phosphorothioate
  modified_base 3: mod_base = OTHER; note = 2'-O-methylcytidine-3'-phosphate
  modified_base 4: mod_base = OTHER; note = 2'-O-methylcytidine-3'-phosphate
  modified_base 5: mod_base = OTHER; note = 2'-O-methyladenosine-3'-phosphate
  modified_base 6: mod_base = OTHER; note = 2'-O-methylcytidine-3'-phosphate
  modified_base 7: mod_base = OTHER; note = 2'-fluoroadenosine-3'-phosphate
  modified_base 8: mod_base = OTHER; note = 2'-O-methyladenosine-3'-phosphate
  modified_base 9: mod_base = OTHER; note = 2'-fluoroadenosine-3'-phosphate
  modified_base 10: mod_base = OTHER; note = 2'-fluoroguanosine-3'-phosphate
  modified_base 11: mod_base = OTHER; note = 2'-fluorouridine-3'-phosphate
  modified_base 12: mod_base = OTHER; note = 2'-O-methylcytidine-3'-phosphate
  modified_base 13: mod_base = OTHER; note = 2'-O-methyladenosine-3'-phosphate
  modified_base 14: mod_base = OTHER; note = 2'-O-methyladenosine-3'-phosphate
  modified_base 15: mod_base = OTHER; note = 2'-O-methyladenosine-3'-phosphate
  modified_base 16: mod_base = OTHER; note = 2'-O-methylguanosine-3'-phosphate
  modified_base 17: mod_base = OTHER; note = 2'-O-methylcytidine-3'-phosphate
  modified_base 18: mod_base = OTHER; note = 2'-O-methyluridine-3'-phosphate
  modified_base 19: mod_base = OTHER; note = 2'-O-methyladenosine-3'-phosphate
  modified_base 20: mod_base = OTHER; note = 2'-O-methyluridine-3'-phosphate
  modified_base 21: mod_base = OTHER; note = 2'-O-methyluridine-3'-phosphate N-[tris(GalNAc-alkyl)-amidodecanoyl)]-4-hydroxyprolinol (Hyp-(GalNAc-alkyl)3)
gtccacaaagtcaaagctatt

SEQ ID NO: 525 - RNA, 21 nt, synthetic construct
  source 1..21: mol_type = other RNA
  modified_base 1: mod_base = OTHER; note = 2'-O-methylcytidine-3'-phosphorothioate
  modified_base 2: mod_base = OTHER; note = 2'-O-methyluridine-3'-phosphorothioate
  modified_base 3: mod_base = OTHER; note = 2'-O-methyladenosine-3'-phosphate
  modified_base 4: mod_base = OTHER; note = 2'-O-methyladenosine-3'-phosphate
  modified_base 5: mod_base = OTHER; note = 2'-O-methylcytidine-3'-phosphate
  modified_base 6: mod_base = OTHER; note = 2'-O-methyladenosine-3'-phosphate
  modified_base 7: mod_base = OTHER; note = 2'-fluorouridine-3'-phosphate
  modified_base 8: mod_base = OTHER; note = 2'-O-methylguanosine-3'-phosphate
  modified_base 9: mod_base = OTHER; note = 2'-fluorouridine-3'-phosphate
  modified_base 10: mod_base = OTHER; note = 2'-fluorouridine-3'-phosphate
  modified_base 11: mod_base = OTHER; note = 2'-fluoroadenosine-3'-phosphate
  modified_base 12: mod_base = OTHER; note = 2'-O-methyluridine-3'-phosphate
  modified_base 13: mod_base = OTHER; note = 2'-O-methyluridine-3'-phosphate
  modified_base 14: mod_base = OTHER; note = 2'-O-methyluridine-3'-phosphate
  modified_base 15: mod_base = OTHER; note = 2'-O-methylguanosine-3'-phosphate
  modified_base 16: mod_base = OTHER; note = 2'-O-methylcytidine-3'-phosphate
  modified_base 17: mod_base = OTHER; note = 2'-O-methylcytidine-3'-phosphate
  modified_base 18: mod_base = OTHER; note = 2'-O-methyluridine-3'-phosphate
  modified_base 19: mod_base = OTHER; note = 2'-O-methyluridine-3'-phosphate
  modified_base 20: mod_base = OTHER; note = 2'-O-methyluridine-3'-phosphate
  modified_base 21: mod_base = OTHER; note = 2'-O-methyluridine-3'-phosphate N-[tris(GalNAc-alkyl)-amidodecanoyl)]-4-hydroxyprolinol (Hyp-(GalNAc-alkyl)3)
ctaacatgttatttgcctttt

SEQ ID NO: 526 - RNA, 21 nt, synthetic construct
  source 1..21: mol_type = other RNA
  modified_base 1: mod_base = OTHER; note = 2'-O-methylcytidine-3'-phosphorothioate
  modified_base 2: mod_base = OTHER; note = 2'-O-methyluridine-3'-phosphorothioate
  modified_base 3: mod_base = OTHER; note = 2'-O-methyluridine-3'-phosphate
  modified_base 4: mod_base = OTHER; note = 2'-O-methyluridine-3'-phosphate
  modified_base 5: mod_base = OTHER; note = 2'-O-methyluridine-3'-phosphate
  modified_base 6: mod_base = OTHER; note = 2'-O-methylguanosine-3'-phosphate
  modified_base 7: mod_base = OTHER; note = 2'-fluoroadenosine-3'-phosphate
  modified_base 8: mod_base = OTHER; note = 2'-O-methyladenosine-3'-phosphate
  modified_base 9: mod_base = OTHER; note = 2'-fluorouridine-3'-phosphate
  modified_base 10: mod_base = OTHER; note = 2'-fluorouridine-3'-phosphate
  modified_base 11: mod_base = OTHER; note = 2'-fluorocytidine-3'-phosphate
  modified_base 12: mod_base = OTHER; note = 2'-O-methyluridine-3'-phosphate
  modified_base 13: mod_base = OTHER; note = 2'-O-methylcytidine-3'-phosphate
  modified_base 14: mod_base = OTHER; note = 2'-O-methyladenosine-3'-phosphate
  modified_base 15: mod_base = OTHER; note = 2'-O-methyluridine-3'-phosphate
  modified_base 16: mod_base = OTHER; note = 2'-O-methyluridine-3'-phosphate
  modified_base 17: mod_base = OTHER; note = 2'-O-methyladenosine-3'-phosphate
  modified_base 18: mod_base = OTHER; note = 2'-O-methyluridine-3'-phosphate
  modified_base 19: mod_base = OTHER; note = 2'-O-methylcytidine-3'-phosphate
  modified_base 20: mod_base = OTHER; note = 2'-O-methyluridine-3'-phosphate
  modified_base 21: mod_base = OTHER; note = 2'-O-methyluridine-3'-phosphate N-[tris(GalNAc-alkyl)-amidodecanoyl)]-4-hydroxyprolinol (Hyp-(GalNAc-alkyl)3)
cttttgaattctcattatctt

SEQ ID NO: 527 - RNA, 21 nt, synthetic construct
  source 1..21: mol_type = other RNA
  modified_base 1: mod_base = OTHER; note = 2'-O-methylguanosine-3'-phosphorothioate
  modified_base 2: mod_base = OTHER; note = 2'-O-methyluridine-3'-phosphorothioate
  modified_base 3: mod_base = OTHER; note = 2'-O-methyladenosine-3'-phosphate
  modified_base 4: mod_base = OTHER; note = 2'-O-methyluridine-3'-phosphate
  modified_base 5: mod_base = OTHER; note = 2'-O-methyluridine-3'-phosphate
  modified_base 6: mod_base = OTHER; note = 2'-O-methylguanosine-3'-phosphate
  modified_base 7: mod_base = OTHER; note = 2'-fluorouridine-3'-phosphate
  modified_base 8: mod_base = OTHER; note = 2'-O-methylguanosine-3'-phosphate
  modified_base 9: mod_base = OTHER; note = 2'-fluoroguanosine-3'-phosphate
  modified_base 10: mod_base = OTHER; note = 2'-fluoroadenosine-3'-phosphate
  modified_base 11: mod_base = OTHER; note = 2'-fluoroguanosine-3'-phosphate
  modified_base 12: mod_base = OTHER; note = 2'-O-methyluridine-3'-phosphate
  modified_base 13: mod_base = OTHER; note = 2'-O-methyluridine-3'-phosphate
  modified_base 14: mod_base = OTHER; note = 2'-O-methyluridine-3'-phosphate
  modified_base 15: mod_base = OTHER; note = 2'-O-methyluridine-3'-phosphate
  modified_base 16: mod_base = OTHER; note = 2'-O-methylcytidine-3'-phosphate
  modified_base 17: mod_base = OTHER; note = 2'-O-methylcytidine-3'-phosphate
  modified_base 18: mod_base = OTHER; note = 2'-O-methyladenosine-3'-phosphate
  modified_base 19: mod_base = OTHER; note = 2'-O-methylguanosine-3'-phosphate
  modified_base 20: mod_base = OTHER; note = 2'-O-methyladenosine-3'-phosphate
  modified_base 21: mod_base = OTHER; note = 2'-O-methyluridine-3'-phosphate N-[tris(GalNAc-alkyl)-amidodecanoyl)]-4-hydroxyprolinol (Hyp-(GalNAc-alkyl)3)
gtattgtggagttttccagat

SEQ ID NO: 528 - RNA, 21 nt, synthetic construct
  source 1..21: mol_type = other RNA
  modified_base 1: mod_base = OTHER; note = 2'-O-methylguanosine-3'-phosphorothioate
  modified_base 2: mod_base = OTHER; note = 2'-O-methyladenosine-3'-phosphorothioate
  modified_base 3: mod_base = OTHER; note = 2'-O-methylguanosine-3'-phosphate
  modified_base 4: mod_base = OTHER; note = 2'-O-methylguanosine-3'-phosphate
  modified_base 5: mod_base = OTHER; note = 2'-O-methylcytidine-3'-phosphate
  modified_base 6: mod_base = OTHER; note = 2'-O-methylcytidine-3'-phosphate
  modified_base 7: mod_base = OTHER; note = 2'-fluoroguanosine-3'-phosphate
  modified_base 8: mod_base = OTHER; note = 2'-O-methyluridine-3'-phosphate
  modified_base 9: mod_base = OTHER; note = 2'-fluoroguanosine-3'-phosphate
  modified_base 10: mod_base = OTHER; note = 2'-fluorouridine-3'-phosphate
  modified_base 11: mod_base = OTHER; note = 2'-fluoroguanosine-3'-phosphate
  modified_base 12: mod_base = OTHER; note = 2'-O-methyladenosine-3'-phosphate
  modified_base 13: mod_base = OTHER; note = 2'-O-methylcytidine-3'-phosphate
  modified_base 14: mod_base = OTHER; note = 2'-O-methyladenosine-3'-phosphate
  modified_base 15: mod_base = OTHER; note = 2'-O-methyluridine-3'-phosphate
  modified_base 16: mod_base = OTHER; note = 2'-O-methylguanosine-3'-phosphate
  modified_base 17: mod_base = OTHER; note = 2'-O-methyluridine-3'-phosphate
  modified_base 18: mod_base = OTHER; note = 2'-O-methylguanosine-3'-phosphate
  modified_base 19: mod_base = OTHER; note = 2'-O-methyladenosine-3'-phosphate
  modified_base 20: mod_base = OTHER; note = 2'-O-methyluridine-3'-phosphate
  modified_base 21: mod_base = OTHER; note = 2'-O-methyluridine-3'-phosphate N-[tris(GalNAc-alkyl)-amidodecanoyl)]-4-hydroxyprolinol (Hyp-(GalNAc-alkyl)3)
gaggccgtgtgacatgtgatt

SEQ ID NO: 529 - RNA, 21 nt, synthetic construct
  source 1..21: mol_type = other RNA
  modified_base 1: mod_base = OTHER; note = 2'-O-methyladenosine-3'-phosphorothioate
  modified_base 2: mod_base = OTHER; note = 2'-O-methylcytidine-3'-phosphorothioate
  modified_base 3: mod_base = OTHER; note = 2'-O-methyladenosine-3'-phosphate
  modified_base 4: mod_base = OTHER; note = 2'-O-methyluridine-3'-phosphate
  modified_base 5: mod_base = OTHER; note = 2'-O-methylguanosine-3'-phosphate
  modified_base 6: mod_base = OTHER; note = 2'-O-methyluridine-3'-phosphate
  modified_base 7: mod_base = OTHER; note = 2'-fluoroguanosine-3'-phosphate
  modified_base 8: mod_base = OTHER; note = 2'-O-methyladenosine-3'-phosphate
  modified_base 9: mod_base = OTHER; note = 2'-fluorouridine-3'-phosphate
  modified_base 10: mod_base = OTHER; note = 2'-fluorouridine-3'-phosphate
  modified_base 11: mod_base = OTHER; note = 2'-fluoroadenosine-3'-phosphate
  modified_base 12: mod_base = OTHER; note = 2'-O-methylcytidine-3'-phosphate
  modified_base 13: mod_base = OTHER; note = 2'-O-methyladenosine-3'-phosphate
  modified_base 14: mod_base = OTHER; note = 2'-O-methyluridine-3'-phosphate
  modified_base 15: mod_base = OTHER; note = 2'-O-methylcytidine-3'-phosphate
  modified_base 16: mod_base = OTHER; note = 2'-O-methyladenosine-3'-phosphate
  modified_base 17: mod_base = OTHER; note = 2'-O-methyluridine-3'-phosphate
  modified_base 18: mod_base = OTHER; note = 2'-O-methylcytidine-3'-phosphate
  modified_base 19: mod_base = OTHER; note = 2'-O-methyluridine-3'-phosphate
  modified_base 20: mod_base = OTHER; note = 2'-O-methyluridine-3'-phosphate
  modified_base 21: mod_base = OTHER; note = 2'-O-methyluridine-3'-phosphate N-[tris(GalNAc-alkyl)-amidodecanoyl)]-4-hydroxyprolinol (Hyp-(GalNAc-alkyl)3)
acatgtgattacatcatcttt

SEQ ID NO: 530 - RNA, 21 nt, synthetic construct
  source 1..21: mol_type = other RNA
  modified_base 1: mod_base = OTHER; note = 2'-O-methyladenosine-3'-phosphorothioate
  modified_base 2: mod_base = OTHER; note = 2'-O-methyluridine-3'-phosphorothioate
  modified_base 3: mod_base = OTHER; note = 2'-O-methylcytidine-3'-phosphate
  modified_base 4: mod_base = OTHER; note = 2'-O-methyladenosine-3'-phosphate
  modified_base 5: mod_base = OTHER; note = 2'-O-methyluridine-3'-phosphate
  modified_base 6: mod_base = OTHER; note = 2'-O-methylcytidine-3'-phosphate
  modified_base 7: mod_base = OTHER; note = 2'-fluorouridine-3'-phosphate
  modified_base 8: mod_base = OTHER; note = 2'-O-methyluridine-3'-phosphate
  modified_base 9: mod_base = OTHER; note = 2'-fluorouridine-3'-phosphate
  modified_base 10: mod_base = OTHER; note = 2'-fluorocytidine-3'-phosphate
  modified_base 11: mod_base = OTHER; note = 2'-fluorouridine-3'-phosphate
  modified_base 12: mod_base = OTHER; note = 2'-O-methylguanosine-3'-phosphate
  modified_base 13: mod_base = OTHER; note = 2'-O-methyladenosine-3'-phosphate
  modified_base 14: mod_base = OTHER; note = 2'-O-methylcytidine-3'-phosphate
  modified_base 15: mod_base = OTHER; note = 2'-O-methyladenosine-3'-phosphate
  modified_base 16: mod_base = OTHER; note = 2'-O-methyluridine-3'-phosphate
  modified_base 17: mod_base = OTHER; note = 2'-O-methylcytidine-3'-phosphate
  modified_base 18: mod_base = OTHER; note = 2'-O-methyladenosine-3'-phosphate
  modified_base 19: mod_base = OTHER; note = 2'-O-methyluridine-3'-phosphate
  modified_base 20: mod_base = OTHER; note = 2'-O-methyluridine-3'-phosphate
  modified_base 21: mod_base = OTHER; note = 2'-O-methyluridine-3'-phosphate N-[tris(GalNAc-alkyl)-amidodecanoyl)]-4-hydroxyprolinol (Hyp-(GalNAc-alkyl)3)
atcatctttctgacatcattt

SEQ ID NO: 531 - RNA, 21 nt, synthetic construct
  source 1..21: mol_type = other RNA
  modified_base 1: mod_base = OTHER; note = 2'-O-methylguanosine-3'-phosphorothioate
  modified_base 2: mod_base = OTHER; note = 2'-O-methyladenosine-3'-phosphorothioate
  modified_base 3: mod_base = OTHER; note = 2'-O-methylcytidine-3'-phosphate
  modified_base 4: mod_base = OTHER; note = 2'-O-methyladenosine-3'-phosphate
  modified_base 5: mod_base = OTHER; note = 2'-O-methyluridine-3'-phosphate
  modified_base 6: mod_base = OTHER; note = 2'-O-methylcytidine-3'-phosphate
  modified_base 7: mod_base = OTHER; note = 2'-fluoroadenosine-3'-phosphate
  modified_base 8: mod_base = OTHER; note = 2'-O-methyluridine-3'-phosphate
  modified_base 9: mod_base = OTHER; note = 2'-fluorouridine-3'-phosphate
  modified_base 10: mod_base = OTHER; note = 2'-fluoroguanosine-3'-phosphate
  modified_base 11: mod_base = OTHER; note = 2'-fluorouridine-3'-phosphate
  modified_base 12: mod_base = OTHER; note = 2'-O-methyluridine-3'-phosphate
  modified_base 13: mod_base = OTHER; note = 2'-O-methyladenosine-3'-phosphate
  modified_base 14: mod_base = OTHER; note = 2'-O-methyladenosine-3'-phosphate
  modified_base 15: mod_base = OTHER; note = 2'-O-methyluridine-3'-phosphate
  modified_base 16: mod_base = OTHER; note = 2'-O-methylguanosine-3'-phosphate
  modified_base 17: mod_base = OTHER; note = 2'-O-methylguanosine-3'-phosphate
  modified_base 18: mod_base = OTHER; note = 2'-O-methyladenosine-3'-phosphate
  modified_base 19: mod_base = OTHER; note = 2'-O-methyladenosine-3'-phosphate
  modified_base 20: mod_base = OTHER; note = 2'-O-methyluridine-3'-phosphate
  modified_base 21: mod_base = OTHER; note = 2'-O-methyluridine-3'-phosphate N-[tris(GalNAc-alkyl)-amidodecanoyl)]-4-hydroxyprolinol (Hyp-(GalNAc-alkyl)3)
gacatcattgttaatggaatt

SEQ ID NO: 532 - RNA, 23 nt, synthetic construct
  source 1..23: mol_type = other RNA
  modified_base 1: mod_base = OTHER; note = 2'-O-methyladenosine-3'-phosphorothioate
  modified_base 2: mod_base = OTHER; note = 2'-fluorouridine -3'-phosphorothioate
  modified_base 3: mod_base = OTHER; note = 2'-O-methylcytidine-3'-phosphate
  modified_base 4: mod_base = OTHER; note = 2'-O-methyladenosine-3'-phosphate
  modified_base 5: mod_base = OTHER; note = 2'-O-methylcytidine-3'-phosphate
  modified_base 6: mod_base = OTHER; note = 2'-fluoroadenosine-3'-phosphate
  modified_base 7: mod_base = OTHER; note = 2'-O-methylguanosine-3'-phosphate
  modified_base 8: mod_base = OTHER; note = 2'-fluorocytidine-3'-phosphate
  modified_base 9: mod_base = OTHER; note = 2'-fluorouridine-3'-phosphate
  modified_base 10: mod_base = OTHER; note = 2'-O-methylcytidine-3'-phosphate
  modified_base 11: mod_base = OTHER; note = 2'-O-methyladenosine-3'-phosphate
  modified_base 12: mod_base = OTHER; note = 2'-O-methyluridine-3'-phosphate
  modified_base 13: mod_base = OTHER; note = 2'-O-methylguanosine-3'-phosphate
  modified_base 14: mod_base = OTHER; note = 2'-fluorouridine-3'-phosphate
  modified_base 15: mod_base = OTHER; note = 2'-O-methylcytidine-3'-phosphate
  modified_base 16: mod_base = OTHER; note = 2'-fluorouridine-3'-phosphate
  modified_base 17: mod_base = OTHER; note = 2'-O-methylguanosine-3'-phosphate
  modified_base 18: mod_base = OTHER; note = 2'-O-methylguanosine-3'-phosphate
  modified_base 19: mod_base = OTHER; note = 2'-O-methylcytidine-3'-phosphate
  modified_base 20: mod_base = OTHER; note = 2'-O-methyluridine-3'-phosphate
  modified_base 21: mod_base = OTHER; note = 2'-O-methyladenosine-3'-phosphorothioate
  modified_base 22: mod_base = OTHER; note = 2'-O-methylcytidine-3'-phosphorothioate
  modified_base 23: mod_base = OTHER; note = 2'-O-methyluridine-3'-phosphate
atcacagctcatgtctggctact

SEQ ID NO: 533 - RNA, 23 nt, synthetic construct
  source 1..23: mol_type = other RNA
  modified_base 1: mod_base = OTHER; note = 2'-O-methyladenosine-3'-phosphorothioate
  modified_base 2: mod_base = OTHER; note = 2'-fluoroguanosine-3'-phosphorothioate
  modified_base 3: mod_base = OTHER; note = 2'-O-methyladenosine-3'-phosphate
  modified_base 4: mod_base = OTHER; note = 2'-O-methyluridine-3'-phosphate
  modified_base 5: mod_base = OTHER; note = 2'-O-methyladenosine-3'-phosphate
  modified_base 6: mod_base = OTHER; note = 2'-fluoroguanosine-3'-phosphate
  modified_base 7: mod_base = OTHER; note = 2'-O-methylcytidine-3'-phosphate
  modified_base 8: mod_base = OTHER; note = 2'-fluorouridine-3'-phosphate
  modified_base 9: mod_base = OTHER; note = 2'-fluoroguanosine-3'-phosphate
  modified_base 10: mod_base = OTHER; note = 2'-O-methyluridine-3'-phosphate
  modified_base 11: mod_base = OTHER; note = 2'-O-methylguanosine-3'-phosphate
  modified_base 12: mod_base = OTHER; note = 2'-O-methylcytidine-3'-phosphate
  modified_base 13: mod_base = OTHER; note = 2'-O-methyluridine-3'-phosphate
  modified_base 14: mod_base = OTHER; note = 2'-fluorouridine-3'-phosphate
  modified_base 15: mod_base = OTHER; note = 2'-O-methylguanosine-3'-phosphate
  modified_base 16: mod_base = OTHER; note = 2'-fluoroadenosine-3'-phosphate
  modified_base 17: mod_base = OTHER; note = 2'-O-methylcytidine-3'-phosphate
  modified_base 18: mod_base = OTHER; note = 2'-O-methylcytidine-3'-phosphate
  modified_base 19: mod_base = OTHER; note = 2'-O-methylcytidine-3'-phosphate
  modified_base 20: mod_base = OTHER; note = 2'-O-methyluridine-3'-phosphate
  modified_base 21: mod_base = OTHER; note = 2'-O-methylcytidine-3'-phosphorothioate
  modified_base 22: mod_base = OTHER; note = 2'-O-methyladenosine-3'-phosphorothioate
  modified_base 23: mod_base = OTHER; note = 2'-O-methylcytidine-3'-phosphate
agatagctgtgcttgaccctcac

SEQ ID NO: 534 - RNA, 23 nt, synthetic construct
  source 1..23: mol_type = other RNA
  modified_base 1: mod_base = OTHER; note = 2'-O-methyladenosine-3'-phosphorothioate
  modified_base 2: mod_base = OTHER; note = 2'-fluoroadenosine-3'-phosphorothioate
  modified_base 3: mod_base = OTHER; note = 2'-O-methyladenosine-3'-phosphate
  modified_base 4: mod_base = OTHER; note = 2'-O-methylguanosine-3'-phosphate
  modified_base 5: mod_base = OTHER; note = 2'-O-methyluridine-3'-phosphate
  modified_base 6: mod_base = OTHER; note = 2'-fluoroadenosine-3'-phosphate
  modified_base 7: mod_base = OTHER; note = 2'-O-methylguanosine-3'-phosphate
  modified_base 8: mod_base = OTHER; note = 2'-fluoroadenosine-3'-phosphate
  modified_base 9: mod_base = OTHER; note = 2'-fluorouridine-3'-phosphate
  modified_base 10: mod_base = OTHER; note = 2'-O-methylcytidine-3'-phosphate
  modified_base 11: mod_base = OTHER; note = 2'-O-methyladenosine-3'-phosphate
  modified_base 12: mod_base = OTHER; note = 2'-O-methyluridine-3'-phosphate
  modified_base 13: mod_base = OTHER; note = 2'-O-methylcytidine-3'-phosphate
  modified_base 14: mod_base = OTHER; note = 2'-fluorouridine-3'-phosphate
  modified_base 15: mod_base = OTHER; note = 2'-O-methylguanosine-3'-phosphate
  modified_base 16: mod_base = OTHER; note = 2'-fluoroadenosine-3'-phosphate
  modified_base 17: mod_base = OTHER; note = 2'-O-methyluridine-3'-phosphate
  modified_base 18: mod_base = OTHER; note = 2'-O-methylguanosine-3'-phosphate
  modified_base 19: mod_base = OTHER; note = 2'-O-methylguanosine-3'-phosphate
  modified_base 20: mod_base = OTHER; note = 2'-O-methyladenosine-3'-phosphate
  modified_base 21: mod_base = OTHER; note = 2'-O-methyluridine-3'-phosphorothioate
  modified_base 22: mod_base = OTHER; note = 2'-O-methyladenosine-3'-phosphorothioate
  modified_base 23: mod_base = OTHER; note = 2'-O-methylguanosine-3'-phosphate
aaagtagatcatctgatggatag

SEQ ID NO: 535 - RNA, 23 nt, synthetic construct
  source 1..23: mol_type = other RNA
  modified_base 1: mod_base = OTHER; note = 2'-O-methyladenosine-3'-phosphorothioate
  modified_base 2: mod_base = OTHER; note = 2'-fluoroadenosine-3'-phosphorothioate
  modified_base 3: mod_base = OTHER; note = 2'-O-methylguanosine-3'-phosphate
  modified_base 4: mod_base = OTHER; note = 2'-O-methylguanosine-3'-phosphate
  modified_base 5: mod_base = OTHER; note = 2'-O-methyladenosine-3'-phosphate
  modified_base 6: mod_base = OTHER; note = 2'-fluoroadenosine-3'-phosphate
  modified_base 7: mod_base = OTHER; note = 2'-O-methylguanosine-3'-phosphate
  modified_base 8: mod_base = OTHER; note = 2'-fluoroguanosine-3'-phosphate
  modified_base 9: mod_base = OTHER; note = 2'-fluorocytidine-3'-phosphate
  modified_base 10: mod_base = OTHER; note = 2'-O-methyluridine-3'-phosphate
  modified_base 11: mod_base = OTHER; note = 2'-O-methylguanosine-3'-phosphate
  modified_base 12: mod_base = OTHER; note = 2'-O-methyladenosine-3'-phosphate
  modified_base 13: mod_base = OTHER; note = 2'-O-methyladenosine-3'-phosphate
  modified_base 14: mod_base = OTHER; note = 2'-fluoroadenosine-3'-phosphate
  modified_base 15: mod_base = OTHER; note = 2'-O-methylguanosine-3'-phosphate
  modified_base 16: mod_base = OTHER; note = 2'-fluorouridine-3'-phosphate
  modified_base 17: mod_base = OTHER; note = 2'-O-methyladenosine-3'-phosphate
  modified_base 18: mod_base = OTHER; note = 2'-O-methylguanosine-3'-phosphate
  modified_base 19: mod_base = OTHER; note = 2'-O-methyladenosine-3'-phosphate
  modified_base 20: mod_base = OTHER; note = 2'-O-methyluridine-3'-phosphate
  modified_base 21: mod_base = OTHER; note = 2'-O-methylcytidine-3'-phosphorothioate
  modified_base 22: mod_base = OTHER; note = 2'-O-methyladenosine-3'-phosphorothioate
  modified_base 23: mod_base = OTHER; note = 2'-O-methyluridine-3'-phosphate
aaggaaggctgaaagtagatcat

SEQ ID NO: 536 - RNA, 23 nt, synthetic construct
  source 1..23: mol_type = other RNA
  modified_base 1: mod_base = OTHER; note = 2'-O-methyladenosine-3'-phosphorothioate
  modified_base 2: mod_base = OTHER; note = 2'-fluorouridine -3'-phosphorothioate
  modified_base 3: mod_base = OTHER; note = 2'-O-methylcytidine-3'-phosphate
  modified_base 4: mod_base = OTHER; note = 2'-O-methyluridine-3'-phosphate
  modified_base 5: mod_base = OTHER; note = 2'-O-methyluridine-3'-phosphate
  modified_base 6: mod_base = OTHER; note = 2'-fluorocytidine-3'-phosphate
  modified_base 7: mod_base = OTHER; note = 2'-O-methyluridine-3'-phosphate
  modified_base 8: mod_base = OTHER; note = 2'-fluoroadenosine-3'-phosphate
  modified_base 9: mod_base = OTHER; note = 2'-fluorouridine-3'-phosphate
  modified_base 10: mod_base = OTHER; note = 2'-O-methyluridine-3'-phosphate
  modified_base 11: mod_base = OTHER; note = 2'-O-methylguanosine-3'-phosphate
  modified_base 12: mod_base = OTHER; note = 2'-O-methyluridine-3'-phosphate
  modified_base 13: mod_base = OTHER; note = 2'-O-methylcytidine-3'-phosphate
  modified_base 14: mod_base = OTHER; note = 2'-fluorouridine-3'-phosphate
  modified_base 15: mod_base = OTHER; note = 2'-O-methylguanosine-3'-phosphate
  modified_base 16: mod_base = OTHER; note = 2'-fluoroguanosine-3'-phosphate
  modified_base 17: mod_base = OTHER; note = 2'-O-methylguanosine-3'-phosphate
  modified_base 18: mod_base = OTHER; note = 2'-O-methyladenosine-3'-phosphate
  modified_base 19: mod_base = OTHER; note = 2'-O-methylcytidine-3'-phosphate
  modified_base 20: mod_base = OTHER; note = 2'-O-methyluridine-3'-phosphate
  modified_base 21: mod_base = OTHER; note = 2'-O-methylcytidine-3'-phosphorothioate
  modified_base 22: mod_base = OTHER; note = 2'-O-methyladenosine-3'-phosphorothioate
  modified_base 23: mod_base = OTHER; note = 2'-O-methylguanosine-3'-phosphate
atcttctattgtctgggactcag

SEQ ID NO: 537 - RNA, 23 nt, synthetic construct
  source 1..23: mol_type = other RNA
  modified_base 1: mod_base = OTHER; note = 2'-O-methyladenosine-3'-phosphorothioate
  modified_base 2: mod_base = OTHER; note = 2'-fluorouridine -3'-phosphorothioate
  modified_base 3: mod_base = OTHER; note = 2'-O-methyladenosine-3'-phosphate
  modified_base 4: mod_base = OTHER; note = 2'-O-methylcytidine-3'-phosphate
  modified_base 5: mod_base = OTHER; note = 2'-O-methyladenosine-3'-phosphate
  modified_base 6: mod_base = OTHER; note = 2'-fluoroguanosine-3'-phosphate
  modified_base 7: mod_base = OTHER; note = 2'-O-methylcytidine-3'-phosphate
  modified_base 8: mod_base = OTHER; note = 2'-fluorocytidine-3'-phosphate
  modified_base 9: mod_base = OTHER; note = 2'-fluoroadenosine-3'-phosphate
  modified_base 10: mod_base = OTHER; note = 2'-O-methylcytidine-3'-phosphate
  modified_base 11: mod_base = OTHER; note = 2'-O-methylcytidine-3'-phosphate
  modified_base 12: mod_base = OTHER; note = 2'-O-methyluridine-3'-phosphate
  modified_base 13: mod_base = OTHER; note = 2'-O-methylguanosine-3'-phosphate
  modified_base 14: mod_base = OTHER; note = 2'-fluorouridine-3'-phosphate
  modified_base 15: mod_base = OTHER; note = 2'-O-methylcytidine-3'-phosphate
  modified_base 16: mod_base = OTHER; note = 2'-fluorouridine-3'-phosphate
  modified_base 17: mod_base = OTHER; note = 2'-O-methyluridine-3'-phosphate
  modified_base 18: mod_base = OTHER; note = 2'-O-methylcytidine-3'-phosphate
  modified_base 19: mod_base = OTHER; note = 2'-O-methyluridine-3'-phosphate
  modified_base 20: mod_base = OTHER; note = 2'-O-methyladenosine-3'-phosphate
  modified_base 21: mod_base = OTHER; note = 2'-O-methyluridine-3'-phosphorothioate
  modified_base 22: mod_base = OTHER; note = 2'-O-methyluridine-3'-phosphorothioate
  modified_base 23: mod_base = OTHER; note = 2'-O-methylguanosine-3'-phosphate
atacagccacctgtcttctattg

SEQ ID NO: 538 - RNA, 23 nt, synthetic construct
  source 1..23: mol_type = other RNA
  modified_base 1: mod_base = OTHER; note = 2'-O-methyladenosine-3'-phosphorothioate
  modified_base 2: mod_base = OTHER; note = 2'-fluorouridine -3'-phosphorothioate
  modified_base 3: mod_base = OTHER; note = 2'-O-methyluridine-3'-phosphate
  modified_base 4: mod_base = OTHER; note = 2'-O-methylguanosine-3'-phosphate
  modified_base 5: mod_base = OTHER; note = 2'-O-methylguanosine-3'-phosphate
  modified_base 6: mod_base = OTHER; note = 2'-fluorocytidine-3'-phosphate
  modified_base 7: mod_base = OTHER; note = 2'-O-methylcytidine-3'-phosphate
  modified_base 8: mod_base = OTHER; note = 2'-fluoroadenosine-3'-phosphate
  modified_base 9: mod_base = OTHER; note = 2'-fluoroadenosine-3'-phosphate
  modified_base 10: mod_base = OTHER; note = 2'-O-methylguanosine-3'-phosphate
  modified_base 11: mod_base = OTHER; note = 2'-O-methylguanosine-3'-phosphate
  modified_base 12: mod_base = OTHER; note = 2'-O-methylguanosine-3'-phosphate
  modified_base 13: mod_base = OTHER; note = 2'-O-methyluridine-3'-phosphate
  modified_base 14: mod_base = OTHER; note = 2'-fluoroadenosine-3'-phosphate
  modified_base 15: mod_base = OTHER; note = 2'-O-methylcytidine-3'-phosphate
  modified_base 16: mod_base = OTHER; note = 2'-fluoroadenosine-3'-phosphate
  modified_base 17: mod_base = OTHER; note = 2'-O-methylguanosine-3'-phosphate
  modified_base 18: mod_base = OTHER; note = 2'-O-methylcytidine-3'-phosphate
  modified_base 19: mod_base = OTHER; note = 2'-O-methylcytidine-3'-phosphate
  modified_base 20: mod_base = OTHER; note = 2'-O-methyladenosine-3'-phosphate
  modified_base 21: mod_base = OTHER; note = 2'-O-methylcytidine-3'-phosphorothioate
  modified_base 22: mod_base = OTHER; note = 2'-O-methylcytidine-3'-phosphorothioate
  modified_base 23: mod_base = OTHER; note = 2'-O-methyluridine-3'-phosphate
attggccaagggtacagccacct

SEQ ID NO: 539 - RNA, 23 nt, synthetic construct
  source 1..23: mol_type = other RNA
  modified_base 1: mod_base = OTHER; note = 2'-O-methyladenosine-3'-phosphorothioate
  modified_base 2: mod_base = OTHER; note = 2'-fluorocytidine-3'-phosphorothioate
  modified_base 3: mod_base = OTHER; note = 2'-O-methyladenosine-3'-phosphate
  modified_base 4: mod_base = OTHER; note = 2'-O-methylcytidine-3'-phosphate
  modified_base 5: mod_base = OTHER; note = 2'-O-methyladenosine-3'-phosphate
  modified_base 6: mod_base = OTHER; note = 2'-fluorocytidine-3'-phosphate
  modified_base 7: mod_base = OTHER; note = 2'-O-methylcytidine-3'-phosphate
  modified_base 8: mod_base = OTHER; note = 2'-fluorouridine-3'-phosphate
  modified_base 9: mod_base = OTHER; note = 2'-fluoroadenosine-3'-phosphate
  modified_base 10: mod_base = OTHER; note = 2'-O-methylcytidine-3'-phosphate
  modified_base 11: mod_base = OTHER; note = 2'-O-methylcytidine-3'-phosphate
  modified_base 12: mod_base = OTHER; note = 2'-O-methylcytidine-3'-phosphate
  modified_base 13: mod_base = OTHER; note = 2'-O-methyluridine-3'-phosphate
  modified_base 14: mod_base = OTHER; note = 2'-fluorouridine-3'-phosphate
  modified_base 15: mod_base = OTHER; note = 2'-O-methylguanosine-3'-phosphate
  modified_base 16: mod_base = OTHER; note = 2'-fluoroguanosine-3'-phosphate
  modified_base 17: mod_base = OTHER; note = 2'-O-methylcytidine-3'-phosphate
  modified_base 18: mod_base = OTHER; note = 2'-O-methylcytidine-3'-phosphate
  modified_base 19: mod_base = OTHER; note = 2'-O-methyladenosine-3'-phosphate
  modified_base 20: mod_base = OTHER; note = 2'-O-methyladenosine-3'-phosphate
  modified_base 21: mod_base = OTHER; note = 2'-O-methylguanosine-3'-phosphorothioate
  modified_base 22: mod_base = OTHER; note = 2'-O-methylguanosine-3'-phosphorothioate
  modified_base 23: mod_base = OTHER; note = 2'-O-methylguanosine-3'-phosphate
acacacctacccttggccaaggg

SEQ ID NO: 540 - RNA, 23 nt, synthetic construct
  source 1..23: mol_type = other RNA
  modified_base 1: mod_base = OTHER; note = 2'-O-methyladenosine-3'-phosphorothioate
  modified_base 2: mod_base = OTHER; note = 2'-fluoroadenosine-3'-phosphorothioate
  modified_base 3: mod_base = OTHER; note = 2'-O-methylcytidine-3'-phosphate
  modified_base 4: mod_base = OTHER; note = 2'-O-methyladenosine-3'-phosphate
  modified_base 5: mod_base = OTHER; note = 2'-O-methylguanosine-3'-phosphate
  modified_base 6: mod_base = OTHER; note = 2'-fluorocytidine-3'-phosphate
  modified_base 7: mod_base = OTHER; note = 2'-O-methyladenosine-3'-phosphate
  modified_base 8: mod_base = OTHER; note = 2'-fluoroguanosine-3'-phosphate
  modified_base 9: mod_base = OTHER; note = 2'-fluoroadenosine-3'-phosphate
  modified_base 10: mod_base = OTHER; note = 2'-O-methylcytidine-3'-phosphate
  modified_base 11: mod_base = OTHER; note = 2'-O-methyladenosine-3'-phosphate
  modified_base 12: mod_base = OTHER; note = 2'-O-methylcytidine-3'-phosphate
  modified_base 13: mod_base = OTHER; note = 2'-O-methylcytidine-3'-phosphate
  modified_base 14: mod_base = OTHER; note = 2'-fluoroadenosine-3'-phosphate
  modified_base 15: mod_base = OTHER; note = 2'-O-methylcytidine-3'-phosphate
  modified_base 16: mod_base = OTHER; note = 2'-fluorouridine-3'-phosphate
  modified_base 17: mod_base = OTHER; note = 2'-O-methylguanosine-3'-phosphate
  modified_base 18: mod_base = OTHER; note = 2'-O-methylcytidine-3'-phosphate
  modified_base 19: mod_base = OTHER; note = 2'-O-methylcytidine-3'-phosphate
  modified_base 20: mod_base = OTHER; note = 2'-O-methyladenosine-3'-phosphate
  modified_base 21: mod_base = OTHER; note = 2'-O-methylcytidine-3'-phosphorothioate
  modified_base 22: mod_base = OTHER; note = 2'-O-methyladenosine-3'-phosphorothioate
  modified_base 23: mod_base = OTHER; note = 2'-O-methylcytidine-3'-phosphate
aacagcagacaccactgccacac

SEQ ID NO: 541 - RNA, 23 nt, synthetic construct
  source 1..23: mol_type = other RNA
  modified_base 1: mod_base = OTHER; note = 2'-O-methyladenosine-3'-phosphorothioate
  modified_base 2: mod_base = OTHER; note = 2'-fluoroadenosine-3'-phosphorothioate
  modified_base 3: mod_base = OTHER; note = 2'-O-methyluridine-3'-phosphate
  modified_base 4: mod_base = OTHER; note = 2'-O-methylguanosine-3'-phosphate
  modified_base 5: mod_base = OTHER; note = 2'-O-methyladenosine-3'-phosphate
  modified_base 6: mod_base = OTHER; note = 2'-fluoroguanosine-3'-phosphate
  modified_base 7: mod_base = OTHER; note = 2'-O-methylguanosine-3'-phosphate
  modified_base 8: mod_base = OTHER; note = 2'-fluoroguanosine-3'-phosphate
  modified_base 9: mod_base = OTHER; note = 2'-fluorocytidine-3'-phosphate
  modified_base 10: mod_base = OTHER; note = 2'-O-methyladenosine-3'-phosphate
  modified_base 11: mod_base = OTHER; note = 2'-O-methylcytidine-3'-phosphate
  modified_base 12: mod_base = OTHER; note = 2'-O-methyladenosine-3'-phosphate
  modified_base 13: mod_base = OTHER; note = 2'-O-methylguanosine-3'-phosphate
  modified_base 14: mod_base = OTHER; note = 2'-fluorouridine-3'-phosphate
  modified_base 15: mod_base = OTHER; note = 2'-O-methylguanosine-3'-phosphate
  modified_base 16: mod_base = OTHER; note = 2'-fluoroadenosine-3'-phosphate
  modified_base 17: mod_base = OTHER; note = 2'-O-methylcytidine-3'-phosphate
  modified_base 18: mod_base = OTHER; note = 2'-O-methyladenosine-3'-phosphate
  modified_base 19: mod_base = OTHER; note = 2'-O-methylguanosine-3'-phosphate
  modified_base 20: mod_base = OTHER; note = 2'-O-methylcytidine-3'-phosphate
  modified_base 21: mod_base = OTHER; note = 2'-O-methyladenosine-3'-phosphorothioate
  modified_base 22: mod_base = OTHER; note = 2'-O-methylguanosine-3'-phosphorothioate
  modified_base 23: mod_base = OTHER; note = 2'-O-methyladenosine-3'-phosphate
aatgagggcacagtgacagcaga

SEQ ID NO: 542 - RNA, 23 nt, synthetic construct
  source 1..23: mol_type = other RNA
  modified_base 1: mod_base = OTHER; note = 2'-O-methyladenosine-3'-phosphorothioate
  modified_base 2: mod_base = OTHER; note = 2'-fluoroguanosine-3'-phosphorothioate
  modified_base 3: mod_base = OTHER; note = 2'-O-methyluridine-3'-phosphate
  modified_base 4: mod_base = OTHER; note = 2'-O-methylcytidine-3'-phosphate
  modified_base 5: mod_base = OTHER; note = 2'-O-methyluridine-3'-phosphate
  modified_base 6: mod_base = OTHER; note = 2'-fluoroguanosine-3'-phosphate
  modified_base 7: mod_base = OTHER; note = 2'-O-methyluridine-3'-phosphate
  modified_base 8: mod_base = OTHER; note = 2'-fluorouridine-3'-phosphate
  modified_base 9: mod_base = OTHER; note = 2'-fluoroguanosine-3'-phosphate
  modified_base 10: mod_base = OTHER; note = 2'-O-methyladenosine-3'-phosphate
  modified_base 11: mod_base = OTHER; note = 2'-O-methylguanosine-3'-phosphate
  modified_base 12: mod_base = OTHER; note = 2'-O-methyluridine-3'-phosphate
  modified_base 13: mod_base = OTHER; note = 2'-O-methylcytidine-3'-phosphate
  modified_base 14: mod_base = OTHER; note = 2'-fluorouridine-3'-phosphate
  modified_base 15: mod_base = OTHER; note = 2'-O-methylguanosine-3'-phosphate
  modified_base 16: mod_base = OTHER; note = 2'-fluoroadenosine-3'-phosphate
  modified_base 17: mod_base = OTHER; note = 2'-O-methyluridine-3'-phosphate
  modified_base 18: mod_base = OTHER; note = 2'-O-methyluridine-3'-phosphate
  modified_base 19: mod_base = OTHER; note = 2'-O-methylguanosine-3'-phosphate
  modified_base 20: mod_base = OTHER; note = 2'-O-methylcytidine-3'-phosphate
  modified_base 21: mod_base = OTHER; note = 2'-O-methyluridine-3'-phosphorothioate
  modified_base 22: mod_base = OTHER; note = 2'-O-methylguanosine-3'-phosphorothioate
  modified_base 23: mod_base = OTHER; note = 2'-O-methylguanosine-3'-phosphate
agtctgttgagtctgattgctgg

SEQ ID NO: 543 - RNA, 23 nt, synthetic construct
  source 1..23: mol_type = other RNA
  modified_base 1: mod_base = OTHER; note = 2'-O-methyladenosine-3'-phosphorothioate
  modified_base 2: mod_base = OTHER; note = 2'-fluorouridine -3'-phosphorothioate
  modified_base 3: mod_base = OTHER; note = 2'-O-methylcytidine-3'-phosphate
  modified_base 4: mod_base = OTHER; note = 2'-O-methylguanosine-3'-phosphate
  modified_base 5: mod_base = OTHER; note = 2'-O-methylguanosine-3'-phosphate
  modified_base 6: mod_base = OTHER; note = 2'-fluoroadenosine-3'-phosphate
  modified_base 7: mod_base = OTHER; note = 2'-O-methyluridine-3'-phosphate
  modified_base 8: mod_base = OTHER; note = 2'-fluoroguanosine-3'-phosphate
  modified_base 9: mod_base = OTHER; note = 2'-fluoroguanosine-3'-phosphate
  modified_base 10: mod_base = OTHER; note = 2'-O-methylcytidine-3'-phosphate
  modified_base 11: mod_base = OTHER; note = 2'-O-methyladenosine-3'-phosphate
  modified_base 12: mod_base = OTHER; note = 2'-O-methylguanosine-3'-phosphate
  modified_base 13: mod_base = OTHER; note = 2'-O-methyluridine-3'-phosphate
  modified_base 14: mod_base = OTHER; note = 2'-fluorouridine-3'-phosphate
  modified_base 15: mod_base = OTHER; note = 2'-O-methylguanosine-3'-phosphate
  modified_base 16: mod_base = OTHER; note = 2'-fluorocytidine-3'-phosphate
  modified_base 17: mod_base = OTHER; note = 2'-O-methyluridine-3'-phosphate
  modified_base 18: mod_base = OTHER; note = 2'-O-methylcytidine-3'-phosphate
  modified_base 19: mod_base = OTHER; note = 2'-O-methylcytidine-3'-phosphate
  modified_base 20: mod_base = OTHER; note = 2'-O-methylguanosine-3'-phosphate
  modified_base 21: mod_base = OTHER; note = 2'-O-methyluridine-3'-phosphorothioate
  modified_base 22: mod_base = OTHER; note = 2'-O-methylcytidine-3'-phosphorothioate
  modified_base 23: mod_base = OTHER; note = 2'-O-methyluridine-3'-phosphate
atcggatggcagttgctccgtct

SEQ ID NO: 544 - RNA, 23 nt, synthetic construct
  source 1..23: mol_type = other RNA
  modified_base 1: mod_base = OTHER; note = 2'-O-methyladenosine-3'-phosphorothioate
  modified_base 2: mod_base = OTHER; note = 2'-fluoroadenosine-3'-phosphorothioate
  modified_base 3: mod_base = OTHER; note = 2'-O-methyladenosine-3'-phosphate
  modified_base 4: mod_base = OTHER; note = 2'-O-methyluridine-3'-phosphate
  modified_base 5: mod_base = OTHER; note = 2'-O-methylguanosine-3'-phosphate
  modified_base 6: mod_base = OTHER; note = 2'-fluoroguanosine-3'-phosphate
  modified_base 7: mod_base = OTHER; note = 2'-O-methylcytidine-3'-phosphate
  modified_base 8: mod_base = OTHER; note = 2'-fluorocytidine-3'-phosphate
  modified_base 9: mod_base = OTHER; note = 2'-fluorocytidine-3'-phosphate
  modified_base 10: mod_base = OTHER; note = 2'-O-methyluridine-3'-phosphate
  modified_base 11: mod_base = OTHER; note = 2'-O-methylguanosine-3'-phosphate
  modified_base 12: mod_base = OTHER; note = 2'-O-methylguanosine-3'-phosphate
  modified_base 13: mod_base = OTHER; note = 2'-O-methyluridine-3'-phosphate
  modified_base 14: mod_base = OTHER; note = 2'-fluorouridine-3'-phosphate
  modified_base 15: mod_base = OTHER; note = 2'-O-methylcytidine-3'-phosphate
  modified_base 16: mod_base = OTHER; note = 2'-fluoroadenosine-3'-phosphate
  modified_base 17: mod_base = OTHER; note = 2'-O-methylguanosine-3'-phosphate
  modified_base 18: mod_base = OTHER; note = 2'-O-methylguanosine-3'-phosphate
  modified_base 19: mod_base = OTHER; note = 2'-O-methyladenosine-3'-phosphate
  modified_base 20: mod_base = OTHER; note = 2'-O-methylguanosine-3'-phosphate
  modified_base 21: mod_base = OTHER; note = 2'-O-methylcytidine-3'-phosphorothioate
  modified_base 22: mod_base = OTHER; note = 2'-O-methylcytidine-3'-phosphorothioate
  modified_base 23: mod_base = OTHER; note = 2'-O-methyluridine-3'-phosphate
aaatggccctggttcaggagcct

SEQ ID NO: 545 - RNA, 23 nt, synthetic construct
  source 1..23: mol_type = other RNA
  modified_base 1: mod_base = OTHER; note = 2'-O-methyladenosine-3'-phosphorothioate
  modified_base 2: mod_base = OTHER; note = 2'-fluorouridine -3'-phosphorothioate
  modified_base 3: mod_base = OTHER; note = 2'-O-methylguanosine-3'-phosphate
  modified_base 4: mod_base = OTHER; note = 2'-O-methylcytidine-3'-phosphate
  modified_base 5: mod_base = OTHER; note = 2'-O-methyluridine-3'-phosphate
  modified_base 6: mod_base = OTHER; note = 2'-fluorocytidine-3'-phosphate
  modified_base 7: mod_base = OTHER; note = 2'-O-methylcytidine-3'-phosphate
  modified_base 8: mod_base = OTHER; note = 2'-fluorouridine-3'-phosphate
  modified_base 9: mod_base = OTHER; note = 2'-fluoroguanosine-3'-phosphate
  modified_base 10: mod_base = OTHER; note = 2'-O-methylguanosine-3'-phosphate
  modified_base 11: mod_base = OTHER; note = 2'-O-methyluridine-3'-phosphate
  modified_base 12: mod_base = OTHER; note = 2'-O-methylguanosine-3'-phosphate
  modified_base 13: mod_base = OTHER; note = 2'-O-methyladenosine-3'-phosphate
  modified_base 14: mod_base = OTHER; note = 2'-fluoroadenosine-3'-phosphate
  modified_base 15: mod_base = OTHER; note = 2'-O-methyluridine-3'-phosphate
  modified_base 16: mod_base = OTHER; note = 2'-fluoroguanosine-3'-phosphate
  modified_base 17: mod_base = OTHER; note = 2'-O-methylguanosine-3'-phosphate
  modified_base 18: mod_base = OTHER; note = 2'-O-methylcytidine-3'-phosphate
  modified_base 19: mod_base = OTHER; note = 2'-O-methylcytidine-3'-phosphate
  modified_base 20: mod_base = OTHER; note = 2'-O-methylcytidine-3'-phosphate
  modified_base 21: mod_base = OTHER; note = 2'-O-methyluridine-3'-phosphorothioate
  modified_base 22: mod_base = OTHER; note = 2'-O-methylguanosine-3'-phosphorothioate
  modified_base 23: mod_base = OTHER; note = 2'-O-methylguanosine-3'-phosphate
atgctcctggtgaatggccctgg

SEQ ID NO: 546 - RNA, 23 nt, synthetic construct
  source 1..23: mol_type = other RNA
  modified_base 1: mod_base = OTHER; note = 2'-O-methyladenosine-3'-phosphorothioate
  modified_base 2: mod_base = OTHER; note = 2'-fluoroadenosine-3'-phosphorothioate
  modified_base 3: mod_base = OTHER; note = 2'-O-methylguanosine-3'-phosphate
  modified_base 4: mod_base = OTHER; note = 2'-O-methyladenosine-3'-phosphate
  modified_base 5: mod_base = OTHER; note = 2'-O-methylguanosine-3'-phosphate
  modified_base 6: mod_base = OTHER; note = 2'-fluorocytidine-3'-phosphate
  modified_base 7: mod_base = OTHER; note = 2'-O-methyluridine-3'-phosphate
  modified_base 8: mod_base = OTHER; note = 2'-fluoroguanosine-3'-phosphate
  modified_base 9: mod_base = OTHER; note = 2'-fluoroguanosine-3'-phosphate
  modified_base 10: mod_base = OTHER; note = 2'-O-methyladenosine-3'-phosphate
  modified_base 11: mod_base = OTHER; note = 2'-O-methylcytidine-3'-phosphate
  modified_base 12: mod_base = OTHER; note = 2'-O-methyladenosine-3'-phosphate
  modified_base 13: mod_base = OTHER; note = 2'-O-methyluridine-3'-phosphate
  modified_base 14: mod_base = OTHER; note = 2'-fluorocytidine-3'-phosphate
  modified_base 15: mod_base = OTHER; note = 2'-O-methyladenosine-3'-phosphate
  modified_base 16: mod_base = OTHER; note = 2'-fluoroguanosine-3'-phosphate
  modified_base 17: mod_base = OTHER; note = 2'-O-methylguanosine-3'-phosphate
  modified_base 18: mod_base = OTHER; note = 2'-O-methylguanosine-3'-phosphate
  modified_base 19: mod_base = OTHER; note = 2'-O-methyladenosine-3'-phosphate
  modified_base 20: mod_base = OTHER; note = 2'-O-methylguanosine-3'-phosphate
  modified_base 21: mod_base = OTHER; note = 2'-O-methylcytidine-3'-phosphorothioate
  modified_base 22: mod_base = OTHER; note = 2'-O-methylcytidine-3'-phosphorothioate
  modified_base 23: mod_base = OTHER; note = 2'-O-methylguanosine-3'-phosphate
aagagctggacatcagggagccg

SEQ ID NO: 547 - RNA, 23 nt, synthetic construct
  source 1..23: mol_type = other RNA
  modified_base 1: mod_base = OTHER; note = 2'-O-methyladenosine-3'-phosphorothioate
  modified_base 2: mod_base = OTHER; note = 2'-fluoroadenosine-3'-phosphorothioate
  modified_base 3: mod_base = OTHER; note = 2'-O-methylguanosine-3'-phosphate
  modified_base 4: mod_base = OTHER; note = 2'-O-methylcytidine-3'-phosphate
  modified_base 5: mod_base = OTHER; note = 2'-O-methyladenosine-3'-phosphate
  modified_base 6: mod_base = OTHER; note = 2'-fluoroguanosine-3'-phosphate
  modified_base 7: mod_base = OTHER; note = 2'-O-methylcytidine-3'-phosphate
  modified_base 8: mod_base = OTHER; note = 2'-fluoroadenosine-3'-phosphate
  modified_base 9: mod_base = OTHER; note = 2'-fluorocytidine-3'-phosphate
  modified_base 10: mod_base = OTHER; note = 2'-O-methylcytidine-3'-phosphate
  modified_base 11: mod_base = OTHER; note = 2'-O-methyladenosine-3'-phosphate
  modified_base 12: mod_base = OTHER; note = 2'-O-methylguanosine-3'-phosphate
  modified_base 13: mod_base = OTHER; note = 2'-O-methylcytidine-3'-phosphate
  modified_base 14: mod_base = OTHER; note = 2'-fluorocytidine-3'-phosphate
  modified_base 15: mod_base = OTHER; note = 2'-O-methyladenosine-3'-phosphate
  modified_base 16: mod_base = OTHER; note = 2'-fluoroguanosine-3'-phosphate
  modified_base 17: mod_base = OTHER; note = 2'-O-methyladenosine-3'-phosphate
  modified_base 18: mod_base = OTHER; note = 2'-O-methylguanosine-3'-phosphate
  modified_base 19: mod_base = OTHER; note = 2'-O-methylcytidine-3'-phosphate
  modified_base 20: mod_base = OTHER; note = 2'-O-methyluridine-3'-phosphate
  modified_base 21: mod_base = OTHER; note = 2'-O-methylguanosine-3'-phosphorothioate
  modified_base 22: mod_base = OTHER; note = 2'-O-methylguanosine-3'-phosphorothioate
  modified_base 23: mod_base = OTHER; note = 2'-O-methyladenosine-3'-phosphate
aagcagcaccagccagagctgga

SEQ ID NO: 548 - RNA, 23 nt, synthetic construct
  source 1..23: mol_type = other RNA
  modified_base 1: mod_base = OTHER; note = 2'-O-methyladenosine-3'-phosphorothioate
  modified_base 2: mod_base = OTHER; note = 2'-fluorouridine -3'-phosphorothioate
  modified_base 3: mod_base = OTHER; note = 2'-O-methylguanosine-3'-phosphate
  modified_base 4: mod_base = OTHER; note = 2'-O-methyluridine-3'-phosphate
  modified_base 5: mod_base = OTHER; note = 2'-O-methylguanosine-3'-phosphate
  modified_base 6: mod_base = OTHER; note = 2'-fluorocytidine-3'-phosphate
  modified_base 7: mod_base = OTHER; note = 2'-O-methyluridine-3'-phosphate
  modified_base 8: mod_base = OTHER; note = 2'-fluorocytidine-3'-phosphate
  modified_base 9: mod_base = OTHER; note = 2'-fluoroguanosine-3'-phosphate
  modified_base 10: mod_base = OTHER; note = 2'-O-methylcytidine-3'-phosphate
  modified_base 11: mod_base = OTHER; note = 2'-O-methyladenosine-3'-phosphate
  modified_base 12: mod_base = OTHER; note = 2'-O-methylcytidine-3'-phosphate
  modified_base 13: mod_base = OTHER; note = 2'-O-methylcytidine-3'-phosphate
  modified_base 14: mod_base = OTHER; note = 2'-fluoroadenosine-3'-phosphate
  modified_base 15: mod_base = OTHER; note = 2'-O-methylguanosine-3'-phosphate
  modified_base 16: mod_base = OTHER; note = 2'-fluorouridine-3'-phosphate
  modified_base 17: mod_base = OTHER; note = 2'-O-methylguanosine-3'-phosphate
  modified_base 18: mod_base = OTHER; note = 2'-O-methylcytidine-3'-phosphate
  modified_base 19: mod_base = OTHER; note = 2'-O-methylcytidine-3'-phosphate
  modified_base 20: mod_base = OTHER; note = 2'-O-methylcytidine-3'-phosphate
  modified_base 21: mod_base = OTHER; note = 2'-O-methyladenosine-3'-phosphorothioate
  modified_base 22: mod_base = OTHER; note = 2'-O-methylcytidine-3'-phosphorothioate
  modified_base 23: mod_base = OTHER; note = 2'-O-methyladenosine-3'-phosphate
atgtgctcgcaccagtgcccaca

SEQ ID NO: 549 - RNA, 23 nt, synthetic construct
  source 1..23: mol_type = other RNA
  modified_base 1: mod_base = OTHER; note = 2'-O-methyladenosine-3'-phosphorothioate
  modified_base 2: mod_base = OTHER; note = 2'-fluoroadenosine-3'-phosphorothioate
  modified_base 3: mod_base = OTHER; note = 2'-O-methylguanosine-3'-phosphate
  modified_base 4: mod_base = OTHER; note = 2'-O-methylguanosine-3'-phosphate
  modified_base 5: mod_base = OTHER; note = 2'-O-methyladenosine-3'-phosphate
  modified_base 6: mod_base = OTHER; note = 2'-fluoroguanosine-3'-phosphate
  modified_base 7: mod_base = OTHER; note = 2'-O-methylguanosine-3'-phosphate
  modified_base 8: mod_base = OTHER; note = 2'-fluoroguanosine-3'-phosphate
  modified_base 9: mod_base = OTHER; note = 2'-fluoroadenosine-3'-phosphate
  modified_base 10: mod_base = OTHER; note = 2'-O-methylcytidine-3'-phosphate
  modified_base 11: mod_base = OTHER; note = 2'-O-methyladenosine-3'-phosphate
  modified_base 12: mod_base = OTHER; note = 2'-O-methylcytidine-3'-phosphate
  modified_base 13: mod_base = OTHER; note = 2'-O-methyladenosine-3'-phosphate
  modified_base 14: mod_base = OTHER; note = 2'-fluorocytidine-3'-phosphate
  modified_base 15: mod_base = OTHER; note = 2'-O-methyladenosine-3'-phosphate
  modified_base 16: mod_base = OTHER; note = 2'-fluoroguanosine-3'-phosphate
  modified_base 17: mod_base = OTHER; note = 2'-O-methyladenosine-3'-phosphate
  modified_base 18: mod_base = OTHER; note = 2'-O-methylcytidine-3'-phosphate
  modified_base 19: mod_base = OTHER; note = 2'-O-methylcytidine-3'-phosphate
  modified_base 20: mod_base = OTHER; note = 2'-O-methylcytidine-3'-phosphate
  modified_base 21: mod_base = OTHER; note = 2'-O-methyluridine-3'-phosphorothioate
  modified_base 22: mod_base = OTHER; note = 2'-O-methylguanosine-3'-phosphorothioate
  modified_base 23: mod_base = OTHER; note = 2'-O-methyluridine-3'-phosphate
aaggagggacacacagaccctgt

SEQ ID NO: 550 - RNA, 23 nt, synthetic construct
  source 1..23: mol_type = other RNA
  modified_base 1: mod_base = OTHER; note = 2'-O-methyladenosine-3'-phosphorothioate
  modified_base 2: mod_base = OTHER; note = 2'-fluoroadenosine-3'-phosphorothioate
  modified_base 3: mod_base = OTHER; note = 2'-O-methylcytidine-3'-phosphate
  modified_base 4: mod_base = OTHER; note = 2'-O-methylcytidine-3'-phosphate
  modified_base 5: mod_base = OTHER; note = 2'-O-methyladenosine-3'-phosphate
  modified_base 6: mod_base = OTHER; note = 2'-fluoroguanosine-3'-phosphate
  modified_base 7: mod_base = OTHER; note = 2'-O-methyladenosine-3'-phosphate
  modified_base 8: mod_base = OTHER; note = 2'-fluoroguanosine-3'-phosphate
  modified_base 9: mod_base = OTHER; note = 2'-fluorocytidine-3'-phosphate
  modified_base 10: mod_base = OTHER; note = 2'-O-methyluridine-3'-phosphate
  modified_base 11: mod_base = OTHER; note = 2'-O-methylcytidine-3'-phosphate
  modified_base 12: mod_base = OTHER; note = 2'-O-methylguanosine-3'-phosphate
  modified_base 13: mod_base = OTHER; note = 2'-O-methyluridine-3'-phosphate
  modified_base 14: mod_base = OTHER; note = 2'-fluorouridine-3'-phosphate
  modified_base 15: mod_base = OTHER; note = 2'-O-methylcytidine-3'-phosphate
  modified_base 16: mod_base = OTHER; note = 2'-fluorouridine-3'-phosphate
  modified_base 17: mod_base = OTHER; note = 2'-O-methylguanosine-3'-phosphate
  modified_base 18: mod_base = OTHER; note = 2'-O-methylcytidine-3'-phosphate
  modified_base 19: mod_base = OTHER; note = 2'-O-methyluridine-3'-phosphate
  modified_base 20: mod_base = OTHER; note = 2'-O-methyluridine-3'-phosphate
  modified_base 21: mod_base = OTHER; note = 2'-O-methylguanosine-3'-phosphorothioate
  modified_base 22: mod_base = OTHER; note = 2'-O-methylguanosine-3'-phosphorothioate
  modified_base 23: mod_base = OTHER; note = 2'-O-methylguanosine-3'-phosphate
aaccagagctcgttctgcttggg

SEQ ID NO: 551 - RNA, 23 nt, synthetic construct
  source 1..23: mol_type = other RNA
  modified_base 1: mod_base = OTHER; note = 2'-O-methyladenosine-3'-phosphorothioate
  modified_base 2: mod_base = OTHER; note = 2'-fluorouridine -3'-phosphorothioate
  modified_base 3: mod_base = OTHER; note = 2'-O-methyluridine-3'-phosphate
  modified_base 4: mod_base = OTHER; note = 2'-O-methylguanosine-3'-phosphate
  modified_base 5: mod_base = OTHER; note = 2'-O-methylguanosine-3'-phosphate
  modified_base 6: mod_base = OTHER; note = 2'-fluorocytidine-3'-phosphate
  modified_base 7: mod_base = OTHER; note = 2'-O-methyluridine-3'-phosphate
  modified_base 8: mod_base = OTHER; note = 2'-fluoroadenosine-3'-phosphate
  modified_base 9: mod_base = OTHER; note = 2'-fluoroguanosine-3'-phosphate
  modified_base 10: mod_base = OTHER; note = 2'-O-methylcytidine-3'-phosphate
  modified_base 11: mod_base = OTHER; note = 2'-O-methyluridine-3'-phosphate
  modified_base 12: mod_base = OTHER; note = 2'-O-methylcytidine-3'-phosphate
  modified_base 13: mod_base = OTHER; note = 2'-O-methylcytidine-3'-phosphate
  modified_base 14: mod_base = OTHER; note = 2'-fluoroadenosine-3'-phosphate
  modified_base 15: mod_base = OTHER; note = 2'-O-methylguanosine-3'-phosphate
  modified_base 16: mod_base = OTHER; note = 2'-fluorocytidine-3'-phosphate
  modified_base 17: mod_base = OTHER; note = 2'-O-methyladenosine-3'-phosphate
  modified_base 18: mod_base = OTHER; note = 2'-O-methylcytidine-3'-phosphate
  modified_base 19: mod_base = OTHER; note = 2'-O-methylcytidine-3'-phosphate
  modified_base 20: mod_base = OTHER; note = 2'-O-methyladenosine-3'-phosphate
  modified_base 21: mod_base = OTHER; note = 2'-O-methylguanosine-3'-phosphorothioate
  modified_base 22: mod_base = OTHER; note = 2'-O-methyladenosine-3'-phosphorothioate
  modified_base 23: mod_base = OTHER; note = 2'-O-methylguanosine-3'-phosphate
attggctagctccagcaccagag

SEQ ID NO: 552 - RNA, 23 nt, synthetic construct
  source 1..23: mol_type = other RNA
  modified_base 1: mod_base = OTHER; note = 2'-O-methyladenosine-3'-phosphorothioate
  modified_base 2: mod_base = OTHER; note = 2'-fluoroadenosine-3'-phosphorothioate
  modified_base 3: mod_base = OTHER; note = 2'-O-methylguanosine-3'-phosphate
  modified_base 4: mod_base = OTHER; note = 2'-O-methylguanosine-3'-phosphate
  modified_base 5: mod_base = OTHER; note = 2'-O-methyladenosine-3'-phosphate
  modified_base 6: mod_base = OTHER; note = 2'-fluorouridine-3'-phosphate
  modified_base 7: mod_base = OTHER; note = 2'-O-methyluridine-3'-phosphate
  modified_base 8: mod_base = OTHER; note = 2'-fluorouridine-3'-phosphate
  modified_base 9: mod_base = OTHER; note = 2'-fluoroguanosine-3'-phosphate
  modified_base 10: mod_base = OTHER; note = 2'-O-methylcytidine-3'-phosphate
  modified_base 11: mod_base = OTHER; note = 2'-O-methyluridine-3'-phosphate
  modified_base 12: mod_base = OTHER; note = 2'-O-methylguanosine-3'-phosphate
  modified_base 13: mod_base = OTHER; note = 2'-O-methylcytidine-3'-phosphate
  modified_base 14: mod_base = OTHER; note = 2'-fluorouridine-3'-phosphate
  modified_base 15: mod_base = OTHER; note = 2'-O-methyluridine-3'-phosphate
  modified_base 16: mod_base = OTHER; note = 2'-fluoroguanosine-3'-phosphate
  modified_base 17: mod_base = OTHER; note = 2'-O-methylguanosine-3'-phosphate
  modified_base 18: mod_base = OTHER; note = 2'-O-methylcytidine-3'-phosphate
  modified_base 19: mod_base = OTHER; note = 2'-O-methyluridine-3'-phosphate
  modified_base 20: mod_base = OTHER; note = 2'-O-methyladenosine-3'-phosphate
  modified_base 21: mod_base = OTHER; note = 2'-O-methylguanosine-3'-phosphorothioate
  modified_base 22: mod_base = OTHER; note = 2'-O-methylcytidine-3'-phosphorothioate
  modified_base 23: mod_base = OTHER; note = 2'-O-methyluridine-3'-phosphate
aaggatttgctgcttggctagct

SEQ ID NO: 553 - RNA, 23 nt, synthetic construct
  source 1..23: mol_type = other RNA
  modified_base 1: mod_base = OTHER; note = 2'-O-methyladenosine-3'-phosphorothioate
  modified_base 2: mod_base = OTHER; note = 2'-fluoroadenosine-3'-phosphorothioate
  modified_base 3: mod_base = OTHER; note = 2'-O-methylguanosine-3'-phosphate
  modified_base 4: mod_base = OTHER; note = 2'-O-methylguanosine-3'-phosphate
  modified_base 5: mod_base = OTHER; note = 2'-O-methyluridine-3'-phosphate
  modified_base 6: mod_base = OTHER; note = 2'-fluoroguanosine-3'-phosphate
  modified_base 7: mod_base = OTHER; note = 2'-O-methylcytidine-3'-phosphate
  modified_base 8: mod_base = OTHER; note = 2'-fluoroadenosine-3'-phosphate
  modified_base 9: mod_base = OTHER; note = 2'-fluoroadenosine-3'-phosphate
  modified_base 10: mod_base = OTHER; note = 2'-O-methylcytidine-3'-phosphate
  modified_base 11: mod_base = OTHER; note = 2'-O-methylcytidine-3'-phosphate
  modified_base 12: mod_base = OTHER; note = 2'-O-methylcytidine-3'-phosphate
  modified_base 13: mod_base = OTHER; note = 2'-O-methyladenosine-3'-phosphate
  modified_base 14: mod_base = OTHER; note = 2'-fluorouridine-3'-phosphate
  modified_base 15: mod_base = OTHER; note = 2'-O-methylcytidine-3'-phosphate
  modified_base 16: mod_base = OTHER; note = 2'-fluorocytidine-3'-phosphate
  modified_base 17: mod_base = OTHER; note = 2'-O-methyladenosine-3'-phosphate
  modified_base 18: mod_base = OTHER; note = 2'-O-methylguanosine-3'-phosphate
  modified_base 19: mod_base = OTHER; note = 2'-O-methylguanosine-3'-phosphate
  modified_base 20: mod_base = OTHER; note = 2'-O-methyladenosine-3'-phosphate
  modified_base 21: mod_base = OTHER; note = 2'-O-methyluridine-3'-phosphorothioate
  modified_base 22: mod_base = OTHER; note = 2'-O-methyluridine-3'-phosphorothioate
  modified_base 23: mod_base = OTHER; note = 2'-O-methyluridine-3'-phosphate
aaggtgcaacccatccaggattt

SEQ ID NO: 554 - RNA, 23 nt, synthetic construct
  source 1..23: mol_type = other RNA
  modified_base 1: mod_base = OTHER; note = 2'-O-methyladenosine-3'-phosphorothioate
  modified_base 2: mod_base = OTHER; note = 2'-fluoroguanosine-3'-phosphorothioate
  modified_base 3: mod_base = OTHER; note = 2'-O-methylguanosine-3'-phosphate
  modified_base 4: mod_base = OTHER; note = 2'-O-methyladenosine-3'-phosphate
  modified_base 5: mod_base = OTHER; note = 2'-O-methylcytidine-3'-phosphate
  modified_base 6: mod_base = OTHER; note = 2'-fluoroguanosine-3'-phosphate
  modified_base 7: mod_base = OTHER; note = 2'-O-methyladenosine-3'-phosphate
  modified_base 8: mod_base = OTHER; note = 2'-fluorocytidine-3'-phosphate
  modified_base 9: mod_base = OTHER; note = 2'-fluorouridine-3'-phosphate
  modified_base 10: mod_base = OTHER; note = 2'-O-methylguanosine-3'-phosphate
  modified_base 11: mod_base = OTHER; note = 2'-O-methylguanosine-3'-phosphate
  modified_base 12: mod_base = OTHER; note = 2'-O-methyluridine-3'-phosphate
  modified_base 13: mod_base = OTHER; note = 2'-O-methylcytidine-3'-phosphate
  modified_base 14: mod_base = OTHER; note = 2'-fluoroadenosine-3'-phosphate
  modified_base 15: mod_base = OTHER; note = 2'-O-methylguanosine-3'-phosphate
  modified_base 16: mod_base = OTHER; note = 2'-fluoroguanosine-3'-phosphate
  modified_base 17: mod_base = OTHER; note = 2'-O-methyluridine-3'-phosphate
  modified_base 18: mod_base = OTHER; note = 2'-O-methylguanosine-3'-phosphate
  modified_base 19: mod_base = OTHER; note = 2'-O-methylcytidine-3'-phosphate
  modified_base 20: mod_base = OTHER; note = 2'-O-methyladenosine-3'-phosphate
  modified_base 21: mod_base = OTHER; note = 2'-O-methyladenosine-3'-phosphorothioate
  modified_base 22: mod_base = OTHER; note = 2'-O-methylcytidine-3'-phosphorothioate
  modified_base 23: mod_base = OTHER; note = 2'-O-methylcytidine-3'-phosphate
aggacgactggtcaggtgcaacc

SEQ ID NO: 555 - RNA, 23 nt, synthetic construct
  source 1..23: mol_type = other RNA
  modified_base 1: mod_base = OTHER; note = 2'-O-methyladenosine-3'-phosphorothioate
  modified_base 2: mod_base = OTHER; note = 2'-fluoroguanosine-3'-phosphorothioate
  modified_base 3: mod_base = OTHER; note = 2'-O-methyladenosine-3'-phosphate
  modified_base 4: mod_base = OTHER; note = 2'-O-methyluridine-3'-phosphate
  modified_base 5: mod_base = OTHER; note = 2'-O-methylguanosine-3'-phosphate
  modified_base 6: mod_base = OTHER; note = 2'-fluoroadenosine-3'-phosphate
  modified_base 7: mod_base = OTHER; note = 2'-O-methylguanosine-3'-phosphate
  modified_base 8: mod_base = OTHER; note = 2'-fluorouridine-3'-phosphate
  modified_base 9: mod_base = OTHER; note = 2'-fluorouridine-3'-phosphate
  modified_base 10: mod_base = OTHER; note = 2'-O-methyladenosine-3'-phosphate
  modified_base 11: mod_base = OTHER; note = 2'-O-methyluridine-3'-phosphate
  modified_base 12: mod_base = OTHER; note = 2'-O-methyluridine-3'-phosphate
  modified_base 13: mod_base = OTHER; note = 2'-O-methylcytidine-3'-phosphate
  modified_base 14: mod_base = OTHER; note = 2'-fluorouridine-3'-phosphate
  modified_base 15: mod_base = OTHER; note = 2'-O-methylguanosine-3'-phosphate
  modified_base 16: mod_base = OTHER; note = 2'-fluoroguanosine-3'-phosphate
  modified_base 17: mod_base = OTHER; note = 2'-O-methylguanosine-3'-phosphate
  modified_base 18: mod_base = OTHER; note = 2'-O-methyladenosine-3'-phosphate
  modified_base 19: mod_base = OTHER; note = 2'-O-methylcytidine-3'-phosphate
  modified_base 20: mod_base = OTHER; note = 2'-O-methylguanosine-3'-phosphate
  modified_base 21: mod_base = OTHER; note = 2'-O-methyladenosine-3'-phosphorothioate
  modified_base 22: mod_base = OTHER; note = 2'-O-methylcytidine-3'-phosphorothioate
  modified_base 23: mod_base = OTHER; note = 2'-O-methyluridine-3'-phosphate
agatgagttattctgggacgact

SEQ ID NO: 556 - RNA, 23 nt, synthetic construct
  source 1..23: mol_type = other RNA
  modified_base 1: mod_base = OTHER; note = 2'-O-methyladenosine-3'-phosphorothioate
  modified_base 2: mod_base = OTHER; note = 2'-fluorouridine -3'-phosphorothioate
  modified_base 3: mod_base = OTHER; note = 2'-O-methylguanosine-3'-phosphate
  modified_base 4: mod_base = OTHER; note = 2'-O-methylguanosine-3'-phosphate
  modified_base 5: mod_base = OTHER; note = 2'-O-methylcytidine-3'-phosphate
  modified_base 6: mod_base = OTHER; note = 2'-fluorouridine-3'-phosphate
  modified_base 7: mod_base = OTHER; note = 2'-O-methylguanosine-3'-phosphate
  modified_base 8: mod_base = OTHER; note = 2'-fluorouridine-3'-phosphate
  modified_base 9: mod_base = OTHER; note = 2'-fluoroadenosine-3'-phosphate
  modified_base 10: mod_base = OTHER; note = 2'-O-methylguanosine-3'-phosphate
  modified_base 11: mod_base = OTHER; note = 2'-O-methyluridine-3'-phosphate
  modified_base 12: mod_base = OTHER; note = 2'-O-methylcytidine-3'-phosphate
  modified_base 13: mod_base = OTHER; note = 2'-O-methyluridine-3'-phosphate
  modified_base 14: mod_base = OTHER; note = 2'-fluorocytidine-3'-phosphate
  modified_base 15: mod_base = OTHER; note = 2'-O-methylcytidine-3'-phosphate
  modified_base 16: mod_base = OTHER; note = 2'-fluoroguanosine-3'-phosphate
  modified_base 17: mod_base = OTHER; note = 2'-O-methylguanosine-3'-phosphate
  modified_base 18: mod_base = OTHER; note = 2'-O-methyladenosine-3'-phosphate
  modified_base 19: mod_base = OTHER; note = 2'-O-methylguanosine-3'-phosphate
  modified_base 20: mod_base = OTHER; note = 2'-O-methylguanosine-3'-phosphate
  modified_base 21: mod_base = OTHER; note = 2'-O-methylguanosine-3'-phosphorothioate
  modified_base 22: mod_base = OTHER; note = 2'-O-methylcytidine-3'-phosphorothioate
  modified_base 23: mod_base = OTHER; note = 2'-O-methyluridine-3'-phosphate
atggctgtagtctccggagggct

SEQ ID NO: 557 - RNA, 23 nt, synthetic construct
  source 1..23: mol_type = other RNA
  modified_base 1: mod_base = OTHER; note = 2'-O-methyladenosine-3'-phosphorothioate
  modified_base 2: mod_base = OTHER; note = 2'-fluoroadenosine-3'-phosphorothioate
  modified_base 3: mod_base = OTHER; note = 2'-O-methylguanosine-3'-phosphate
  modified_base 4: mod_base = OTHER; note = 2'-O-methylcytidine-3'-phosphate
  modified_base 5: mod_base = OTHER; note = 2'-O-methylcytidine-3'-phosphate
  modified_base 6: mod_base = OTHER; note = 2'-fluoroadenosine-3'-phosphate
  modified_base 7: mod_base = OTHER; note = 2'-O-methylcytidine-3'-phosphate
  modified_base 8: mod_base = OTHER; note = 2'-fluoroadenosine-3'-phosphate
  modified_base 9: mod_base = OTHER; note = 2'-fluorocytidine-3'-phosphate
  modified_base 10: mod_base = OTHER; note = 2'-O-methyluridine-3'-phosphate
  modified_base 11: mod_base = OTHER; note = 2'-O-methylcytidine-3'-phosphate
  modified_base 12: mod_base = OTHER; note = 2'-O-methylcytidine-3'-phosphate
  modified_base 13: mod_base = OTHER; note = 2'-O-methylcytidine-3'-phosphate
  modified_base 14: mod_base = OTHER; note = 2'-fluorouridine-3'-phosphate
  modified_base 15: mod_base = OTHER; note = 2'-O-methylguanosine-3'-phosphate
  modified_base 16: mod_base = OTHER; note = 2'-fluoroguanosine-3'-phosphate
  modified_base 17: mod_base = OTHER; note = 2'-O-methylcytidine-3'-phosphate
  modified_base 18: mod_base = OTHER; note = 2'-O-methyluridine-3'-phosphate
  modified_base 19: mod_base = OTHER; note = 2'-O-methylguanosine-3'-phosphate
  modified_base 20: mod_base = OTHER; note = 2'-O-methyluridine-3'-phosphate
  modified_base 21: mod_base = OTHER; note = 2'-O-methyladenosine-3'-phosphorothioate
  modified_base 22: mod_base = OTHER; note = 2'-O-methylguanosine-3'-phosphorothioate
  modified_base 23: mod_base = OTHER; note = 2'-O-methyluridine-3'-phosphate
aagccacactccctggctgtagt

SEQ ID NO: 558 - RNA, 23 nt, synthetic construct
  source 1..23: mol_type = other RNA
  modified_base 1: mod_base = OTHER; note = 2'-O-methyladenosine-3'-phosphorothioate
  modified_base 2: mod_base = OTHER; note = 2'-fluorocytidine-3'-phosphorothioate
  modified_base 3: mod_base = OTHER; note = 2'-O-methylcytidine-3'-phosphate
  modified_base 4: mod_base = OTHER; note = 2'-O-methyladenosine-3'-phosphate
  modified_base 5: mod_base = OTHER; note = 2'-O-methyluridine-3'-phosphate
  modified_base 6: mod_base = OTHER; note = 2'-fluorouridine-3'-phosphate
  modified_base 7: mod_base = OTHER; note = 2'-O-methylcytidine-3'-phosphate
  modified_base 8: mod_base = OTHER; note = 2'-fluorocytidine-3'-phosphate
  modified_base 9: mod_base = OTHER; note = 2'-fluorocytidine-3'-phosphate
  modified_base 10: mod_base = OTHER; note = 2'-O-methyluridine-3'-phosphate
  modified_base 11: mod_base = OTHER; note = 2'-O-methylguanosine-3'-phosphate
  modified_base 12: mod_base = OTHER; note = 2'-O-methylguanosine-3'-phosphate
  modified_base 13: mod_base = OTHER; note = 2'-O-methyladenosine-3'-phosphate
  modified_base 14: mod_base = OTHER; note = 2'-fluoroguanosine-3'-phosphate
  modified_base 15: mod_base = OTHER; note = 2'-O-methylcytidine-3'-phosphate
  modified_base 16: mod_base = OTHER; note = 2'-fluorocytidine-3'-phosphate
  modified_base 17: mod_base = OTHER; note = 2'-O-methyladenosine-3'-phosphate
  modified_base 18: mod_base = OTHER; note = 2'-O-methylcytidine-3'-phosphate
  modified_base 19: mod_base = OTHER; note = 2'-O-methyladenosine-3'-phosphate
  modified_base 20: mod_base = OTHER; note = 2'-O-methylcytidine-3'-phosphate
  modified_base 21: mod_base = OTHER; note = 2'-O-methyluridine-3'-phosphorothioate
  modified_base 22: mod_base = OTHER; note = 2'-O-methylcytidine-3'-phosphorothioate
  modified_base 23: mod_base = OTHER; note = 2'-O-methylcytidine-3'-phosphate
accattccctggagccacactcc

SEQ ID NO: 559 - RNA, 23 nt, synthetic construct
  source 1..23: mol_type = other RNA
  modified_base 1: mod_base = OTHER; note = 2'-O-methyladenosine-3'-phosphorothioate
  modified_base 2: mod_base = OTHER; note = 2'-fluorouridine -3'-phosphorothioate
  modified_base 3: mod_base = OTHER; note = 2'-O-methylguanosine-3'-phosphate
  modified_base 4: mod_base = OTHER; note = 2'-O-methyladenosine-3'-phosphate
  modified_base 5: mod_base = OTHER; note = 2'-O-methylcytidine-3'-phosphate
  modified_base 6: mod_base = OTHER; note = 2'-fluoroadenosine-3'-phosphate
  modified_base 7: mod_base = OTHER; note = 2'-O-methylguanosine-3'-phosphate
  modified_base 8: mod_base = OTHER; note = 2'-fluorouridine-3'-phosphate
  modified_base 9: mod_base = OTHER; note = 2'-fluoroadenosine-3'-phosphate
  modified_base 10: mod_base = OTHER; note = 2'-O-methylguanosine-3'-phosphate
  modified_base 11: mod_base = OTHER; note = 2'-O-methylcytidine-3'-phosphate
  modified_base 12: mod_base = OTHER; note = 2'-O-methyladenosine-3'-phosphate
  modified_base 13: mod_base = OTHER; note = 2'-O-methyladenosine-3'-phosphate
  modified_base 14: mod_base = OTHER; note = 2'-fluoroadenosine-3'-phosphate
  modified_base 15: mod_base = OTHER; note = 2'-O-methylguanosine-3'-phosphate
  modified_base 16: mod_base = OTHER; note = 2'-fluorocytidine-3'-phosphate
  modified_base 17: mod_base = OTHER; note = 2'-O-methyluridine-3'-phosphate
  modified_base 18: mod_base = OTHER; note = 2'-O-methylguanosine-3'-phosphate
  modified_base 19: mod_base = OTHER; note = 2'-O-methyladenosine-3'-phosphate
  modified_base 20: mod_base = OTHER; note = 2'-O-methyluridine-3'-phosphate
  modified_base 21: mod_base = OTHER; note = 2'-O-methylguanosine-3'-phosphorothioate
  modified_base 22: mod_base = OTHER; note = 2'-O-methyladenosine-3'-phosphorothioate
  modified_base 23: mod_base = OTHER; note = 2'-O-methylcytidine-3'-phosphate
atgacagtagcaaagctgatgac

SEQ ID NO: 560 - RNA, 23 nt, synthetic construct
  source 1..23: mol_type = other RNA
  modified_base 1: mod_base = OTHER; note = 2'-O-methyladenosine-3'-phosphorothioate
  modified_base 2: mod_base = OTHER; note = 2'-fluorouridine -3'-phosphorothioate
  modified_base 3: mod_base = OTHER; note = 2'-O-methylguanosine-3'-phosphate
  modified_base 4: mod_base = OTHER; note = 2'-O-methyladenosine-3'-phosphate
  modified_base 5: mod_base = OTHER; note = 2'-O-methyladenosine-3'-phosphate
  modified_base 6: mod_base = OTHER; note = 2'-fluoroguanosine-3'-phosphate
  modified_base 7: mod_base = OTHER; note = 2'-O-methyluridine-3'-phosphate
  modified_base 8: mod_base = OTHER; note = 2'-fluoroguanosine-3'-phosphate
  modified_base 9: mod_base = OTHER; note = 2'-fluoroguanosine-3'-phosphate
  modified_base 10: mod_base = OTHER; note = 2'-O-methyladenosine-3'-phosphate
  modified_base 11: mod_base = OTHER; note = 2'-O-methylguanosine-3'-phosphate
  modified_base 12: mod_base = OTHER; note = 2'-O-methyluridine-3'-phosphate
  modified_base 13: mod_base = OTHER; note = 2'-O-methylcytidine-3'-phosphate
  modified_base 14: mod_base = OTHER; note = 2'-fluorouridine-3'-phosphate
  modified_base 15: mod_base = OTHER; note = 2'-O-methylguanosine-3'-phosphate
  modified_base 16: mod_base = OTHER; note = 2'-fluorouridine-3'-phosphate
  modified_base 17: mod_base = OTHER; note = 2'-O-methylguanosine-3'-phosphate
  modified_base 18: mod_base = OTHER; note = 2'-O-methyladenosine-3'-phosphate
  modified_base 19: mod_base = OTHER; note = 2'-O-methylcytidine-3'-phosphate
  modified_base 20: mod_base = OTHER; note = 2'-O-methyladenosine-3'-phosphate
  modified_base 21: mod_base = OTHER; note = 2'-O-methylguanosine-3'-phosphorothioate
  modified_base 22: mod_base = OTHER; note = 2'-O-methyluridine-3'-phosphorothioate
  modified_base 23: mod_base = OTHER; note = 2'-O-methyladenosine-3'-phosphate
atgaagtggagtctgtgacagta

SEQ ID NO: 561 - RNA, 23 nt, synthetic construct
  source 1..23: mol_type = other RNA
  modified_base 1: mod_base = OTHER; note = 2'-O-methyladenosine-3'-phosphorothioate
  modified_base 2: mod_base = OTHER; note = 2'-fluoroguanosine-3'-phosphorothioate
  modified_base 3: mod_base = OTHER; note = 2'-O-methyladenosine-3'-phosphate
  modified_base 4: mod_base = OTHER; note = 2'-O-methylguanosine-3'-phosphate
  modified_base 5: mod_base = OTHER; note = 2'-O-methylcytidine-3'-phosphate
  modified_base 6: mod_base = OTHER; note = 2'-fluorouridine-3'-phosphate
  modified_base 7: mod_base = OTHER; note = 2'-O-methylguanosine-3'-phosphate
  modified_base 8: mod_base = OTHER; note = 2'-fluorouridine-3'-phosphate
  modified_base 9: mod_base = OTHER; note = 2'-fluoroadenosine-3'-phosphate
  modified_base 10: mod_base = OTHER; note = 2'-O-methylguanosine-3'-phosphate
  modified_base 11: mod_base = OTHER; note = 2'-O-methylguanosine-3'-phosphate
  modified_base 12: mod_base = OTHER; note = 2'-O-methylcytidine-3'-phosphate
  modified_base 13: mod_base = OTHER; note = 2'-O-methyluridine-3'-phosphate
  modified_base 14: mod_base = OTHER; note = 2'-fluoroguanosine-3'-phosphate
  modified_base 15: mod_base = OTHER; note = 2'-O-methyladenosine-3'-phosphate
  modified_base 16: mod_base = OTHER; note = 2'-fluoroadenosine-3'-phosphate
  modified_base 17: mod_base = OTHER; note = 2'-O-methylguanosine-3'-phosphate
  modified_base 18: mod_base = OTHER; note = 2'-O-methyluridine-3'-phosphate
  modified_base 19: mod_base = OTHER; note = 2'-O-methylguanosine-3'-phosphate
  modified_base 20: mod_base = OTHER; note = 2'-O-methylguanosine-3'-phosphate
  modified_base 21: mod_base = OTHER; note = 2'-O-methyladenosine-3'-phosphorothioate
  modified_base 22: mod_base = OTHER; note = 2'-O-methylguanosine-3'-phosphorothioate
  modified_base 23: mod_base = OTHER; note = 2'-O-methyluridine-3'-phosphate
agagctgtaggctgaagtggagt

SEQ ID NO: 562 - RNA, 23 nt, synthetic construct
  source 1..23: mol_type = other RNA
  modified_base 1: mod_base = OTHER; note = 2'-O-methyladenosine-3'-phosphorothioate
  modified_base 2: mod_base = OTHER; note = 2'-fluoroadenosine-3'-phosphorothioate
  modified_base 3: mod_base = OTHER; note = 2'-O-methylcytidine-3'-phosphate
  modified_base 4: mod_base = OTHER; note = 2'-O-methyladenosine-3'-phosphate
  modified_base 5: mod_base = OTHER; note = 2'-O-methylguanosine-3'-phosphate
  modified_base 6: mod_base = OTHER; note = 2'-fluoroguanosine-3'-phosphate
  modified_base 7: mod_base = OTHER; note = 2'-O-methyluridine-3'-phosphate
  modified_base 8: mod_base = OTHER; note = 2'-fluoroguanosine-3'-phosphate
  modified_base 9: mod_base = OTHER; note = 2'-fluoroadenosine-3'-phosphate
  modified_base 10: mod_base = OTHER; note = 2'-O-methyladenosine-3'-phosphate
  modified_base 11: mod_base = OTHER; note = 2'-O-methyladenosine-3'-phosphate
  modified_base 12: mod_base = OTHER; note = 2'-O-methyladenosine-3'-phosphate
  modified_base 13: mod_base = OTHER; note = 2'-O-methylguanosine-3'-phosphate
  modified_base 14: mod_base = OTHER; note = 2'-fluorouridine-3'-phosphate
  modified_base 15: mod_base = OTHER; note = 2'-O-methylguanosine-3'-phosphate
  modified_base 16: mod_base = OTHER; note = 2'-fluoroadenosine-3'-phosphate
  modified_base 17: mod_base = OTHER; note = 2'-O-methylguanosine-3'-phosphate
  modified_base 18: mod_base = OTHER; note = 2'-O-methylcytidine-3'-phosphate
  modified_base 19: mod_base = OTHER; note = 2'-O-methyladenosine-3'-phosphate
  modified_base 20: mod_base = OTHER; note = 2'-O-methylguanosine-3'-phosphate
  modified_base 21: mod_base = OTHER; note = 2'-O-methylguanosine-3'-phosphorothioate
  modified_base 22: mod_base = OTHER; note = 2'-O-methylguanosine-3'-phosphorothioate
  modified_base 23: mod_base = OTHER; note = 2'-O-methyladenosine-3'-phosphate
aacaggtgaaaagtgagcaggga

SEQ ID NO: 563 - RNA, 23 nt, synthetic construct
  source 1..23: mol_type = other RNA
  modified_base 1: mod_base = OTHER; note = 2'-O-methyladenosine-3'-phosphorothioate
  modified_base 2: mod_base = OTHER; note = 2'-fluoroadenosine-3'-phosphorothioate
  modified_base 3: mod_base = OTHER; note = 2'-O-methylcytidine-3'-phosphate
  modified_base 4: mod_base = OTHER; note = 2'-O-methylcytidine-3'-phosphate
  modified_base 5: mod_base = OTHER; note = 2'-O-methylguanosine-3'-phosphate
  modified_base 6: mod_base = OTHER; note = 2'-fluoroadenosine-3'-phosphate
  modified_base 7: mod_base = OTHER; note = 2'-O-methylguanosine-3'-phosphate
  modified_base 8: mod_base = OTHER; note = 2'-fluoroguanosine-3'-phosphate
  modified_base 9: mod_base = OTHER; note = 2'-fluoroadenosine-3'-phosphate
  modified_base 10: mod_base = OTHER; note = 2'-O-methylguanosine-3'-phosphate
  modified_base 11: mod_base = OTHER; note = 2'-O-methyluridine-3'-phosphate
  modified_base 12: mod_base = OTHER; note = 2'-O-methylguanosine-3'-phosphate
  modified_base 13: mod_base = OTHER; note = 2'-O-methylguanosine-3'-phosphate
  modified_base 14: mod_base = OTHER; note = 2'-fluoroadenosine-3'-phosphate
  modified_base 15: mod_base = OTHER; note = 2'-O-methylcytidine-3'-phosphate
  modified_base 16: mod_base = OTHER; note = 2'-fluoroadenosine-3'-phosphate
  modified_base 17: mod_base = OTHER; note = 2'-O-methylguanosine-3'-phosphate
  modified_base 18: mod_base = OTHER; note = 2'-O-methylguanosine-3'-phosphate
  modified_base 19: mod_base = OTHER; note = 2'-O-methyluridine-3'-phosphate
  modified_base 20: mod_base = OTHER; note = 2'-O-methylguanosine-3'-phosphate
  modified_base 21: mod_base = OTHER; note = 2'-O-methyladenosine-3'-phosphorothioate
  modified_base 22: mod_base = OTHER; note = 2'-O-methyladenosine-3'-phosphorothioate
  modified_base 23: mod_base = OTHER; note = 2'-O-methyladenosine-3'-phosphate
aaccgaggagtggacaggtgaaa

SEQ ID NO: 564 - RNA, 23 nt, synthetic construct
  source 1..23: mol_type = other RNA
  modified_base 1: mod_base = OTHER; note = 2'-O-methyladenosine-3'-phosphorothioate
  modified_base 2: mod_base = OTHER; note = 2'-fluoroguanosine-3'-phosphorothioate
  modified_base 3: mod_base = OTHER; note = 2'-O-methylcytidine-3'-phosphate
  modified_base 4: mod_base = OTHER; note = 2'-O-methyladenosine-3'-phosphate
  modified_base 5: mod_base = OTHER; note = 2'-O-methyluridine-3'-phosphate
  modified_base 6: mod_base = OTHER; note = 2'-fluoroguanosine-3'-phosphate
  modified_base 7: mod_base = OTHER; note = 2'-O-methylguanosine-3'-phosphate
  modified_base 8: mod_base = OTHER; note = 2'-fluorouridine-3'-phosphate
  modified_base 9: mod_base = OTHER; note = 2'-fluoroadenosine-3'-phosphate
  modified_base 10: mod_base = OTHER; note = 2'-O-methylcytidine-3'-phosphate
  modified_base 11: mod_base = OTHER; note = 2'-O-methyladenosine-3'-phosphate
  modified_base 12: mod_base = OTHER; note = 2'-O-methylguanosine-3'-phosphate
  modified_base 13: mod_base = OTHER; note = 2'-O-methylguanosine-3'-phosphate
  modified_base 14: mod_base = OTHER; note = 2'-fluorouridine-3'-phosphate
  modified_base 15: mod_base = OTHER; note = 2'-O-methylguanosine-3'-phosphate
  modified_base 16: mod_base = OTHER; note = 2'-fluoroguanosine-3'-phosphate
  modified_base 17: mod_base = OTHER; note = 2'-O-methyluridine-3'-phosphate
  modified_base 18: mod_base = OTHER; note = 2'-O-methylguanosine-3'-phosphate
  modified_base 19: mod_base = OTHER; note = 2'-O-methylguanosine-3'-phosphate
  modified_base 20: mod_base = OTHER; note = 2'-O-methylguanosine-3'-phosphate
  modified_base 21: mod_base = OTHER; note = 2'-O-methyladenosine-3'-phosphorothioate
  modified_base 22: mod_base = OTHER; note = 2'-O-methylcytidine-3'-phosphorothioate
  modified_base 23: mod_base = OTHER; note = 2'-O-methylcytidine-3'-phosphate
agcatggtacaggtggtgggacc

SEQ ID NO: 565 - RNA, 23 nt, synthetic construct
  source 1..23: mol_type = other RNA
  modified_base 1: mod_base = OTHER; note = 2'-O-methyladenosine-3'-phosphorothioate
  modified_base 2: mod_base = OTHER; note = 2'-fluoroadenosine-3'-phosphorothioate
  modified_base 3: mod_base = OTHER; note = 2'-O-methylguanosine-3'-phosphate
  modified_base 4: mod_base = OTHER; note = 2'-O-methylcytidine-3'-phosphate
  modified_base 5: mod_base = OTHER; note = 2'-O-methylcytidine-3'-phosphate
  modified_base 6: mod_base = OTHER; note = 2'-fluoroadenosine-3'-phosphate
  modified_base 7: mod_base = OTHER; note = 2'-O-methylcytidine-3'-phosphate
  modified_base 8: mod_base = OTHER; note = 2'-fluoroadenosine-3'-phosphate
  modified_base 9: mod_base = OTHER; note = 2'-fluoroguanosine-3'-phosphate
  modified_base 10: mod_base = OTHER; note = 2'-O-methylguanosine-3'-phosphate
  modified_base 11: mod_base = OTHER; note = 2'-O-methylcytidine-3'-phosphate
  modified_base 12: mod_base = OTHER; note = 2'-O-methylguanosine-3'-phosphate
  modified_base 13: mod_base = OTHER; note = 2'-O-methylguanosine-3'-phosphate
  modified_base 14: mod_base = OTHER; note = 2'-fluoroguanosine-3'-phosphate
  modified_base 15: mod_base = OTHER; note = 2'-O-methylcytidine-3'-phosphate
  modified_base 16: mod_base = OTHER; note = 2'-fluoroadenosine-3'-phosphate
  modified_base 17: mod_base = OTHER; note = 2'-O-methyluridine-3'-phosphate
  modified_base 18: mod_base = OTHER; note = 2'-O-methylguanosine-3'-phosphate
  modified_base 19: mod_base = OTHER; note = 2'-O-methylguanosine-3'-phosphate
  modified_base 20: mod_base = OTHER; note = 2'-O-methyluridine-3'-phosphate
  modified_base 21: mod_base = OTHER; note = 2'-O-methyladenosine-3'-phosphorothioate
  modified_base 22: mod_base = OTHER; note = 2'-O-methylcytidine-3'-phosphorothioate
  modified_base 23: mod_base = OTHER; note = 2'-O-methyladenosine-3'-phosphate
aagccacaggcgggcatggtaca

SEQ ID NO: 566 - RNA, 23 nt, synthetic construct
  source 1..23: mol_type = other RNA
  modified_base 1: mod_base = OTHER; note = 2'-O-methyladenosine-3'-phosphorothioate
  modified_base 2: mod_base = OTHER; note = 2'-fluoroguanosine-3'-phosphorothioate
  modified_base 3: mod_base = OTHER; note = 2'-O-methylcytidine-3'-phosphate
  modified_base 4: mod_base = OTHER; note = 2'-O-methyladenosine-3'-phosphate
  modified_base 5: mod_base = OTHER; note = 2'-O-methyladenosine-3'-phosphate
  modified_base 6: mod_base = OTHER; note = 2'-fluoroadenosine-3'-phosphate
  modified_base 7: mod_base = OTHER; note = 2'-O-methylguanosine-3'-phosphate
  modified_base 8: mod_base = OTHER; note = 2'-fluoroadenosine-3'-phosphate
  modified_base 9: mod_base = OTHER; note = 2'-fluoroguanosine-3'-phosphate
  modified_base 10: mod_base = OTHER; note = 2'-O-methyluridine-3'-phosphate
  modified_base 11: mod_base = OTHER; note = 2'-O-methylguanosine-3'-phosphate
  modified_base 12: mod_base = OTHER; note = 2'-O-methylcytidine-3'-phosphate
  modified_base 13: mod_base = OTHER; note = 2'-O-methylcytidine-3'-phosphate
  modified_base 14: mod_base = OTHER; note = 2'-fluoroadenosine-3'-phosphate
  modified_base 15: mod_base = OTHER; note = 2'-O-methylguanosine-3'-phosphate
  modified_base 16: mod_base = OTHER; note = 2'-fluoroguanosine-3'-phosphate
  modified_base 17: mod_base = OTHER; note = 2'-O-methyladenosine-3'-phosphate
  modified_base 18: mod_base = OTHER; note = 2'-O-methyladenosine-3'-phosphate
  modified_base 19: mod_base = OTHER; note = 2'-O-methylguanosine-3'-phosphate
  modified_base 20: mod_base = OTHER; note = 2'-O-methylguanosine-3'-phosphate
  modified_base 21: mod_base = OTHER; note = 2'-O-methylguanosine-3'-phosphorothioate
  modified_base 22: mod_base = OTHER; note = 2'-O-methyluridine-3'-phosphorothioate
  modified_base 23: mod_base = OTHER; note = 2'-O-methylguanosine-3'-phosphate
agcaaagagtgccaggaagggtg

SEQ ID NO: 567 - RNA, 23 nt, synthetic construct
  source 1..23: mol_type = other RNA
  modified_base 1: mod_base = OTHER; note = 2'-O-methyladenosine-3'-phosphorothioate
  modified_base 2: mod_base = OTHER; note = 2'-fluoroguanosine-3'-phosphorothioate
  modified_base 3: mod_base = OTHER; note = 2'-O-methyladenosine-3'-phosphate
  modified_base 4: mod_base = OTHER; note = 2'-O-methyladenosine-3'-phosphate
  modified_base 5: mod_base = OTHER; note = 2'-O-methylguanosine-3'-phosphate
  modified_base 6: mod_base = OTHER; note = 2'-fluoroadenosine-3'-phosphate
  modified_base 7: mod_base = OTHER; note = 2'-O-methyluridine-3'-phosphate
  modified_base 8: mod_base = OTHER; note = 2'-fluorocytidine-3'-phosphate
  modified_base 9: mod_base = OTHER; note = 2'-fluorocytidine-3'-phosphate
  modified_base 10: mod_base = OTHER; note = 2'-O-methyluridine-3'-phosphate
  modified_base 11: mod_base = OTHER; note = 2'-O-methylcytidine-3'-phosphate
  modified_base 12: mod_base = OTHER; note = 2'-O-methyladenosine-3'-phosphate
  modified_base 13: mod_base = OTHER; note = 2'-O-methyladenosine-3'-phosphate
  modified_base 14: mod_base = OTHER; note = 2'-fluoroguanosine-3'-phosphate
  modified_base 15: mod_base = OTHER; note = 2'-O-methylcytidine-3'-phosphate
  modified_base 16: mod_base = OTHER; note = 2'-fluoroadenosine-3'-phosphate
  modified_base 17: mod_base = OTHER; note = 2'-O-methyladenosine-3'-phosphate
  modified_base 18: mod_base = OTHER; note = 2'-O-methyladenosine-3'-phosphate
  modified_base 19: mod_base = OTHER; note = 2'-O-methylguanosine-3'-phosphate
  modified_base 20: mod_base = OTHER; note = 2'-O-methyladenosine-3'-phosphate
  modified_base 21: mod_base = OTHER; note = 2'-O-methylguanosine-3'-phosphorothioate
  modified_base 22: mod_base = OTHER; note = 2'-O-methyluridine-3'-phosphorothioate
  modified_base 23: mod_base = OTHER; note = 2'-O-methylguanosine-3'-phosphate
agaagatcctcaagcaaagagtg

SEQ ID NO: 568 - RNA, 23 nt, synthetic construct
  source 1..23: mol_type = other RNA
  modified_base 1: mod_base = OTHER; note = 2'-O-methyladenosine-3'-phosphorothioate
  modified_base 2: mod_base = OTHER; note = 2'-fluorouridine -3'-phosphorothioate
  modified_base 3: mod_base = OTHER; note = 2'-O-methylguanosine-3'-phosphate
  modified_base 4: mod_base = OTHER; note = 2'-O-methylguanosine-3'-phosphate
  modified_base 5: mod_base = OTHER; note = 2'-O-methyluridine-3'-phosphate
  modified_base 6: mod_base = OTHER; note = 2'-fluoroguanosine-3'-phosphate
  modified_base 7: mod_base = OTHER; note = 2'-O-methylcytidine-3'-phosphate
  modified_base 8: mod_base = OTHER; note = 2'-fluorouridine-3'-phosphate
  modified_base 9: mod_base = OTHER; note = 2'-fluorocytidine-3'-phosphate
  modified_base 10: mod_base = OTHER; note = 2'-O-methyladenosine-3'-phosphate
  modified_base 11: mod_base = OTHER; note = 2'-O-methylguanosine-3'-phosphate
  modified_base 12: mod_base = OTHER; note = 2'-O-methylcytidine-3'-phosphate
  modified_base 13: mod_base = OTHER; note = 2'-O-methylcytidine-3'-phosphate
  modified_base 14: mod_base = OTHER; note = 2'-fluoroadenosine-3'-phosphate
  modified_base 15: mod_base = OTHER; note = 2'-O-methylguanosine-3'-phosphate
  modified_base 16: mod_base = OTHER; note = 2'-fluoroguanosine-3'-phosphate
  modified_base 17: mod_base = OTHER; note = 2'-O-methyladenosine-3'-phosphate
  modified_base 18: mod_base = OTHER; note = 2'-O-methylguanosine-3'-phosphate
  modified_base 19: mod_base = OTHER; note = 2'-O-methyladenosine-3'-phosphate
  modified_base 20: mod_base = OTHER; note = 2'-O-methylguanosine-3'-phosphate
  modified_base 21: mod_base = OTHER; note = 2'-O-methyluridine-3'-phosphorothioate
  modified_base 22: mod_base = OTHER; note = 2'-O-methylguanosine-3'-phosphorothioate
  modified_base 23: mod_base = OTHER; note = 2'-O-methylcytidine-3'-phosphate
atggtgctcagccaggagagtgc

SEQ ID NO: 569 - RNA, 23 nt, synthetic construct
  source 1..23: mol_type = other RNA
  modified_base 1: mod_base = OTHER; note = 2'-O-methyladenosine-3'-phosphorothioate
  modified_base 2: mod_base = OTHER; note = 2'-fluoroadenosine-3'-phosphorothioate
  modified_base 3: mod_base = OTHER; note = 2'-O-methylguanosine-3'-phosphate
  modified_base 4: mod_base = OTHER; note = 2'-O-methylguanosine-3'-phosphate
  modified_base 5: mod_base = OTHER; note = 2'-O-methyluridine-3'-phosphate
  modified_base 6: mod_base = OTHER; note = 2'-fluorouridine-3'-phosphate
  modified_base 7: mod_base = OTHER; note = 2'-O-methylguanosine-3'-phosphate
  modified_base 8: mod_base = OTHER; note = 2'-fluoroguanosine-3'-phosphate
  modified_base 9: mod_base = OTHER; note = 2'-fluorouridine-3'-phosphate
  modified_base 10: mod_base = OTHER; note = 2'-O-methylguanosine-3'-phosphate
  modified_base 11: mod_base = OTHER; note = 2'-O-methyladenosine-3'-phosphate
  modified_base 12: mod_base = OTHER; note = 2'-O-methyluridine-3'-phosphate
  modified_base 13: mod_base = OTHER; note = 2'-O-methylguanosine-3'-phosphate
  modified_base 14: mod_base = OTHER; note = 2'-fluorouridine-3'-phosphate
  modified_base 15: mod_base = OTHER; note = 2'-O-methylguanosine-3'-phosphate
  modified_base 16: mod_base = OTHER; note = 2'-fluoroguanosine-3'-phosphate
  modified_base 17: mod_base = OTHER; note = 2'-O-methyluridine-3'-phosphate
  modified_base 18: mod_base = OTHER; note = 2'-O-methylguanosine-3'-phosphate
  modified_base 19: mod_base = OTHER; note = 2'-O-methylcytidine-3'-phosphate
  modified_base 20: mod_base = OTHER; note = 2'-O-methyluridine-3'-phosphate
  modified_base 21: mod_base = OTHER; note = 2'-O-methylcytidine-3'-phosphorothioate
  modified_base 22: mod_base = OTHER; note = 2'-O-methyladenosine-3'-phosphorothioate
  modified_base 23: mod_base = OTHER; note = 2'-O-methylguanosine-3'-phosphate
aaggttggtgatgtggtgctcag

SEQ ID NO: 570 - RNA, 23 nt, synthetic construct
  source 1..23: mol_type = other RNA
  modified_base 1: mod_base = OTHER; note = 2'-O-methyladenosine-3'-phosphorothioate
  modified_base 2: mod_base = OTHER; note = 2'-fluoroguanosine-3'-phosphorothioate
  modified_base 3: mod_base = OTHER; note = 2'-O-methyluridine-3'-phosphate
  modified_base 4: mod_base = OTHER; note = 2'-O-methyladenosine-3'-phosphate
  modified_base 5: mod_base = OTHER; note = 2'-O-methyluridine-3'-phosphate
  modified_base 6: mod_base = OTHER; note = 2'-fluoroguanosine-3'-phosphate
  modified_base 7: mod_base = OTHER; note = 2'-O-methylcytidine-3'-phosphate
  modified_base 8: mod_base = OTHER; note = 2'-fluorocytidine-3'-phosphate
  modified_base 9: mod_base = OTHER; note = 2'-fluoroadenosine-3'-phosphate
  modified_base 10: mod_base = OTHER; note = 2'-O-methylguanosine-3'-phosphate
  modified_base 11: mod_base = OTHER; note = 2'-O-methylcytidine-3'-phosphate
  modified_base 12: mod_base = OTHER; note = 2'-O-methylcytidine-3'-phosphate
  modified_base 13: mod_base = OTHER; note = 2'-O-methylcytidine-3'-phosphate
  modified_base 14: mod_base = OTHER; note = 2'-fluoroadenosine-3'-phosphate
  modified_base 15: mod_base = OTHER; note = 2'-O-methylguanosine-3'-phosphate
  modified_base 16: mod_base = OTHER; note = 2'-fluoroguanosine-3'-phosphate
  modified_base 17: mod_base = OTHER; note = 2'-O-methyluridine-3'-phosphate
  modified_base 18: mod_base = OTHER; note = 2'-O-methyluridine-3'-phosphate
  modified_base 19: mod_base = OTHER; note = 2'-O-methylguanosine-3'-phosphate
  modified_base 20: mod_base = OTHER; note = 2'-O-methylguanosine-3'-phosphate
  modified_base 21: mod_base = OTHER; note = 2'-O-methyluridine-3'-phosphorothioate
  modified_base 22: mod_base = OTHER; note = 2'-O-methylguanosine-3'-phosphorothioate
  modified_base 23: mod_base = OTHER; note = 2'-O-methyladenosine-3'-phosphate
agtatgccagcccaggttggtga

SEQ ID NO: 571 - RNA, 23 nt, synthetic construct
  source 1..23: mol_type = other RNA
  modified_base 1: mod_base = OTHER; note = 2'-O-methyladenosine-3'-phosphorothioate
  modified_base 2: mod_base = OTHER; note = 2'-fluoroguanosine-3'-phosphorothioate
  modified_base 3: mod_base = OTHER; note = 2'-O-methylcytidine-3'-phosphate
  modified_base 4: mod_base = OTHER; note = 2'-O-methyladenosine-3'-phosphate
  modified_base 5: mod_base = OTHER; note = 2'-O-methylguanosine-3'-phosphate
  modified_base 6: mod_base = OTHER; note = 2'-fluoroadenosine-3'-phosphate
  modified_base 7: mod_base = OTHER; note = 2'-O-methylguanosine-3'-phosphate
  modified_base 8: mod_base = OTHER; note = 2'-fluorouridine-3'-phosphate
  modified_base 9: mod_base = OTHER; note = 2'-fluorouridine-3'-phosphate
  modified_base 10: mod_base = OTHER; note = 2'-O-methyladenosine-3'-phosphate
  modified_base 11: mod_base = OTHER; note = 2'-O-methyladenosine-3'-phosphate
  modified_base 12: mod_base = OTHER; note = 2'-O-methylguanosine-3'-phosphate
  modified_base 13: mod_base = OTHER; note = 2'-O-methylguanosine-3'-phosphate
  modified_base 14: mod_base = OTHER; note = 2'-fluorouridine-3'-phosphate
  modified_base 15: mod_base = OTHER; note = 2'-O-methyladenosine-3'-phosphate
  modified_base 16: mod_base = OTHER; note = 2'-fluorouridine-3'-phosphate
  modified_base 17: mod_base = OTHER; note = 2'-O-methylguanosine-3'-phosphate
  modified_base 18: mod_base = OTHER; note = 2'-O-methylcytidine-3'-phosphate
  modified_base 19: mod_base = OTHER; note = 2'-O-methylcytidine-3'-phosphate
  modified_base 20: mod_base = OTHER; note = 2'-O-methyladenosine-3'-phosphate
  modified_base 21: mod_base = OTHER; note = 2'-O-methylguanosine-3'-phosphorothioate
  modified_base 22: mod_base = OTHER; note = 2'-O-methylcytidine-3'-phosphorothioate
  modified_base 23: mod_base = OTHER; note = 2'-O-methylcytidine-3'-phosphate
agcagagttaaggtatgccagcc

SEQ ID NO: 572 - RNA, 23 nt, synthetic construct
  source 1..23: mol_type = other RNA
  modified_base 1: mod_base = OTHER; note = 2'-O-methyladenosine-3'-phosphorothioate
  modified_base 2: mod_base = OTHER; note = 2'-fluorocytidine-3'-phosphorothioate
  modified_base 3: mod_base = OTHER; note = 2'-O-methylcytidine-3'-phosphate
  modified_base 4: mod_base = OTHER; note = 2'-O-methyluridine-3'-phosphate
  modified_base 5: mod_base = OTHER; note = 2'-O-methylcytidine-3'-phosphate
  modified_base 6: mod_base = OTHER; note = 2'-fluoroadenosine-3'-phosphate
  modified_base 7: mod_base = OTHER; note = 2'-O-methyladenosine-3'-phosphate
  modified_base 8: mod_base = OTHER; note = 2'-fluoroguanosine-3'-phosphate
  modified_base 9: mod_base = OTHER; note = 2'-fluorocytidine-3'-phosphate
  modified_base 10: mod_base = OTHER; note = 2'-O-methylcytidine-3'-phosphate
  modified_base 11: mod_base = OTHER; note = 2'-O-methyladenosine-3'-phosphate
  modified_base 12: mod_base = OTHER; note = 2'-O-methylcytidine-3'-phosphate
  modified_base 13: mod_base = OTHER; note = 2'-O-methyluridine-3'-phosphate
  modified_base 14: mod_base = OTHER; note = 2'-fluoroadenosine-3'-phosphate
  modified_base 15: mod_base = OTHER; note = 2'-O-methylguanosine-3'-phosphate
  modified_base 16: mod_base = OTHER; note = 2'-fluoroadenosine-3'-phosphate
  modified_base 17: mod_base = OTHER; note = 2'-O-methylguanosine-3'-phosphate
  modified_base 18: mod_base = OTHER; note = 2'-O-methylguanosine-3'-phosphate
  modified_base 19: mod_base = OTHER; note = 2'-O-methylguanosine-3'-phosphate
  modified_base 20: mod_base = OTHER; note = 2'-O-methylcytidine-3'-phosphate
  modified_base 21: mod_base = OTHER; note = 2'-O-methyladenosine-3'-phosphorothioate
  modified_base 22: mod_base = OTHER; note = 2'-O-methylguanosine-3'-phosphorothioate
  modified_base 23: mod_base = OTHER; note = 2'-O-methyladenosine-3'-phosphate
acctcaagccactagagggcaga

SEQ ID NO: 573 - RNA, 23 nt, synthetic construct
  source 1..23: mol_type = other RNA
  modified_base 1: mod_base = OTHER; note = 2'-O-methyladenosine-3'-phosphorothioate
  modified_base 2: mod_base = OTHER; note = 2'-fluorouridine -3'-phosphorothioate
  modified_base 3: mod_base = OTHER; note = 2'-O-methyluridine-3'-phosphate
  modified_base 4: mod_base = OTHER; note = 2'-O-methyluridine-3'-phosphate
  modified_base 5: mod_base = OTHER; note = 2'-O-methylcytidine-3'-phosphate
  modified_base 6: mod_base = OTHER; note = 2'-fluoroadenosine-3'-phosphate
  modified_base 7: mod_base = OTHER; note = 2'-O-methylguanosine-3'-phosphate
  modified_base 8: mod_base = OTHER; note = 2'-fluoroguanosine-3'-phosphate
  modified_base 9: mod_base = OTHER; note = 2'-fluoroadenosine-3'-phosphate
  modified_base 10: mod_base = OTHER; note = 2'-O-methylcytidine-3'-phosphate
  modified_base 11: mod_base = OTHER; note = 2'-O-methyladenosine-3'-phosphate
  modified_base 12: mod_base = OTHER; note = 2'-O-methylcytidine-3'-phosphate
  modified_base 13: mod_base = OTHER; note = 2'-O-methylcytidine-3'-phosphate
  modified_base 14: mod_base = OTHER; note = 2'-fluoroadenosine-3'-phosphate
  modified_base 15: mod_base = OTHER; note = 2'-O-methylguanosine-3'-phosphate
  modified_base 16: mod_base = OTHER; note = 2'-fluoroadenosine-3'-phosphate
  modified_base 17: mod_base = OTHER; note = 2'-O-methylcytidine-3'-phosphate
  modified_base 18: mod_base = OTHER; note = 2'-O-methyluridine-3'-phosphate
  modified_base 19: mod_base = OTHER; note = 2'-O-methyluridine-3'-phosphate
  modified_base 20: mod_base = OTHER; note = 2'-O-methylcytidine-3'-phosphate
  modified_base 21: mod_base = OTHER; note = 2'-O-methyluridine-3'-phosphorothioate
  modified_base 22: mod_base = OTHER; note = 2'-O-methylcytidine-3'-phosphorothioate
  modified_base 23: mod_base = OTHER; note = 2'-O-methyladenosine-3'-phosphate
atttcaggacaccagacttctca

SEQ ID NO: 574 - RNA, 23 nt, synthetic construct
  source 1..23: mol_type = other RNA
  modified_base 1: mod_base = OTHER; note = 2'-O-methyladenosine-3'-phosphorothioate
  modified_base 2: mod_base = OTHER; note = 2'-fluorouridine -3'-phosphorothioate
  modified_base 3: mod_base = OTHER; note = 2'-O-methylcytidine-3'-phosphate
  modified_base 4: mod_base = OTHER; note = 2'-O-methyluridine-3'-phosphate
  modified_base 5: mod_base = OTHER; note = 2'-O-methyladenosine-3'-phosphate
  modified_base 6: mod_base = OTHER; note = 2'-fluoroguanosine-3'-phosphate
  modified_base 7: mod_base = OTHER; note = 2'-O-methyluridine-3'-phosphate
  modified_base 8: mod_base = OTHER; note = 2'-fluorouridine-3'-phosphate
  modified_base 9: mod_base = OTHER; note = 2'-fluoroguanosine-3'-phosphate
  modified_base 10: mod_base = OTHER; note = 2'-O-methylcytidine-3'-phosphate
  modified_base 11: mod_base = OTHER; note = 2'-O-methyladenosine-3'-phosphate
  modified_base 12: mod_base = OTHER; note = 2'-O-methylguanosine-3'-phosphate
  modified_base 13: mod_base = OTHER; note = 2'-O-methyluridine-3'-phosphate
  modified_base 14: mod_base = OTHER; note = 2'-fluorouridine-3'-phosphate
  modified_base 15: mod_base = OTHER; note = 2'-O-methyluridine-3'-phosphate
  modified_base 16: mod_base = OTHER; note = 2'-fluorocytidine-3'-phosphate
  modified_base 17: mod_base = OTHER; note = 2'-O-methyladenosine-3'-phosphate
  modified_base 18: mod_base = OTHER; note = 2'-O-methylguanosine-3'-phosphate
  modified_base 19: mod_base = OTHER; note = 2'-O-methylguanosine-3'-phosphate
  modified_base 20: mod_base = OTHER; note = 2'-O-methyladenosine-3'-phosphate
  modified_base 21: mod_base = OTHER; note = 2'-O-methylcytidine-3'-phosphorothioate
  modified_base 22: mod_base = OTHER; note = 2'-O-methyladenosine-3'-phosphorothioate
  modified_base 23: mod_base = OTHER; note = 2'-O-methylcytidine-3'-phosphate
atctagttgcagtttcaggacac

SEQ ID NO: 575 - RNA, 23 nt, synthetic construct
  source 1..23: mol_type = other RNA
  modified_base 1: mod_base = OTHER; note = 2'-O-methyladenosine-3'-phosphorothioate
  modified_base 2: mod_base = OTHER; note = 2'-fluorouridine -3'-phosphorothioate
  modified_base 3: mod_base = OTHER; note = 2'-O-methyluridine-3'-phosphate
  modified_base 4: mod_base = OTHER; note = 2'-O-methylguanosine-3'-phosphate
  modified_base 5: mod_base = OTHER; note = 2'-O-methyluridine-3'-phosphate
  modified_base 6: mod_base = OTHER; note = 2'-fluorocytidine-3'-phosphate
  modified_base 7: mod_base = OTHER; note = 2'-O-methylcytidine-3'-phosphate
  modified_base 8: mod_base = OTHER; note = 2'-fluoroadenosine-3'-phosphate
  modified_base 9: mod_base = OTHER; note = 2'-fluoroguanosine-3'-phosphate
  modified_base 10: mod_base = OTHER; note = 2'-O-methyluridine-3'-phosphate
  modified_base 11: mod_base = OTHER; note = 2'-O-methyladenosine-3'-phosphate
  modified_base 12: mod_base = OTHER; note = 2'-O-methyladenosine-3'-phosphate
  modified_base 13: mod_base = OTHER; note = 2'-O-methylcytidine-3'-phosphate
  modified_base 14: mod_base = OTHER; note = 2'-fluorouridine-3'-phosphate
  modified_base 15: mod_base = OTHER; note = 2'-O-methylguanosine-3'-phosphate
  modified_base 16: mod_base = OTHER; note = 2'-fluorouridine-3'-phosphate
  modified_base 17: mod_base = OTHER; note = 2'-O-methylguanosine-3'-phosphate
  modified_base 18: mod_base = OTHER; note = 2'-O-methylcytidine-3'-phosphate
  modified_base 19: mod_base = OTHER; note = 2'-O-methyluridine-3'-phosphate
  modified_base 20: mod_base = OTHER; note = 2'-O-methylguanosine-3'-phosphate
  modified_base 21: mod_base = OTHER; note = 2'-O-methyluridine-3'-phosphorothioate
  modified_base 22: mod_base = OTHER; note = 2'-O-methyluridine-3'-phosphorothioate
  modified_base 23: mod_base = OTHER; note = 2'-O-methylguanosine-3'-phosphate
attgtccagtaactgtgctgttg

SEQ ID NO: 576 - RNA, 23 nt, synthetic construct
  source 1..23: mol_type = other RNA
  modified_base 1: mod_base = OTHER; note = 2'-O-methyladenosine-3'-phosphorothioate
  modified_base 2: mod_base = OTHER; note = 2'-fluoroguanosine-3'-phosphorothioate
  modified_base 3: mod_base = OTHER; note = 2'-O-methyladenosine-3'-phosphate
  modified_base 4: mod_base = OTHER; note = 2'-O-methylguanosine-3'-phosphate
  modified_base 5: mod_base = OTHER; note = 2'-O-methylcytidine-3'-phosphate
  modified_base 6: mod_base = OTHER; note = 2'-fluorocytidine-3'-phosphate
  modified_base 7: mod_base = OTHER; note = 2'-O-methylguanosine-3'-phosphate
  modified_base 8: mod_base = OTHER; note = 2'-fluorocytidine-3'-phosphate
  modified_base 9: mod_base = OTHER; note = 2'-fluorocytidine-3'-phosphate
  modified_base 10: mod_base = OTHER; note = 2'-O-methyluridine-3'-phosphate
  modified_base 11: mod_base = OTHER; note = 2'-O-methylcytidine-3'-phosphate
  modified_base 12: mod_base = OTHER; note = 2'-O-methylguanosine-3'-phosphate
  modified_base 13: mod_base = OTHER; note = 2'-O-methylguanosine-3'-phosphate
  modified_base 14: mod_base = OTHER; note = 2'-fluorouridine-3'-phosphate
  modified_base 15: mod_base = OTHER; note = 2'-O-methyluridine-3'-phosphate
  modified_base 16: mod_base = OTHER; note = 2'-fluoroguanosine-3'-phosphate
  modified_base 17: mod_base = OTHER; note = 2'-O-methyluridine-3'-phosphate
  modified_base 18: mod_base = OTHER; note = 2'-O-methylcytidine-3'-phosphate
  modified_base 19: mod_base = OTHER; note = 2'-O-methylcytidine-3'-phosphate
  modified_base 20: mod_base = OTHER; note = 2'-O-methyladenosine-3'-phosphate
  modified_base 21: mod_base = OTHER; note = 2'-O-methylguanosine-3'-phosphorothioate
  modified_base 22: mod_base = OTHER; note = 2'-O-methyluridine-3'-phosphorothioate
  modified_base 23: mod_base = OTHER; note = 2'-O-methyladenosine-3'-phosphate
agagccgcctcggttgtccagta

SEQ ID NO: 577 - RNA, 23 nt, synthetic construct
  source 1..23: mol_type = other RNA
  modified_base 1: mod_base = OTHER; note = 2'-O-methyladenosine-3'-phosphorothioate
  modified_base 2: mod_base = OTHER; note = 2'-fluorocytidine-3'-phosphorothioate
  modified_base 3: mod_base = OTHER; note = 2'-O-methyluridine-3'-phosphate
  modified_base 4: mod_base = OTHER; note = 2'-O-methylguanosine-3'-phosphate
  modified_base 5: mod_base = OTHER; note = 2'-O-methylcytidine-3'-phosphate
  modified_base 6: mod_base = OTHER; note = 2'-fluorouridine-3'-phosphate
  modified_base 7: mod_base = OTHER; note = 2'-O-methylguanosine-3'-phosphate
  modified_base 8: mod_base = OTHER; note = 2'-fluorouridine-3'-phosphate
  modified_base 9: mod_base = OTHER; note = 2'-fluoroguanosine-3'-phosphate
  modified_base 10: mod_base = OTHER; note = 2'-O-methyluridine-3'-phosphate
  modified_base 11: mod_base = OTHER; note = 2'-O-methylcytidine-3'-phosphate
  modified_base 12: mod_base = OTHER; note = 2'-O-methylcytidine-3'-phosphate
  modified_base 13: mod_base = OTHER; note = 2'-O-methyladenosine-3'-phosphate
  modified_base 14: mod_base = OTHER; note = 2'-fluoroadenosine-3'-phosphate
  modified_base 15: mod_base = OTHER; note = 2'-O-methylguanosine-3'-phosphate
  modified_base 16: mod_base = OTHER; note = 2'-fluoroadenosine-3'-phosphate
  modified_base 17: mod_base = OTHER; note = 2'-O-methylguanosine-3'-phosphate
  modified_base 18: mod_base = OTHER; note = 2'-O-methylcytidine-3'-phosphate
  modified_base 19: mod_base = OTHER; note = 2'-O-methylcytidine-3'-phosphate
  modified_base 20: mod_base = OTHER; note = 2'-O-methylguanosine-3'-phosphate
  modified_base 21: mod_base = OTHER; note = 2'-O-methylcytidine-3'-phosphorothioate
  modified_base 22: mod_base = OTHER; note = 2'-O-methylcytidine-3'-phosphorothioate
  modified_base 23: mod_base = OTHER; note = 2'-O-methyluridine-3'-phosphate
actgctgtgtccaagagccgcct

SEQ ID NO: 578 - RNA, 23 nt, synthetic construct
  source 1..23: mol_type = other RNA
  modified_base 1: mod_base = OTHER; note = 2'-O-methyladenosine-3'-phosphorothioate
  modified_base 2: mod_base = OTHER; note = 2'-fluorouridine -3'-phosphorothioate
  modified_base 3: mod_base = OTHER; note = 2'-O-methyladenosine-3'-phosphate
  modified_base 4: mod_base = OTHER; note = 2'-O-methylguanosine-3'-phosphate
  modified_base 5: mod_base = OTHER; note = 2'-O-methylguanosine-3'-phosphate
  modified_base 6: mod_base = OTHER; note = 2'-fluoroadenosine-3'-phosphate
  modified_base 7: mod_base = OTHER; note = 2'-O-methyladenosine-3'-phosphate
  modified_base 8: mod_base = OTHER; note = 2'-fluoroguanosine-3'-phosphate
  modified_base 9: mod_base = OTHER; note = 2'-fluoroguanosine-3'-phosphate
  modified_base 10: mod_base = OTHER; note = 2'-O-methylguanosine-3'-phosphate
  modified_base 11: mod_base = OTHER; note = 2'-O-methylcytidine-3'-phosphate
  modified_base 12: mod_base = OTHER; note = 2'-O-methyluridine-3'-phosphate
  modified_base 13: mod_base = OTHER; note = 2'-O-methylguanosine-3'-phosphate
  modified_base 14: mod_base = OTHER; note = 2'-fluorocytidine-3'-phosphate
  modified_base 15: mod_base = OTHER; note = 2'-O-methyluridine-3'-phosphate
  modified_base 16: mod_base = OTHER; note = 2'-fluoroguanosine-3'-phosphate
  modified_base 17: mod_base = OTHER; note = 2'-O-methylguanosine-3'-phosphate
  modified_base 18: mod_base = OTHER; note = 2'-O-methyluridine-3'-phosphate
  modified_base 19: mod_base = OTHER; note = 2'-O-methylguanosine-3'-phosphate
  modified_base 20: mod_base = OTHER; note = 2'-O-methyluridine-3'-phosphate
  modified_base 21: mod_base = OTHER; note = 2'-O-methylcytidine-3'-phosphorothioate
  modified_base 22: mod_base = OTHER; note = 2'-O-methylcytidine-3'-phosphorothioate
  modified_base 23: mod_base = OTHER; note = 2'-O-methyluridine-3'-phosphate
ataggaagggctgctggtgtcct

SEQ ID NO: 579 - RNA, 23 nt, synthetic construct
  source 1..23: mol_type = other RNA
  modified_base 1: mod_base = OTHER; note = 2'-O-methyladenosine-3'-phosphorothioate
  modified_base 2: mod_base = OTHER; note = 2'-fluoroguanosine-3'-phosphorothioate
  modified_base 3: mod_base = OTHER; note = 2'-O-methyladenosine-3'-phosphate
  modified_base 4: mod_base = OTHER; note = 2'-O-methyluridine-3'-phosphate
  modified_base 5: mod_base = OTHER; note = 2'-O-methylcytidine-3'-phosphate
  modified_base 6: mod_base = OTHER; note = 2'-fluorouridine-3'-phosphate
  modified_base 7: mod_base = OTHER; note = 2'-O-methyluridine-3'-phosphate
  modified_base 8: mod_base = OTHER; note = 2'-fluoroadenosine-3'-phosphate
  modified_base 9: mod_base = OTHER; note = 2'-fluoroadenosine-3'-phosphate
  modified_base 10: mod_base = OTHER; note = 2'-O-methylguanosine-3'-phosphate
  modified_base 11: mod_base = OTHER; note = 2'-O-methylcytidine-3'-phosphate
  modified_base 12: mod_base = OTHER; note = 2'-O-methyluridine-3'-phosphate
  modified_base 13: mod_base = OTHER; note = 2'-O-methylcytidine-3'-phosphate
  modified_base 14: mod_base = OTHER; note = 2'-fluorouridine-3'-phosphate
  modified_base 15: mod_base = OTHER; note = 2'-O-methyladenosine-3'-phosphate
  modified_base 16: mod_base = OTHER; note = 2'-fluoroguanosine-3'-phosphate
  modified_base 17: mod_base = OTHER; note = 2'-O-methylguanosine-3'-phosphate
  modified_base 18: mod_base = OTHER; note = 2'-O-methyladenosine-3'-phosphate
  modified_base 19: mod_base = OTHER; note = 2'-O-methyladenosine-3'-phosphate
  modified_base 20: mod_base = OTHER; note = 2'-O-methylguanosine-3'-phosphate
  modified_base 21: mod_base = OTHER; note = 2'-O-methylguanosine-3'-phosphorothioate
  modified_base 22: mod_base = OTHER; note = 2'-O-methylguanosine-3'-phosphorothioate
  modified_base 23: mod_base = OTHER; note = 2'-O-methylcytidine-3'-phosphate
agatcttaagctctaggaagggc

SEQ ID NO: 580 - RNA, 23 nt, synthetic construct
  source 1..23: mol_type = other RNA
  modified_base 1: mod_base = OTHER; note = 2'-O-methyladenosine-3'-phosphorothioate
  modified_base 2: mod_base = OTHER; note = 2'-fluorouridine -3'-phosphorothioate
  modified_base 3: mod_base = OTHER; note = 2'-O-methylcytidine-3'-phosphate
  modified_base 4: mod_base = OTHER; note = 2'-O-methyladenosine-3'-phosphate
  modified_base 5: mod_base = OTHER; note = 2'-O-methyluridine-3'-phosphate
  modified_base 6: mod_base = OTHER; note = 2'-fluorouridine-3'-phosphate
  modified_base 7: mod_base = OTHER; note = 2'-O-methylguanosine-3'-phosphate
  modified_base 8: mod_base = OTHER; note = 2'-fluoroguanosine-3'-phosphate
  modified_base 9: mod_base = OTHER; note = 2'-fluorocytidine-3'-phosphate
  modified_base 10: mod_base = OTHER; note = 2'-O-methyluridine-3'-phosphate
  modified_base 11: mod_base = OTHER; note = 2'-O-methylcytidine-3'-phosphate
  modified_base 12: mod_base = OTHER; note = 2'-O-methylguanosine-3'-phosphate
  modified_base 13: mod_base = OTHER; note = 2'-O-methylguanosine-3'-phosphate
  modified_base 14: mod_base = OTHER; note = 2'-fluoroadenosine-3'-phosphate
  modified_base 15: mod_base = OTHER; note = 2'-O-methyluridine-3'-phosphate
  modified_base 16: mod_base = OTHER; note = 2'-fluorocytidine-3'-phosphate
  modified_base 17: mod_base = OTHER; note = 2'-O-methyluridine-3'-phosphate
  modified_base 18: mod_base = OTHER; note = 2'-O-methyluridine-3'-phosphate
  modified_base 19: mod_base = OTHER; note = 2'-O-methyladenosine-3'-phosphate
  modified_base 20: mod_base = OTHER; note = 2'-O-methyladenosine-3'-phosphate
  modified_base 21: mod_base = OTHER; note = 2'-O-methylguanosine-3'-phosphorothioate
  modified_base 22: mod_base = OTHER; note = 2'-O-methylcytidine-3'-phosphorothioate
  modified_base 23: mod_base = OTHER; note = 2'-O-methyluridine-3'-phosphate
atcattggctcggatcttaagct

SEQ ID NO: 581 - RNA, 23 nt, synthetic construct
  source 1..23: mol_type = other RNA
  modified_base 1: mod_base = OTHER; note = 2'-O-methyladenosine-3'-phosphorothioate
  modified_base 2: mod_base = OTHER; note = 2'-fluorocytidine-3'-phosphorothioate
  modified_base 3: mod_base = OTHER; note = 2'-O-methyluridine-3'-phosphate
  modified_base 4: mod_base = OTHER; note = 2'-O-methylguanosine-3'-phosphate
  modified_base 5: mod_base = OTHER; note = 2'-O-methylcytidine-3'-phosphate
  modified_base 6: mod_base = OTHER; note = 2'-fluorouridine-3'-phosphate
  modified_base 7: mod_base = OTHER; note = 2'-O-methylcytidine-3'-phosphate
  modified_base 8: mod_base = OTHER; note = 2'-fluorocytidine-3'-phosphate
  modified_base 9: mod_base = OTHER; note = 2'-fluoroadenosine-3'-phosphate
  modified_base 10: mod_base = OTHER; note = 2'-O-methylguanosine-3'-phosphate
  modified_base 11: mod_base = OTHER; note = 2'-O-methylguanosine-3'-phosphate
  modified_base 12: mod_base = OTHER; note = 2'-O-methylcytidine-3'-phosphate
  modified_base 13: mod_base = OTHER; note = 2'-O-methyluridine-3'-phosphate
  modified_base 14: mod_base = OTHER; note = 2'-fluorocytidine-3'-phosphate
  modified_base 15: mod_base = OTHER; note = 2'-O-methyladenosine-3'-phosphate
  modified_base 16: mod_base = OTHER; note = 2'-fluorouridine-3'-phosphate
  modified_base 17: mod_base = OTHER; note = 2'-O-methyluridine-3'-phosphate
  modified_base 18: mod_base = OTHER; note = 2'-O-methylguanosine-3'-phosphate
  modified_base 19: mod_base = OTHER; note = 2'-O-methylguanosine-3'-phosphate
  modified_base 20: mod_base = OTHER; note = 2'-O-methylcytidine-3'-phosphate
  modified_base 21: mod_base = OTHER; note = 2'-O-methyluridine-3'-phosphorothioate
  modified_base 22: mod_base = OTHER; note = 2'-O-methylcytidine-3'-phosphorothioate
  modified_base 23: mod_base = OTHER; note = 2'-O-methylguanosine-3'-phosphate
actgctccaggctcattggctcg

SEQ ID NO: 582 - RNA, 23 nt, synthetic construct
  source 1..23: mol_type = other RNA
  modified_base 1: mod_base = OTHER; note = 2'-O-methyladenosine-3'-phosphorothioate
  modified_base 2: mod_base = OTHER; note = 2'-fluorouridine -3'-phosphorothioate
  modified_base 3: mod_base = OTHER; note = 2'-O-methylcytidine-3'-phosphate
  modified_base 4: mod_base = OTHER; note = 2'-O-methyluridine-3'-phosphate
  modified_base 5: mod_base = OTHER; note = 2'-O-methyladenosine-3'-phosphate
  modified_base 6: mod_base = OTHER; note = 2'-fluorocytidine-3'-phosphate
  modified_base 7: mod_base = OTHER; note = 2'-O-methylguanosine-3'-phosphate
  modified_base 8: mod_base = OTHER; note = 2'-fluorouridine-3'-phosphate
  modified_base 9: mod_base = OTHER; note = 2'-fluoroadenosine-3'-phosphate
  modified_base 10: mod_base = OTHER; note = 2'-O-methyladenosine-3'-phosphate
  modified_base 11: mod_base = OTHER; note = 2'-O-methyluridine-3'-phosphate
  modified_base 12: mod_base = OTHER; note = 2'-O-methylguanosine-3'-phosphate
  modified_base 13: mod_base = OTHER; note = 2'-O-methylguanosine-3'-phosphate
  modified_base 14: mod_base = OTHER; note = 2'-fluorouridine-3'-phosphate
  modified_base 15: mod_base = OTHER; note = 2'-O-methylcytidine-3'-phosphate
  modified_base 16: mod_base = OTHER; note = 2'-fluorouridine-3'-phosphate
  modified_base 17: mod_base = OTHER; note = 2'-O-methylcytidine-3'-phosphate
  modified_base 18: mod_base = OTHER; note = 2'-O-methylguanosine-3'-phosphate
  modified_base 19: mod_base = OTHER; note = 2'-O-methylcytidine-3'-phosphate
  modified_base 20: mod_base = OTHER; note = 2'-O-methylcytidine-3'-phosphate
  modified_base 21: mod_base = OTHER; note = 2'-O-methyluridine-3'-phosphorothioate
  modified_base 22: mod_base = OTHER; note = 2'-O-methylguanosine-3'-phosphorothioate
  modified_base 23: mod_base = OTHER; note = 2'-O-methylcytidine-3'-phosphate
atctacgtaatggtctcgcctgc

SEQ ID NO: 583 - RNA, 23 nt, synthetic construct
  source 1..23: mol_type = other RNA
  modified_base 1: mod_base = OTHER; note = 2'-O-methyladenosine-3'-phosphorothioate
  modified_base 2: mod_base = OTHER; note = 2'-fluoroadenosine-3'-phosphorothioate
  modified_base 3: mod_base = OTHER; note = 2'-O-methylguanosine-3'-phosphate
  modified_base 4: mod_base = OTHER; note = 2'-O-methyluridine-3'-phosphate
  modified_base 5: mod_base = OTHER; note = 2'-O-methyluridine-3'-phosphate
  modified_base 6: mod_base = OTHER; note = 2'-fluorocytidine-3'-phosphate
  modified_base 7: mod_base = OTHER; note = 2'-O-methylcytidine-3'-phosphate
  modified_base 8: mod_base = OTHER; note = 2'-fluorouridine-3'-phosphate
  modified_base 9: mod_base = OTHER; note = 2'-fluoroguanosine-3'-phosphate
  modified_base 10: mod_base = OTHER; note = 2'-O-methylguanosine-3'-phosphate
  modified_base 11: mod_base = OTHER; note = 2'-O-methyladenosine-3'-phosphate
  modified_base 12: mod_base = OTHER; note = 2'-O-methyladenosine-3'-phosphate
  modified_base 13: mod_base = OTHER; note = 2'-O-methylguanosine-3'-phosphate
  modified_base 14: mod_base = OTHER; note = 2'-fluorouridine-3'-phosphate
  modified_base 15: mod_base = OTHER; note = 2'-O-methylcytidine-3'-phosphate
  modified_base 16: mod_base = OTHER; note = 2'-fluorouridine-3'-phosphate
  modified_base 17: mod_base = OTHER; note = 2'-O-methyladenosine-3'-phosphate
  modified_base 18: mod_base = OTHER; note = 2'-O-methylcytidine-3'-phosphate
  modified_base 19: mod_base = OTHER; note = 2'-O-methylguanosine-3'-phosphate
  modified_base 20: mod_base = OTHER; note = 2'-O-methyluridine-3'-phosphate
  modified_base 21: mod_base = OTHER; note = 2'-O-methyladenosine-3'-phosphorothioate
  modified_base 22: mod_base = OTHER; note = 2'-O-methyladenosine-3'-phosphorothioate
  modified_base 23: mod_base = OTHER; note = 2'-O-methyluridine-3'-phosphate
aagttcctggaagtctacgtaat

SEQ ID NO: 584 - RNA, 23 nt, synthetic construct
  source 1..23: mol_type = other RNA
  modified_base 1: mod_base = OTHER; note = 2'-O-methyladenosine-3'-phosphorothioate
  modified_base 2: mod_base = OTHER; note = 2'-fluorouridine -3'-phosphorothioate
  modified_base 3: mod_base = OTHER; note = 2'-O-methylcytidine-3'-phosphate
  modified_base 4: mod_base = OTHER; note = 2'-O-methylcytidine-3'-phosphate
  modified_base 5: mod_base = OTHER; note = 2'-O-methylcytidine-3'-phosphate
  modified_base 6: mod_base = OTHER; note = 2'-fluoroguanosine-3'-phosphate
  modified_base 7: mod_base = OTHER; note = 2'-O-methylcytidine-3'-phosphate
  modified_base 8: mod_base = OTHER; note = 2'-fluorocytidine-3'-phosphate
  modified_base 9: mod_base = OTHER; note = 2'-fluoroadenosine-3'-phosphate
  modified_base 10: mod_base = OTHER; note = 2'-O-methyluridine-3'-phosphate
  modified_base 11: mod_base = OTHER; note = 2'-O-methylcytidine-3'-phosphate
  modified_base 12: mod_base = OTHER; note = 2'-O-methylcytidine-3'-phosphate
  modified_base 13: mod_base = OTHER; note = 2'-O-methylcytidine-3'-phosphate
  modified_base 14: mod_base = OTHER; note = 2'-fluoroadenosine-3'-phosphate
  modified_base 15: mod_base = OTHER; note = 2'-O-methylguanosine-3'-phosphate
  modified_base 16: mod_base = OTHER; note = 2'-fluorouridine-3'-phosphate
  modified_base 17: mod_base = OTHER; note = 2'-O-methyluridine-3'-phosphate
  modified_base 18: mod_base = OTHER; note = 2'-O-methylcytidine-3'-phosphate
  modified_base 19: mod_base = OTHER; note = 2'-O-methylcytidine-3'-phosphate
  modified_base 20: mod_base = OTHER; note = 2'-O-methyluridine-3'-phosphate
  modified_base 21: mod_base = OTHER; note = 2'-O-methylguanosine-3'-phosphorothioate
  modified_base 22: mod_base = OTHER; note = 2'-O-methylguanosine-3'-phosphorothioate
  modified_base 23: mod_base = OTHER; note = 2'-O-methyladenosine-3'-phosphate
atcccgccatcccagttcctgga

SEQ ID NO: 585 - RNA, 23 nt, synthetic construct
  source 1..23: mol_type = other RNA
  modified_base 1: mod_base = OTHER; note = 2'-O-methyladenosine-3'-phosphorothioate
  modified_base 2: mod_base = OTHER; note = 2'-fluoroguanosine-3'-phosphorothioate
  modified_base 3: mod_base = OTHER; note = 2'-O-methylcytidine-3'-phosphate
  modified_base 4: mod_base = OTHER; note = 2'-O-methyluridine-3'-phosphate
  modified_base 5: mod_base = OTHER; note = 2'-O-methylguanosine-3'-phosphate
  modified_base 6: mod_base = OTHER; note = 2'-fluorocytidine-3'-phosphate
  modified_base 7: mod_base = OTHER; note = 2'-O-methyladenosine-3'-phosphate
  modified_base 8: mod_base = OTHER; note = 2'-fluoroguanosine-3'-phosphate
  modified_base 9: mod_base = OTHER; note = 2'-fluorouridine-3'-phosphate
  modified_base 10: mod_base = OTHER; note = 2'-O-methyladenosine-3'-phosphate
  modified_base 11: mod_base = OTHER; note = 2'-O-methyluridine-3'-phosphate
  modified_base 12: mod_base = OTHER; note = 2'-O-methylcytidine-3'-phosphate
  modified_base 13: mod_base = OTHER; note = 2'-O-methylcytidine-3'-phosphate
  modified_base 14: mod_base = OTHER; note = 2'-fluoroadenosine-3'-phosphate
  modified_base 15: mod_base = OTHER; note = 2'-O-methylguanosine-3'-phosphate
  modified_base 16: mod_base = OTHER; note = 2'-fluorouridine-3'-phosphate
  modified_base 17: mod_base = OTHER; note = 2'-O-methylcytidine-3'-phosphate
  modified_base 18: mod_base = OTHER; note = 2'-O-methylcytidine-3'-phosphate
  modified_base 19: mod_base = OTHER; note = 2'-O-methylcytidine-3'-phosphate
  modified_base 20: mod_base = OTHER; note = 2'-O-methylguanosine-3'-phosphate
  modified_base 21: mod_base = OTHER; note = 2'-O-methylcytidine-3'-phosphorothioate
  modified_base 22: mod_base = OTHER; note = 2'-O-methylcytidine-3'-phosphorothioate
  modified_base 23: mod_base = OTHER; note = 2'-O-methyladenosine-3'-phosphate
agctgcagtatccagtcccgcca

SEQ ID NO: 586 - RNA, 23 nt, synthetic construct
  source 1..23: mol_type = other RNA
  modified_base 1: mod_base = OTHER; note = 2'-O-methyladenosine-3'-phosphorothioate
  modified_base 2: mod_base = OTHER; note = 2'-fluorocytidine-3'-phosphorothioate
  modified_base 3: mod_base = OTHER; note = 2'-O-methyluridine-3'-phosphate
  modified_base 4: mod_base = OTHER; note = 2'-O-methylguanosine-3'-phosphate
  modified_base 5: mod_base = OTHER; note = 2'-O-methylcytidine-3'-phosphate
  modified_base 6: mod_base = OTHER; note = 2'-fluoroadenosine-3'-phosphate
  modified_base 7: mod_base = OTHER; note = 2'-O-methylguanosine-3'-phosphate
  modified_base 8: mod_base = OTHER; note = 2'-fluorouridine-3'-phosphate
  modified_base 9: mod_base = OTHER; note = 2'-fluoroadenosine-3'-phosphate
  modified_base 10: mod_base = OTHER; note = 2'-O-methyladenosine-3'-phosphate
  modified_base 11: mod_base = OTHER; note = 2'-O-methyluridine-3'-phosphate
  modified_base 12: mod_base = OTHER; note = 2'-O-methyluridine-3'-phosphate
  modified_base 13: mod_base = OTHER; note = 2'-O-methylcytidine-3'-phosphate
  modified_base 14: mod_base = OTHER; note = 2'-fluoroadenosine-3'-phosphate
  modified_base 15: mod_base = OTHER; note = 2'-O-methylguanosine-3'-phosphate
  modified_base 16: mod_base = OTHER; note = 2'-fluorocytidine-3'-phosphate
  modified_base 17: mod_base = OTHER; note = 2'-O-methyluridine-3'-phosphate
  modified_base 18: mod_base = OTHER; note = 2'-O-methylguanosine-3'-phosphate
  modified_base 19: mod_base = OTHER; note = 2'-O-methylguanosine-3'-phosphate
  modified_base 20: mod_base = OTHER; note = 2'-O-methyluridine-3'-phosphate
  modified_base 21: mod_base = OTHER; note = 2'-O-methyladenosine-3'-phosphorothioate
  modified_base 22: mod_base = OTHER; note = 2'-O-methylcytidine-3'-phosphorothioate
  modified_base 23: mod_base = OTHER; note = 2'-O-methylcytidine-3'-phosphate
actgcagtaattcagctggtacc

SEQ ID NO: 587 - RNA, 23 nt, synthetic construct
  source 1..23: mol_type = other RNA
  modified_base 1: mod_base = OTHER; note = 2'-O-methyladenosine-3'-phosphorothioate
  modified_base 2: mod_base = OTHER; note = 2'-fluoroadenosine-3'-phosphorothioate
  modified_base 3: mod_base = OTHER; note = 2'-O-methylguanosine-3'-phosphate
  modified_base 4: mod_base = OTHER; note = 2'-O-methylguanosine-3'-phosphate
  modified_base 5: mod_base = OTHER; note = 2'-O-methylguanosine-3'-phosphate
  modified_base 6: mod_base = OTHER; note = 2'-fluorocytidine-3'-phosphate
  modified_base 7: mod_base = OTHER; note = 2'-O-methyladenosine-3'-phosphate
  modified_base 8: mod_base = OTHER; note = 2'-fluorocytidine-3'-phosphate
  modified_base 9: mod_base = OTHER; note = 2'-fluorouridine-3'-phosphate
  modified_base 10: mod_base = OTHER; note = 2'-O-methylguanosine-3'-phosphate
  modified_base 11: mod_base = OTHER; note = 2'-O-methylcytidine-3'-phosphate
  modified_base 12: mod_base = OTHER; note = 2'-O-methylcytidine-3'-phosphate
  modified_base 13: mod_base = OTHER; note = 2'-O-methylcytidine-3'-phosphate
  modified_base 14: mod_base = OTHER; note = 2'-fluoroadenosine-3'-phosphate
  modified_base 15: mod_base = OTHER; note = 2'-O-methylcytidine-3'-phosphate
  modified_base 16: mod_base = OTHER; note = 2'-fluorouridine-3'-phosphate
  modified_base 17: mod_base = OTHER; note = 2'-O-methylguanosine-3'-phosphate
  modified_base 18: mod_base = OTHER; note = 2'-O-methylcytidine-3'-phosphate
  modified_base 19: mod_base = OTHER; note = 2'-O-methyladenosine-3'-phosphate
  modified_base 20: mod_base = OTHER; note = 2'-O-methylguanosine-3'-phosphate
  modified_base 21: mod_base = OTHER; note = 2'-O-methyluridine-3'-phosphorothioate
  modified_base 22: mod_base = OTHER; note = 2'-O-methyladenosine-3'-phosphorothioate
  modified_base 23: mod_base = OTHER; note = 2'-O-methyladenosine-3'-phosphate
aagggcactgcccactgcagtaa

SEQ ID NO: 588 - RNA, 23 nt, synthetic construct
  source 1..23: mol_type = other RNA
  modified_base 1: mod_base = OTHER; note = 2'-O-methyladenosine-3'-phosphorothioate
  modified_base 2: mod_base = OTHER; note = 2'-fluoroguanosine-3'-phosphorothioate
  modified_base 3: mod_base = OTHER; note = 2'-O-methyladenosine-3'-phosphate
  modified_base 4: mod_base = OTHER; note = 2'-O-methyladenosine-3'-phosphate
  modified_base 5: mod_base = OTHER; note = 2'-O-methyladenosine-3'-phosphate
  modified_base 6: mod_base = OTHER; note = 2'-fluoroguanosine-3'-phosphate
  modified_base 7: mod_base = OTHER; note = 2'-O-methyladenosine-3'-phosphate
  modified_base 8: mod_base = OTHER; note = 2'-fluoroguanosine-3'-phosphate
  modified_base 9: mod_base = OTHER; note = 2'-fluoroguanosine-3'-phosphate
  modified_base 10: mod_base = OTHER; note = 2'-O-methylcytidine-3'-phosphate
  modified_base 11: mod_base = OTHER; note = 2'-O-methyladenosine-3'-phosphate
  modified_base 12: mod_base = OTHER; note = 2'-O-methylguanosine-3'-phosphate
  modified_base 13: mod_base = OTHER; note = 2'-O-methylcytidine-3'-phosphate
  modified_base 14: mod_base = OTHER; note = 2'-fluoroadenosine-3'-phosphate
  modified_base 15: mod_base = OTHER; note = 2'-O-methyladenosine-3'-phosphate
  modified_base 16: mod_base = OTHER; note = 2'-fluorouridine-3'-phosphate
  modified_base 17: mod_base = OTHER; note = 2'-O-methylguanosine-3'-phosphate
  modified_base 18: mod_base = OTHER; note = 2'-O-methylcytidine-3'-phosphate
  modified_base 19: mod_base = OTHER; note = 2'-O-methylcytidine-3'-phosphate
  modified_base 20: mod_base = OTHER; note = 2'-O-methyluridine-3'-phosphate
  modified_base 21: mod_base = OTHER; note = 2'-O-methylguanosine-3'-phosphorothioate
  modified_base 22: mod_base = OTHER; note = 2'-O-methylguanosine-3'-phosphorothioate
  modified_base 23: mod_base = OTHER; note = 2'-O-methylguanosine-3'-phosphate
agaaagaggcagcaatgcctggg

SEQ ID NO: 589 - RNA, 23 nt, synthetic construct
  source 1..23: mol_type = other RNA
  modified_base 1: mod_base = OTHER; note = 2'-O-methyladenosine-3'-phosphorothioate
  modified_base 2: mod_base = OTHER; note = 2'-fluorouridine -3'-phosphorothioate
  modified_base 3: mod_base = OTHER; note = 2'-O-methylguanosine-3'-phosphate
  modified_base 4: mod_base = OTHER; note = 2'-O-methyladenosine-3'-phosphate
  modified_base 5: mod_base = OTHER; note = 2'-O-methyladenosine-3'-phosphate
  modified_base 6: mod_base = OTHER; note = 2'-fluoroguanosine-3'-phosphate
  modified_base 7: mod_base = OTHER; note = 2'-O-methyladenosine-3'-phosphate
  modified_base 8: mod_base = OTHER; note = 2'-fluorocytidine-3'-phosphate
  modified_base 9: mod_base = OTHER; note = 2'-fluoroguanosine-3'-phosphate
  modified_base 10: mod_base = OTHER; note = 2'-O-methylguanosine-3'-phosphate
  modified_base 11: mod_base = OTHER; note = 2'-O-methylcytidine-3'-phosphate
  modified_base 12: mod_base = OTHER; note = 2'-O-methyladenosine-3'-phosphate
  modified_base 13: mod_base = OTHER; note = 2'-O-methylguanosine-3'-phosphate
  modified_base 14: mod_base = OTHER; note = 2'-fluoroadenosine-3'-phosphate
  modified_base 15: mod_base = OTHER; note = 2'-O-methyladenosine-3'-phosphate
  modified_base 16: mod_base = OTHER; note = 2'-fluorouridine-3'-phosphate
  modified_base 17: mod_base = OTHER; note = 2'-O-methylguanosine-3'-phosphate
  modified_base 18: mod_base = OTHER; note = 2'-O-methylguanosine-3'-phosphate
  modified_base 19: mod_base = OTHER; note = 2'-O-methyladenosine-3'-phosphate
  modified_base 20: mod_base = OTHER; note = 2'-O-methyladenosine-3'-phosphate
  modified_base 21: mod_base = OTHER; note = 2'-O-methyladenosine-3'-phosphorothioate
  modified_base 22: mod_base = OTHER; note = 2'-O-methylguanosine-3'-phosphorothioate
  modified_base 23: mod_base = OTHER; note = 2'-O-methyladenosine-3'-phosphate
atgaagacggcagaatggaaaga

SEQ ID NO: 590 - RNA, 23 nt, synthetic construct
  source 1..23: mol_type = other RNA
  modified_base 1: mod_base = OTHER; note = 2'-O-methyladenosine-3'-phosphorothioate
  modified_base 2: mod_base = OTHER; note = 2'-fluorocytidine-3'-phosphorothioate
  modified_base 3: mod_base = OTHER; note = 2'-O-methyluridine-3'-phosphate
  modified_base 4: mod_base = OTHER; note = 2'-O-methyluridine-3'-phosphate
  modified_base 5: mod_base = OTHER; note = 2'-O-methyluridine-3'-phosphate
  modified_base 6: mod_base = OTHER; note = 2'-fluoroguanosine-3'-phosphate
  modified_base 7: mod_base = OTHER; note = 2'-O-methyladenosine-3'-phosphate
  modified_base 8: mod_base = OTHER; note = 2'-fluoroguanosine-3'-phosphate
  modified_base 9: mod_base = OTHER; note = 2'-fluoroguanosine-3'-phosphate
  modified_base 10: mod_base = OTHER; note = 2'-O-methyladenosine-3'-phosphate
  modified_base 11: mod_base = OTHER; note = 2'-O-methylguanosine-3'-phosphate
  modified_base 12: mod_base = OTHER; note = 2'-O-methylguanosine-3'-phosphate
  modified_base 13: mod_base = OTHER; note = 2'-O-methylcytidine-3'-phosphate
  modified_base 14: mod_base = OTHER; note = 2'-fluorouridine-3'-phosphate
  modified_base 15: mod_base = OTHER; note = 2'-O-methylguanosine-3'-phosphate
  modified_base 16: mod_base = OTHER; note = 2'-fluoroadenosine-3'-phosphate
  modified_base 17: mod_base = OTHER; note = 2'-O-methyladenosine-3'-phosphate
  modified_base 18: mod_base = OTHER; note = 2'-O-methylguanosine-3'-phosphate
  modified_base 19: mod_base = OTHER; note = 2'-O-methyladenosine-3'-phosphate
  modified_base 20: mod_base = OTHER; note = 2'-O-methylcytidine-3'-phosphate
  modified_base 21: mod_base = OTHER; note = 2'-O-methylguanosine-3'-phosphorothioate
  modified_base 22: mod_base = OTHER; note = 2'-O-methylguanosine-3'-phosphorothioate
  modified_base 23: mod_base = OTHER; note = 2'-O-methylcytidine-3'-phosphate
actttgaggaggctgaagacggc

SEQ ID NO: 591 - RNA, 23 nt, synthetic construct
  source 1..23: mol_type = other RNA
  modified_base 1: mod_base = OTHER; note = 2'-O-methyladenosine-3'-phosphorothioate
  modified_base 2: mod_base = OTHER; note = 2'-fluoroadenosine-3'-phosphorothioate
  modified_base 3: mod_base = OTHER; note = 2'-O-methyladenosine-3'-phosphate
  modified_base 4: mod_base = OTHER; note = 2'-O-methylguanosine-3'-phosphate
  modified_base 5: mod_base = OTHER; note = 2'-O-methylguanosine-3'-phosphate
  modified_base 6: mod_base = OTHER; note = 2'-fluoroadenosine-3'-phosphate
  modified_base 7: mod_base = OTHER; note = 2'-O-methyluridine-3'-phosphate
  modified_base 8: mod_base = OTHER; note = 2'-fluorouridine-3'-phosphate
  modified_base 9: mod_base = OTHER; note = 2'-fluoroguanosine-3'-phosphate
  modified_base 10: mod_base = OTHER; note = 2'-O-methyluridine-3'-phosphate
  modified_base 11: mod_base = OTHER; note = 2'-O-methyluridine-3'-phosphate
  modified_base 12: mod_base = OTHER; note = 2'-O-methylguanosine-3'-phosphate
  modified_base 13: mod_base = OTHER; note = 2'-O-methylguanosine-3'-phosphate
  modified_base 14: mod_base = OTHER; note = 2'-fluorocytidine-3'-phosphate
  modified_base 15: mod_base = OTHER; note = 2'-O-methyluridine-3'-phosphate
  modified_base 16: mod_base = OTHER; note = 2'-fluorouridine-3'-phosphate
  modified_base 17: mod_base = OTHER; note = 2'-O-methyluridine-3'-phosphate
  modified_base 18: mod_base = OTHER; note = 2'-O-methylguanosine-3'-phosphate
  modified_base 19: mod_base = OTHER; note = 2'-O-methyladenosine-3'-phosphate
  modified_base 20: mod_base = OTHER; note = 2'-O-methylguanosine-3'-phosphate
  modified_base 21: mod_base = OTHER; note = 2'-O-methylguanosine-3'-phosphorothioate
  modified_base 22: mod_base = OTHER; note = 2'-O-methyladenosine-3'-phosphorothioate
  modified_base 23: mod_base = OTHER; note = 2'-O-methylguanosine-3'-phosphate
aaaggattgttggctttgaggag

SEQ ID NO: 592 - RNA, 23 nt, synthetic construct
  source 1..23: mol_type = other RNA
  modified_base 1: mod_base = OTHER; note = 2'-O-methyladenosine-3'-phosphorothioate
  modified_base 2: mod_base = OTHER; note = 2'-fluoroguanosine-3'-phosphorothioate
  modified_base 3: mod_base = OTHER; note = 2'-O-methylguanosine-3'-phosphate
  modified_base 4: mod_base = OTHER; note = 2'-O-methyladenosine-3'-phosphate
  modified_base 5: mod_base = OTHER; note = 2'-O-methylguanosine-3'-phosphate
  modified_base 6: mod_base = OTHER; note = 2'-fluoroguanosine-3'-phosphate
  modified_base 7: mod_base = OTHER; note = 2'-O-methyluridine-3'-phosphate
  modified_base 8: mod_base = OTHER; note = 2'-fluoroadenosine-3'-phosphate
  modified_base 9: mod_base = OTHER; note = 2'-fluorocytidine-3'-phosphate
  modified_base 10: mod_base = OTHER; note = 2'-O-methyluridine-3'-phosphate
  modified_base 11: mod_base = OTHER; note = 2'-O-methylguanosine-3'-phosphate
  modified_base 12: mod_base = OTHER; note = 2'-O-methylguanosine-3'-phosphate
  modified_base 13: mod_base = OTHER; note = 2'-O-methylcytidine-3'-phosphate
  modified_base 14: mod_base = OTHER; note = 2'-fluoroadenosine-3'-phosphate
  modified_base 15: mod_base = OTHER; note = 2'-O-methylguanosine-3'-phosphate
  modified_base 16: mod_base = OTHER; note = 2'-fluoroguanosine-3'-phosphate
  modified_base 17: mod_base = OTHER; note = 2'-O-methylcytidine-3'-phosphate
  modified_base 18: mod_base = OTHER; note = 2'-O-methylcytidine-3'-phosphate
  modified_base 19: mod_base = OTHER; note = 2'-O-methyladenosine-3'-phosphate
  modified_base 20: mod_base = OTHER; note = 2'-O-methyladenosine-3'-phosphate
  modified_base 21: mod_base = OTHER; note = 2'-O-methylguanosine-3'-phosphorothioate
  modified_base 22: mod_base = OTHER; note = 2'-O-methylguanosine-3'-phosphorothioate
  modified_base 23: mod_base = OTHER; note = 2'-O-methyladenosine-3'-phosphate
aggaggtactggcaggccaagga

SEQ ID NO: 593 - RNA, 23 nt, synthetic construct
  source 1..23: mol_type = other RNA
  modified_base 1: mod_base = OTHER; note = 2'-O-methyladenosine-3'-phosphorothioate
  modified_base 2: mod_base = OTHER; note = 2'-fluorouridine -3'-phosphorothioate
  modified_base 3: mod_base = OTHER; note = 2'-O-methyladenosine-3'-phosphate
  modified_base 4: mod_base = OTHER; note = 2'-O-methylguanosine-3'-phosphate
  modified_base 5: mod_base = OTHER; note = 2'-O-methylguanosine-3'-phosphate
  modified_base 6: mod_base = OTHER; note = 2'-fluoroguanosine-3'-phosphate
  modified_base 7: mod_base = OTHER; note = 2'-O-methyladenosine-3'-phosphate
  modified_base 8: mod_base = OTHER; note = 2'-fluorocytidine-3'-phosphate
  modified_base 9: mod_base = OTHER; note = 2'-fluoroadenosine-3'-phosphate
  modified_base 10: mod_base = OTHER; note = 2'-O-methylcytidine-3'-phosphate
  modified_base 11: mod_base = OTHER; note = 2'-O-methyladenosine-3'-phosphate
  modified_base 12: mod_base = OTHER; note = 2'-O-methyladenosine-3'-phosphate
  modified_base 13: mod_base = OTHER; note = 2'-O-methylcytidine-3'-phosphate
  modified_base 14: mod_base = OTHER; note = 2'-fluoroadenosine-3'-phosphate
  modified_base 15: mod_base = OTHER; note = 2'-O-methylguanosine-3'-phosphate
  modified_base 16: mod_base = OTHER; note = 2'-fluoroguanosine-3'-phosphate
  modified_base 17: mod_base = OTHER; note = 2'-O-methyladenosine-3'-phosphate
  modified_base 18: mod_base = OTHER; note = 2'-O-methylguanosine-3'-phosphate
  modified_base 19: mod_base = OTHER; note = 2'-O-methylguanosine-3'-phosphate
  modified_base 20: mod_base = OTHER; note = 2'-O-methyluridine-3'-phosphate
  modified_base 21: mod_base = OTHER; note = 2'-O-methyladenosine-3'-phosphorothioate
  modified_base 22: mod_base = OTHER; note = 2'-O-methylcytidine-3'-phosphorothioate
  modified_base 23: mod_base = OTHER; note = 2'-O-methyluridine-3'-phosphate
atagggacacaacaggaggtact

SEQ ID NO: 594 - RNA, 23 nt, synthetic construct
  source 1..23: mol_type = other RNA
  modified_base 1: mod_base = OTHER; note = 2'-O-methyladenosine-3'-phosphorothioate
  modified_base 2: mod_base = OTHER; note = 2'-fluorocytidine-3'-phosphorothioate
  modified_base 3: mod_base = OTHER; note = 2'-O-methylcytidine-3'-phosphate
  modified_base 4: mod_base = OTHER; note = 2'-O-methyluridine-3'-phosphate
  modified_base 5: mod_base = OTHER; note = 2'-O-methyluridine-3'-phosphate
  modified_base 6: mod_base = OTHER; note = 2'-fluorocytidine-3'-phosphate
  modified_base 7: mod_base = OTHER; note = 2'-O-methylguanosine-3'-phosphate
  modified_base 8: mod_base = OTHER; note = 2'-fluoroguanosine-3'-phosphate
  modified_base 9: mod_base = OTHER; note = 2'-fluoroguanosine-3'-phosphate
  modified_base 10: mod_base = OTHER; note = 2'-O-methylcytidine-3'-phosphate
  modified_base 11: mod_base = OTHER; note = 2'-O-methyladenosine-3'-phosphate
  modified_base 12: mod_base = OTHER; note = 2'-O-methylguanosine-3'-phosphate
  modified_base 13: mod_base = OTHER; note = 2'-O-methyluridine-3'-phosphate
  modified_base 14: mod_base = OTHER; note = 2'-fluoroadenosine-3'-phosphate
  modified_base 15: mod_base = OTHER; note = 2'-O-methylguanosine-3'-phosphate
  modified_base 16: mod_base = OTHER; note = 2'-fluoroguanosine-3'-phosphate
  modified_base 17: mod_base = OTHER; note = 2'-O-methylguanosine-3'-phosphate
  modified_base 18: mod_base = OTHER; note = 2'-O-methyladenosine-3'-phosphate
  modified_base 19: mod_base = OTHER; note = 2'-O-methylcytidine-3'-phosphate
  modified_base 20: mod_base = OTHER; note = 2'-O-methyladenosine-3'-phosphate
  modified_base 21: mod_base = OTHER; note = 2'-O-methylcytidine-3'-phosphorothioate
  modified_base 22: mod_base = OTHER; note = 2'-O-methyladenosine-3'-phosphorothioate
  modified_base 23: mod_base = OTHER; note = 2'-O-methyladenosine-3'-phosphate
accttcgggcagtagggacacaa

SEQ ID NO: 595 - RNA, 23 nt, synthetic construct
  source 1..23: mol_type = other RNA
  modified_base 1: mod_base = OTHER; note = 2'-O-methyladenosine-3'-phosphorothioate
  modified_base 2: mod_base = OTHER; note = 2'-fluorouridine -3'-phosphorothioate
  modified_base 3: mod_base = OTHER; note = 2'-O-methylcytidine-3'-phosphate
  modified_base 4: mod_base = OTHER; note = 2'-O-methylcytidine-3'-phosphate
  modified_base 5: mod_base = OTHER; note = 2'-O-methyladenosine-3'-phosphate
  modified_base 6: mod_base = OTHER; note = 2'-fluoroguanosine-3'-phosphate
  modified_base 7: mod_base = OTHER; note = 2'-O-methylguanosine-3'-phosphate
  modified_base 8: mod_base = OTHER; note = 2'-fluorouridine-3'-phosphate
  modified_base 9: mod_base = OTHER; note = 2'-fluoroadenosine-3'-phosphate
  modified_base 10: mod_base = OTHER; note = 2'-O-methylguanosine-3'-phosphate
  modified_base 11: mod_base = OTHER; note = 2'-O-methyladenosine-3'-phosphate
  modified_base 12: mod_base = OTHER; note = 2'-O-methylguanosine-3'-phosphate
  modified_base 13: mod_base = OTHER; note = 2'-O-methylguanosine-3'-phosphate
  modified_base 14: mod_base = OTHER; note = 2'-fluoroadenosine-3'-phosphate
  modified_base 15: mod_base = OTHER; note = 2'-O-methylguanosine-3'-phosphate
  modified_base 16: mod_base = OTHER; note = 2'-fluoroadenosine-3'-phosphate
  modified_base 17: mod_base = OTHER; note = 2'-O-methylguanosine-3'-phosphate
  modified_base 18: mod_base = OTHER; note = 2'-O-methyladenosine-3'-phosphate
  modified_base 19: mod_base = OTHER; note = 2'-O-methylguanosine-3'-phosphate
  modified_base 20: mod_base = OTHER; note = 2'-O-methyladenosine-3'-phosphate
  modified_base 21: mod_base = OTHER; note = 2'-O-methylguanosine-3'-phosphorothioate
  modified_base 22: mod_base = OTHER; note = 2'-O-methylguanosine-3'-phosphorothioate
  modified_base 23: mod_base = OTHER; note = 2'-O-methylguanosine-3'-phosphate
atccaggtagaggagagagaggg

SEQ ID NO: 596 - RNA, 23 nt, synthetic construct
  source 1..23: mol_type = other RNA
  modified_base 1: mod_base = OTHER; note = 2'-O-methyladenosine-3'-phosphorothioate
  modified_base 2: mod_base = OTHER; note = 2'-fluorouridine -3'-phosphorothioate
  modified_base 3: mod_base = OTHER; note = 2'-O-methyluridine-3'-phosphate
  modified_base 4: mod_base = OTHER; note = 2'-O-methylguanosine-3'-phosphate
  modified_base 5: mod_base = OTHER; note = 2'-O-methylcytidine-3'-phosphate
  modified_base 6: mod_base = OTHER; note = 2'-fluorocytidine-3'-phosphate
  modified_base 7: mod_base = OTHER; note = 2'-O-methyladenosine-3'-phosphate
  modified_base 8: mod_base = OTHER; note = 2'-fluorouridine-3'-phosphate
  modified_base 9: mod_base = OTHER; note = 2'-fluorouridine-3'-phosphate
  modified_base 10: mod_base = OTHER; note = 2'-O-methyladenosine-3'-phosphate
  modified_base 11: mod_base = OTHER; note = 2'-O-methyluridine-3'-phosphate
  modified_base 12: mod_base = OTHER; note = 2'-O-methylguanosine-3'-phosphate
  modified_base 13: mod_base = OTHER; note = 2'-O-methyladenosine-3'-phosphate
  modified_base 14: mod_base = OTHER; note = 2'-fluorouridine-3'-phosphate
  modified_base 15: mod_base = OTHER; note = 2'-O-methylcytidine-3'-phosphate
  modified_base 16: mod_base = OTHER; note = 2'-fluorocytidine-3'-phosphate
  modified_base 17: mod_base = OTHER; note = 2'-O-methyladenosine-3'-phosphate
  modified_base 18: mod_base = OTHER; note = 2'-O-methylguanosine-3'-phosphate
  modified_base 19: mod_base = OTHER; note = 2'-O-methylguanosine-3'-phosphate
  modified_base 20: mod_base = OTHER; note = 2'-O-methyluridine-3'-phosphate
  modified_base 21: mod_base = OTHER; note = 2'-O-methyladenosine-3'-phosphorothioate
  modified_base 22: mod_base = OTHER; note = 2'-O-methylguanosine-3'-phosphorothioate
  modified_base 23: mod_base = OTHER; note = 2'-O-methyladenosine-3'-phosphate
attgccattatgatccaggtaga

SEQ ID NO: 597 - RNA, 23 nt, synthetic construct
  source 1..23: mol_type = other RNA
  modified_base 1: mod_base = OTHER; note = 2'-O-methyladenosine-3'-phosphorothioate
  modified_base 2: mod_base = OTHER; note = 2'-fluoroguanosine-3'-phosphorothioate
  modified_base 3: mod_base = OTHER; note = 2'-O-methyluridine-3'-phosphate
  modified_base 4: mod_base = OTHER; note = 2'-O-methylcytidine-3'-phosphate
  modified_base 5: mod_base = OTHER; note = 2'-O-methyluridine-3'-phosphate
  modified_base 6: mod_base = OTHER; note = 2'-fluorouridine-3'-phosphate
  modified_base 7: mod_base = OTHER; note = 2'-O-methylguanosine-3'-phosphate
  modified_base 8: mod_base = OTHER; note = 2'-fluoroadenosine-3'-phosphate
  modified_base 9: mod_base = OTHER; note = 2'-fluorocytidine-3'-phosphate
  modified_base 10: mod_base = OTHER; note = 2'-O-methylcytidine-3'-phosphate
  modified_base 11: mod_base = OTHER; note = 2'-O-methyladenosine-3'-phosphate
  modified_base 12: mod_base = OTHER; note = 2'-O-methylcytidine-3'-phosphate
  modified_base 13: mod_base = OTHER; note = 2'-O-methyladenosine-3'-phosphate
  modified_base 14: mod_base = OTHER; note = 2'-fluorouridine-3'-phosphate
  modified_base 15: mod_base = OTHER; note = 2'-O-methyluridine-3'-phosphate
  modified_base 16: mod_base = OTHER; note = 2'-fluoroguanosine-3'-phosphate
  modified_base 17: mod_base = OTHER; note = 2'-O-methylcytidine-3'-phosphate
  modified_base 18: mod_base = OTHER; note = 2'-O-methylcytidine-3'-phosphate
  modified_base 19: mod_base = OTHER; note = 2'-O-methyladenosine-3'-phosphate
  modified_base 20: mod_base = OTHER; note = 2'-O-methyluridine-3'-phosphate
  modified_base 21: mod_base = OTHER; note = 2'-O-methyluridine-3'-phosphorothioate
  modified_base 22: mod_base = OTHER; note = 2'-O-methyladenosine-3'-phosphorothioate
  modified_base 23: mod_base = OTHER; note = 2'-O-methyluridine-3'-phosphate
agtcttgaccacattgccattat

SEQ ID NO: 598 - RNA, 23 nt, synthetic construct
  source 1..23: mol_type = other RNA
  modified_base 1: mod_base = OTHER; note = 2'-O-methyladenosine-3'-phosphorothioate
  modified_base 2: mod_base = OTHER; note = 2'-fluoroadenosine-3'-phosphorothioate
  modified_base 3: mod_base = OTHER; note = 2'-O-methyluridine-3'-phosphate
  modified_base 4: mod_base = OTHER; note = 2'-O-methyladenosine-3'-phosphate
  modified_base 5: mod_base = OTHER; note = 2'-O-methyluridine-3'-phosphate
  modified_base 6: mod_base = OTHER; note = 2'-fluorocytidine-3'-phosphate
  modified_base 7: mod_base = OTHER; note = 2'-O-methyluridine-3'-phosphate
  modified_base 8: mod_base = OTHER; note = 2'-fluoroguanosine-3'-phosphate
  modified_base 9: mod_base = OTHER; note = 2'-fluoroguanosine-3'-phosphate
  modified_base 10: mod_base = OTHER; note = 2'-O-methylcytidine-3'-phosphate
  modified_base 11: mod_base = OTHER; note = 2'-O-methyladenosine-3'-phosphate
  modified_base 12: mod_base = OTHER; note = 2'-O-methylcytidine-3'-phosphate
  modified_base 13: mod_base = OTHER; note = 2'-O-methyladenosine-3'-phosphate
  modified_base 14: mod_base = OTHER; note = 2'-fluorouridine-3'-phosphate
  modified_base 15: mod_base = OTHER; note = 2'-O-methylcytidine-3'-phosphate
  modified_base 16: mod_base = OTHER; note = 2'-fluorocytidine-3'-phosphate
  modified_base 17: mod_base = OTHER; note = 2'-O-methylguanosine-3'-phosphate
  modified_base 18: mod_base = OTHER; note = 2'-O-methyluridine-3'-phosphate
  modified_base 19: mod_base = OTHER; note = 2'-O-methylcytidine-3'-phosphate
  modified_base 20: mod_base = OTHER; note = 2'-O-methyluridine-3'-phosphate
  modified_base 21: mod_base = OTHER; note = 2'-O-methyluridine-3'-phosphorothioate
  modified_base 22: mod_base = OTHER; note = 2'-O-methylguanosine-3'-phosphorothioate
  modified_base 23: mod_base = OTHER; note = 2'-O-methyladenosine-3'-phosphate
aatatctggcacatccgtcttga

SEQ ID NO: 599 - RNA, 23 nt, synthetic construct
  source 1..23: mol_type = other RNA
  modified_base 1: mod_base = OTHER; note = 2'-O-methyladenosine-3'-phosphorothioate
  modified_base 2: mod_base = OTHER; note = 2'-fluorocytidine-3'-phosphorothioate
  modified_base 3: mod_base = OTHER; note = 2'-O-methylcytidine-3'-phosphate
  modified_base 4: mod_base = OTHER; note = 2'-O-methyluridine-3'-phosphate
  modified_base 5: mod_base = OTHER; note = 2'-O-methylcytidine-3'-phosphate
  modified_base 6: mod_base = OTHER; note = 2'-fluorocytidine-3'-phosphate
  modified_base 7: mod_base = OTHER; note = 2'-O-methyladenosine-3'-phosphate
  modified_base 8: mod_base = OTHER; note = 2'-fluorocytidine-3'-phosphate
  modified_base 9: mod_base = OTHER; note = 2'-fluorocytidine-3'-phosphate
  modified_base 10: mod_base = OTHER; note = 2'-O-methyladenosine-3'-phosphate
  modified_base 11: mod_base = OTHER; note = 2'-O-methylcytidine-3'-phosphate
  modified_base 12: mod_base = OTHER; note = 2'-O-methylcytidine-3'-phosphate
  modified_base 13: mod_base = OTHER; note = 2'-O-methyladenosine-3'-phosphate
  modified_base 14: mod_base = OTHER; note = 2'-fluorouridine-3'-phosphate
  modified_base 15: mod_base = OTHER; note = 2'-O-methyladenosine-3'-phosphate
  modified_base 16: mod_base = OTHER; note = 2'-fluorouridine-3'-phosphate
  modified_base 17: mod_base = OTHER; note = 2'-O-methylcytidine-3'-phosphate
  modified_base 18: mod_base = OTHER; note = 2'-O-methyluridine-3'-phosphate
  modified_base 19: mod_base = OTHER; note = 2'-O-methylguanosine-3'-phosphate
  modified_base 20: mod_base = OTHER; note = 2'-O-methylguanosine-3'-phosphate
  modified_base 21: mod_base = OTHER; note = 2'-O-methylcytidine-3'-phosphorothioate
  modified_base 22: mod_base = OTHER; note = 2'-O-methyladenosine-3'-phosphorothioate
  modified_base 23: mod_base = OTHER; note = 2'-O-methylcytidine-3'-phosphate
acctccaccaccatatctggcac

SEQ ID NO: 600 - RNA, 23 nt, synthetic construct
  source 1..23: mol_type = other RNA
  modified_base 1: mod_base = OTHER; note = 2'-O-methyladenosine-3'-phosphorothioate
  modified_base 2: mod_base = OTHER; note = 2'-fluorouridine -3'-phosphorothioate
  modified_base 3: mod_base = OTHER; note = 2'-O-methyladenosine-3'-phosphate
  modified_base 4: mod_base = OTHER; note = 2'-O-methylguanosine-3'-phosphate
  modified_base 5: mod_base = OTHER; note = 2'-O-methylcytidine-3'-phosphate
  modified_base 6: mod_base = OTHER; note = 2'-fluorouridine-3'-phosphate
  modified_base 7: mod_base = OTHER; note = 2'-O-methylguanosine-3'-phosphate
  modified_base 8: mod_base = OTHER; note = 2'-fluorocytidine-3'-phosphate
  modified_base 9: mod_base = OTHER; note = 2'-fluoroadenosine-3'-phosphate
  modified_base 10: mod_base = OTHER; note = 2'-O-methylguanosine-3'-phosphate
  modified_base 11: mod_base = OTHER; note = 2'-O-methylcytidine-3'-phosphate
  modified_base 12: mod_base = OTHER; note = 2'-O-methylcytidine-3'-phosphate
  modified_base 13: mod_base = OTHER; note = 2'-O-methyladenosine-3'-phosphate
  modified_base 14: mod_base = OTHER; note = 2'-fluorocytidine-3'-phosphate
  modified_base 15: mod_base = OTHER; note = 2'-O-methyladenosine-3'-phosphate
  modified_base 16: mod_base = OTHER; note = 2'-fluoroguanosine-3'-phosphate
  modified_base 17: mod_base = OTHER; note = 2'-O-methylguanosine-3'-phosphate
  modified_base 18: mod_base = OTHER; note = 2'-O-methylcytidine-3'-phosphate
  modified_base 19: mod_base = OTHER; note = 2'-O-methylcytidine-3'-phosphate
  modified_base 20: mod_base = OTHER; note = 2'-O-methyluridine-3'-phosphate
  modified_base 21: mod_base = OTHER; note = 2'-O-methylcytidine-3'-phosphorothioate
  modified_base 22: mod_base = OTHER; note = 2'-O-methylcytidine-3'-phosphorothioate
  modified_base 23: mod_base = OTHER; note = 2'-O-methyladenosine-3'-phosphate
atagctgcagccacaggcctcca

SEQ ID NO: 601 - RNA, 23 nt, synthetic construct
  source 1..23: mol_type = other RNA
  modified_base 1: mod_base = OTHER; note = 2'-O-methyladenosine-3'-phosphorothioate
  modified_base 2: mod_base = OTHER; note = 2'-fluoroadenosine-3'-phosphorothioate
  modified_base 3: mod_base = OTHER; note = 2'-O-methylguanosine-3'-phosphate
  modified_base 4: mod_base = OTHER; note = 2'-O-methylguanosine-3'-phosphate
  modified_base 5: mod_base = OTHER; note = 2'-O-methyluridine-3'-phosphate
  modified_base 6: mod_base = OTHER; note = 2'-fluorocytidine-3'-phosphate
  modified_base 7: mod_base = OTHER; note = 2'-O-methylcytidine-3'-phosphate
  modified_base 8: mod_base = OTHER; note = 2'-fluorouridine-3'-phosphate
  modified_base 9: mod_base = OTHER; note = 2'-fluorocytidine-3'-phosphate
  modified_base 10: mod_base = OTHER; note = 2'-O-methyluridine-3'-phosphate
  modified_base 11: mod_base = OTHER; note = 2'-O-methyluridine-3'-phosphate
  modified_base 12: mod_base = OTHER; note = 2'-O-methylguanosine-3'-phosphate
  modified_base 13: mod_base = OTHER; note = 2'-O-methylcytidine-3'-phosphate
  modified_base 14: mod_base = OTHER; note = 2'-fluorouridine-3'-phosphate
  modified_base 15: mod_base = OTHER; note = 2'-O-methyladenosine-3'-phosphate
  modified_base 16: mod_base = OTHER; note = 2'-fluoroguanosine-3'-phosphate
  modified_base 17: mod_base = OTHER; note = 2'-O-methylcytidine-3'-phosphate
  modified_base 18: mod_base = OTHER; note = 2'-O-methyluridine-3'-phosphate
  modified_base 19: mod_base = OTHER; note = 2'-O-methylguanosine-3'-phosphate
  modified_base 20: mod_base = OTHER; note = 2'-O-methylcytidine-3'-phosphate
  modified_base 21: mod_base = OTHER; note = 2'-O-methyladenosine-3'-phosphorothioate
  modified_base 22: mod_base = OTHER; note = 2'-O-methylguanosine-3'-phosphorothioate
  modified_base 23: mod_base = OTHER; note = 2'-O-methylcytidine-3'-phosphate
aaggtcctcttgctagctgcagc

SEQ ID NO: 602 - RNA, 23 nt, synthetic construct
  source 1..23: mol_type = other RNA
  modified_base 1: mod_base = OTHER; note = 2'-O-methyladenosine-3'-phosphorothioate
  modified_base 2: mod_base = OTHER; note = 2'-fluorouridine -3'-phosphorothioate
  modified_base 3: mod_base = OTHER; note = 2'-O-methyluridine-3'-phosphate
  modified_base 4: mod_base = OTHER; note = 2'-O-methylguanosine-3'-phosphate
  modified_base 5: mod_base = OTHER; note = 2'-O-methylguanosine-3'-phosphate
  modified_base 6: mod_base = OTHER; note = 2'-fluorouridine-3'-phosphate
  modified_base 7: mod_base = OTHER; note = 2'-O-methylcytidine-3'-phosphate
  modified_base 8: mod_base = OTHER; note = 2'-fluorouridine-3'-phosphate
  modified_base 9: mod_base = OTHER; note = 2'-fluorocytidine-3'-phosphate
  modified_base 10: mod_base = OTHER; note = 2'-O-methyluridine-3'-phosphate
  modified_base 11: mod_base = OTHER; note = 2'-O-methyluridine-3'-phosphate
  modified_base 12: mod_base = OTHER; note = 2'-O-methylcytidine-3'-phosphate
  modified_base 13: mod_base = OTHER; note = 2'-O-methyladenosine-3'-phosphate
  modified_base 14: mod_base = OTHER; note = 2'-fluorocytidine-3'-phosphate
  modified_base 15: mod_base = OTHER; note = 2'-O-methyluridine-3'-phosphate
  modified_base 16: mod_base = OTHER; note = 2'-fluorocytidine-3'-phosphate
  modified_base 17: mod_base = OTHER; note = 2'-O-methylcytidine-3'-phosphate
  modified_base 18: mod_base = OTHER; note = 2'-O-methyladenosine-3'-phosphate
  modified_base 19: mod_base = OTHER; note = 2'-O-methyladenosine-3'-phosphate
  modified_base 20: mod_base = OTHER; note = 2'-O-methyladenosine-3'-phosphate
  modified_base 21: mod_base = OTHER; note = 2'-O-methylguanosine-3'-phosphorothioate
  modified_base 22: mod_base = OTHER; note = 2'-O-methylcytidine-3'-phosphorothioate
  modified_base 23: mod_base = OTHER; note = 2'-O-methylcytidine-3'-phosphate
attggtctcttcactccaaagcc

SEQ ID NO: 603 - RNA, 23 nt, synthetic construct
  source 1..23: mol_type = other RNA
  modified_base 1: mod_base = OTHER; note = 2'-O-methyladenosine-3'-phosphorothioate
  modified_base 2: mod_base = OTHER; note = 2'-fluoroguanosine-3'-phosphorothioate
  modified_base 3: mod_base = OTHER; note = 2'-O-methyladenosine-3'-phosphate
  modified_base 4: mod_base = OTHER; note = 2'-O-methyladenosine-3'-phosphate
  modified_base 5: mod_base = OTHER; note = 2'-O-methyladenosine-3'-phosphate
  modified_base 6: mod_base = OTHER; note = 2'-fluorocytidine-3'-phosphate
  modified_base 7: mod_base = OTHER; note = 2'-O-methyluridine-3'-phosphate
  modified_base 8: mod_base = OTHER; note = 2'-fluorouridine-3'-phosphate
  modified_base 9: mod_base = OTHER; note = 2'-fluorocytidine-3'-phosphate
  modified_base 10: mod_base = OTHER; note = 2'-O-methyladenosine-3'-phosphate
  modified_base 11: mod_base = OTHER; note = 2'-O-methyluridine-3'-phosphate
  modified_base 12: mod_base = OTHER; note = 2'-O-methylcytidine-3'-phosphate
  modified_base 13: mod_base = OTHER; note = 2'-O-methyluridine-3'-phosphate
  modified_base 14: mod_base = OTHER; note = 2'-fluorouridine-3'-phosphate
  modified_base 15: mod_base = OTHER; note = 2'-O-methylguanosine-3'-phosphate
  modified_base 16: mod_base = OTHER; note = 2'-fluoroguanosine-3'-phosphate
  modified_base 17: mod_base = OTHER; note = 2'-O-methyluridine-3'-phosphate
  modified_base 18: mod_base = OTHER; note = 2'-O-methylcytidine-3'-phosphate
  modified_base 19: mod_base = OTHER; note = 2'-O-methyluridine-3'-phosphate
  modified_base 20: mod_base = OTHER; note = 2'-O-methylcytidine-3'-phosphate
  modified_base 21: mod_base = OTHER; note = 2'-O-methyluridine-3'-phosphorothioate
  modified_base 22: mod_base = OTHER; note = 2'-O-methyluridine-3'-phosphorothioate
  modified_base 23: mod_base = OTHER; note = 2'-O-methylcytidine-3'-phosphate
agaaacttcatcttggtctcttc

SEQ ID NO: 604 - RNA, 23 nt, synthetic construct
  source 1..23: mol_type = other RNA
  modified_base 1: mod_base = OTHER; note = 2'-O-methyladenosine-3'-phosphorothioate
  modified_base 2: mod_base = OTHER; note = 2'-fluorocytidine-3'-phosphorothioate
  modified_base 3: mod_base = OTHER; note = 2'-O-methyluridine-3'-phosphate
  modified_base 4: mod_base = OTHER; note = 2'-O-methylcytidine-3'-phosphate
  modified_base 5: mod_base = OTHER; note = 2'-O-methylcytidine-3'-phosphate
  modified_base 6: mod_base = OTHER; note = 2'-fluoroadenosine-3'-phosphate
  modified_base 7: mod_base = OTHER; note = 2'-O-methylguanosine-3'-phosphate
  modified_base 8: mod_base = OTHER; note = 2'-fluorouridine-3'-phosphate
  modified_base 9: mod_base = OTHER; note = 2'-fluorocytidine-3'-phosphate
  modified_base 10: mod_base = OTHER; note = 2'-O-methyladenosine-3'-phosphate
  modified_base 11: mod_base = OTHER; note = 2'-O-methylcytidine-3'-phosphate
  modified_base 12: mod_base = OTHER; note = 2'-O-methyladenosine-3'-phosphate
  modified_base 13: mod_base = OTHER; note = 2'-O-methylguanosine-3'-phosphate
  modified_base 14: mod_base = OTHER; note = 2'-fluoroadenosine-3'-phosphate
  modified_base 15: mod_base = OTHER; note = 2'-O-methyluridine-3'-phosphate
  modified_base 16: mod_base = OTHER; note = 2'-fluoroguanosine-3'-phosphate
  modified_base 17: mod_base = OTHER; note = 2'-O-methylcytidine-3'-phosphate
  modified_base 18: mod_base = OTHER; note = 2'-O-methylcytidine-3'-phosphate
  modified_base 19: mod_base = OTHER; note = 2'-O-methylcytidine-3'-phosphate
  modified_base 20: mod_base = OTHER; note = 2'-O-methyluridine-3'-phosphate
  modified_base 21: mod_base = OTHER; note = 2'-O-methylguanosine-3'-phosphorothioate
  modified_base 22: mod_base = OTHER; note = 2'-O-methyluridine-3'-phosphorothioate
  modified_base 23: mod_base = OTHER; note = 2'-O-methylguanosine-3'-phosphate
actccagtcacagatgccctgtg

SEQ ID NO: 605 - RNA, 23 nt, synthetic construct
  source 1..23: mol_type = other RNA
  modified_base 1: mod_base = OTHER; note = 2'-O-methyladenosine-3'-phosphorothioate
  modified_base 2: mod_base = OTHER; note = 2'-fluoroguanosine-3'-phosphorothioate
  modified_base 3: mod_base = OTHER; note = 2'-O-methyladenosine-3'-phosphate
  modified_base 4: mod_base = OTHER; note = 2'-O-methyluridine-3'-phosphate
  modified_base 5: mod_base = OTHER; note = 2'-O-methylcytidine-3'-phosphate
  modified_base 6: mod_base = OTHER; note = 2'-fluoroadenosine-3'-phosphate
  modified_base 7: mod_base = OTHER; note = 2'-O-methylguanosine-3'-phosphate
  modified_base 8: mod_base = OTHER; note = 2'-fluoroguanosine-3'-phosphate
  modified_base 9: mod_base = OTHER; note = 2'-fluoroadenosine-3'-phosphate
  modified_base 10: mod_base = OTHER; note = 2'-O-methyladenosine-3'-phosphate
  modified_base 11: mod_base = OTHER; note = 2'-O-methyluridine-3'-phosphate
  modified_base 12: mod_base = OTHER; note = 2'-O-methylcytidine-3'-phosphate
  modified_base 13: mod_base = OTHER; note = 2'-O-methyluridine-3'-phosphate
  modified_base 14: mod_base = OTHER; note = 2'-fluoroguanosine-3'-phosphate
  modified_base 15: mod_base = OTHER; note = 2'-O-methyladenosine-3'-phosphate
  modified_base 16: mod_base = OTHER; note = 2'-fluorouridine-3'-phosphate
  modified_base 17: mod_base = OTHER; note = 2'-O-methylguanosine-3'-phosphate
  modified_base 18: mod_base = OTHER; note = 2'-O-methylcytidine-3'-phosphate
  modified_base 19: mod_base = OTHER; note = 2'-O-methylcytidine-3'-phosphate
  modified_base 20: mod_base = OTHER; note = 2'-O-methyluridine-3'-phosphate
  modified_base 21: mod_base = OTHER; note = 2'-O-methylcytidine-3'-phosphorothioate
  modified_base 22: mod_base = OTHER; note = 2'-O-methylcytidine-3'-phosphorothioate
  modified_base 23: mod_base = OTHER; note = 2'-O-methyladenosine-3'-phosphate
agatcaggaatctgatgcctcca

SEQ ID NO: 606 - RNA, 23 nt, synthetic construct
  source 1..23: mol_type = other RNA
  modified_base 1: mod_base = OTHER; note = 2'-O-methyladenosine-3'-phosphorothioate
  modified_base 2: mod_base = OTHER; note = 2'-fluorouridine -3'-phosphorothioate
  modified_base 3: mod_base = OTHER; note = 2'-O-methyluridine-3'-phosphate
  modified_base 4: mod_base = OTHER; note = 2'-O-methylguanosine-3'-phosphate
  modified_base 5: mod_base = OTHER; note = 2'-O-methylcytidine-3'-phosphate
  modified_base 6: mod_base = OTHER; note = 2'-fluorocytidine-3'-phosphate
  modified_base 7: mod_base = OTHER; note = 2'-O-methyladenosine-3'-phosphate
  modified_base 8: mod_base = OTHER; note = 2'-fluoroguanosine-3'-phosphate
  modified_base 9: mod_base = OTHER; note = 2'-fluoroguanosine-3'-phosphate
  modified_base 10: mod_base = OTHER; note = 2'-O-methyluridine-3'-phosphate
  modified_base 11: mod_base = OTHER; note = 2'-O-methylguanosine-3'-phosphate
  modified_base 12: mod_base = OTHER; note = 2'-O-methylguanosine-3'-phosphate
  modified_base 13: mod_base = OTHER; note = 2'-O-methyluridine-3'-phosphate
  modified_base 14: mod_base = OTHER; note = 2'-fluorouridine-3'-phosphate
  modified_base 15: mod_base = OTHER; note = 2'-O-methylguanosine-3'-phosphate
  modified_base 16: mod_base = OTHER; note = 2'-fluorouridine-3'-phosphate
  modified_base 17: mod_base = OTHER; note = 2'-O-methyluridine-3'-phosphate
  modified_base 18: mod_base = OTHER; note = 2'-O-methylguanosine-3'-phosphate
  modified_base 19: mod_base = OTHER; note = 2'-O-methylguanosine-3'-phosphate
  modified_base 20: mod_base = OTHER; note = 2'-O-methylguanosine-3'-phosphate
  modified_base 21: mod_base = OTHER; note = 2'-O-methyluridine-3'-phosphorothioate
  modified_base 22: mod_base = OTHER; note = 2'-O-methyluridine-3'-phosphorothioate
  modified_base 23: mod_base = OTHER; note = 2'-O-methylguanosine-3'-phosphate
attgccaggtggttgttgggttg

SEQ ID NO: 607 - RNA, 23 nt, synthetic construct
  source 1..23: mol_type = other RNA
  modified_base 1: mod_base = OTHER; note = 2'-O-methyladenosine-3'-phosphorothioate
  modified_base 2: mod_base = OTHER; note = 2'-fluoroguanosine-3'-phosphorothioate
  modified_base 3: mod_base = OTHER; note = 2'-O-methyluridine-3'-phosphate
  modified_base 4: mod_base = OTHER; note = 2'-O-methylcytidine-3'-phosphate
  modified_base 5: mod_base = OTHER; note = 2'-O-methyladenosine-3'-phosphate
  modified_base 6: mod_base = OTHER; note = 2'-fluoroadenosine-3'-phosphate
  modified_base 7: mod_base = OTHER; note = 2'-O-methylguanosine-3'-phosphate
  modified_base 8: mod_base = OTHER; note = 2'-fluorouridine-3'-phosphate
  modified_base 9: mod_base = OTHER; note = 2'-fluoroguanosine-3'-phosphate
  modified_base 10: mod_base = OTHER; note = 2'-O-methyladenosine-3'-phosphate
  modified_base 11: mod_base = OTHER; note = 2'-O-methylguanosine-3'-phosphate
  modified_base 12: mod_base = OTHER; note = 2'-O-methyluridine-3'-phosphate
  modified_base 13: mod_base = OTHER; note = 2'-O-methylcytidine-3'-phosphate
  modified_base 14: mod_base = OTHER; note = 2'-fluoroadenosine-3'-phosphate
  modified_base 15: mod_base = OTHER; note = 2'-O-methyluridine-3'-phosphate
  modified_base 16: mod_base = OTHER; note = 2'-fluoroadenosine-3'-phosphate
  modified_base 17: mod_base = OTHER; note = 2'-O-methyluridine-3'-phosphate
  modified_base 18: mod_base = OTHER; note = 2'-O-methyluridine-3'-phosphate
  modified_base 19: mod_base = OTHER; note = 2'-O-methylguanosine-3'-phosphate
  modified_base 20: mod_base = OTHER; note = 2'-O-methylcytidine-3'-phosphate
  modified_base 21: mod_base = OTHER; note = 2'-O-methylcytidine-3'-phosphorothioate
  modified_base 22: mod_base = OTHER; note = 2'-O-methyladenosine-3'-phosphorothioate
  modified_base 23: mod_base = OTHER; note = 2'-O-methylguanosine-3'-phosphate
agtcaagtgagtcatattgccag

SEQ ID NO: 608 - RNA, 23 nt, synthetic construct
  source 1..23: mol_type = other RNA
  modified_base 1: mod_base = OTHER; note = 2'-O-methyladenosine-3'-phosphorothioate
  modified_base 2: mod_base = OTHER; note = 2'-fluoroadenosine-3'-phosphorothioate
  modified_base 3: mod_base = OTHER; note = 2'-O-methylguanosine-3'-phosphate
  modified_base 4: mod_base = OTHER; note = 2'-O-methyladenosine-3'-phosphate
  modified_base 5: mod_base = OTHER; note = 2'-O-methyladenosine-3'-phosphate
  modified_base 6: mod_base = OTHER; note = 2'-fluoroadenosine-3'-phosphate
  modified_base 7: mod_base = OTHER; note = 2'-O-methylguanosine-3'-phosphate
  modified_base 8: mod_base = OTHER; note = 2'-fluorouridine-3'-phosphate
  modified_base 9: mod_base = OTHER; note = 2'-fluoroguanosine-3'-phosphate
  modified_base 10: mod_base = OTHER; note = 2'-O-methylcytidine-3'-phosphate
  modified_base 11: mod_base = OTHER; note = 2'-O-methylcytidine-3'-phosphate
  modified_base 12: mod_base = OTHER; note = 2'-O-methylcytidine-3'-phosphate
  modified_base 13: mod_base = OTHER; note = 2'-O-methyladenosine-3'-phosphate
  modified_base 14: mod_base = OTHER; note = 2'-fluorouridine-3'-phosphate
  modified_base 15: mod_base = OTHER; note = 2'-O-methyluridine-3'-phosphate
  modified_base 16: mod_base = OTHER; note = 2'-fluorouridine-3'-phosphate
  modified_base 17: mod_base = OTHER; note = 2'-O-methylguanosine-3'-phosphate
  modified_base 18: mod_base = OTHER; note = 2'-O-methylguanosine-3'-phosphate
  modified_base 19: mod_base = OTHER; note = 2'-O-methylguanosine-3'-phosphate
  modified_base 20: mod_base = OTHER; note = 2'-O-methyluridine-3'-phosphate
  modified_base 21: mod_base = OTHER; note = 2'-O-methylcytidine-3'-phosphorothioate
  modified_base 22: mod_base = OTHER; note = 2'-O-methylcytidine-3'-phosphorothioate
  modified_base 23: mod_base = OTHER; note = 2'-O-methylcytidine-3'-phosphate
aagaaagtgcccatttgggtccc

SEQ ID NO: 609 - RNA, 23 nt, synthetic construct
  source 1..23: mol_type = other RNA
  modified_base 1: mod_base = OTHER; note = 2'-O-methyladenosine-3'-phosphorothioate
  modified_base 2: mod_base = OTHER; note = 2'-fluoroadenosine-3'-phosphorothioate
  modified_base 3: mod_base = OTHER; note = 2'-O-methylguanosine-3'-phosphate
  modified_base 4: mod_base = OTHER; note = 2'-O-methyladenosine-3'-phosphate
  modified_base 5: mod_base = OTHER; note = 2'-O-methylguanosine-3'-phosphate
  modified_base 6: mod_base = OTHER; note = 2'-fluorouridine-3'-phosphate
  modified_base 7: mod_base = OTHER; note = 2'-O-methylcytidine-3'-phosphate
  modified_base 8: mod_base = OTHER; note = 2'-fluorouridine-3'-phosphate
  modified_base 9: mod_base = OTHER; note = 2'-fluorocytidine-3'-phosphate
  modified_base 10: mod_base = OTHER; note = 2'-O-methyladenosine-3'-phosphate
  modified_base 11: mod_base = OTHER; note = 2'-O-methylguanosine-3'-phosphate
  modified_base 12: mod_base = OTHER; note = 2'-O-methyladenosine-3'-phosphate
  modified_base 13: mod_base = OTHER; note = 2'-O-methylcytidine-3'-phosphate
  modified_base 14: mod_base = OTHER; note = 2'-fluoroadenosine-3'-phosphate
  modified_base 15: mod_base = OTHER; note = 2'-O-methyladenosine-3'-phosphate
  modified_base 16: mod_base = OTHER; note = 2'-fluoroguanosine-3'-phosphate
  modified_base 17: mod_base = OTHER; note = 2'-O-methyladenosine-3'-phosphate
  modified_base 18: mod_base = OTHER; note = 2'-O-methyladenosine-3'-phosphate
  modified_base 19: mod_base = OTHER; note = 2'-O-methyladenosine-3'-phosphate
  modified_base 20: mod_base = OTHER; note = 2'-O-methylguanosine-3'-phosphate
  modified_base 21: mod_base = OTHER; note = 2'-O-methyluridine-3'-phosphorothioate
  modified_base 22: mod_base = OTHER; note = 2'-O-methylguanosine-3'-phosphorothioate
  modified_base 23: mod_base = OTHER; note = 2'-O-methylcytidine-3'-phosphate
aagagtctcagacaagaaagtgc

SEQ ID NO: 610 - RNA, 23 nt, synthetic construct
  source 1..23: mol_type = other RNA
  modified_base 1: mod_base = OTHER; note = 2'-O-methyladenosine-3'-phosphorothioate
  modified_base 2: mod_base = OTHER; note = 2'-fluorouridine -3'-phosphorothioate
  modified_base 3: mod_base = OTHER; note = 2'-O-methylguanosine-3'-phosphate
  modified_base 4: mod_base = OTHER; note = 2'-O-methylguanosine-3'-phosphate
  modified_base 5: mod_base = OTHER; note = 2'-O-methyladenosine-3'-phosphate
  modified_base 6: mod_base = OTHER; note = 2'-fluoroadenosine-3'-phosphate
  modified_base 7: mod_base = OTHER; note = 2'-O-methyluridine-3'-phosphate
  modified_base 8: mod_base = OTHER; note = 2'-fluoroadenosine-3'-phosphate
  modified_base 9: mod_base = OTHER; note = 2'-fluoroadenosine-3'-phosphate
  modified_base 10: mod_base = OTHER; note = 2'-O-methylguanosine-3'-phosphate
  modified_base 11: mod_base = OTHER; note = 2'-O-methylcytidine-3'-phosphate
  modified_base 12: mod_base = OTHER; note = 2'-O-methylcytidine-3'-phosphate
  modified_base 13: mod_base = OTHER; note = 2'-O-methyladenosine-3'-phosphate
  modified_base 14: mod_base = OTHER; note = 2'-fluoroguanosine-3'-phosphate
  modified_base 15: mod_base = OTHER; note = 2'-O-methyladenosine-3'-phosphate
  modified_base 16: mod_base = OTHER; note = 2'-fluoroguanosine-3'-phosphate
  modified_base 17: mod_base = OTHER; note = 2'-O-methyluridine-3'-phosphate
  modified_base 18: mod_base = OTHER; note = 2'-O-methylcytidine-3'-phosphate
  modified_base 19: mod_base = OTHER; note = 2'-O-methyluridine-3'-phosphate
  modified_base 20: mod_base = OTHER; note = 2'-O-methylcytidine-3'-phosphate
  modified_base 21: mod_base = OTHER; note = 2'-O-methyladenosine-3'-phosphorothioate
  modified_base 22: mod_base = OTHER; note = 2'-O-methylguanosine-3'-phosphorothioate
  modified_base 23: mod_base = OTHER; note = 2'-O-methyladenosine-3'-phosphate
atggaataagccagagtctcaga

SEQ ID NO: 611 - RNA, 23 nt, synthetic construct
  source 1..23: mol_type = other RNA
  modified_base 1: mod_base = OTHER; note = 2'-O-methyladenosine-3'-phosphorothioate
  modified_base 2: mod_base = OTHER; note = 2'-fluoroadenosine-3'-phosphorothioate
  modified_base 3: mod_base = OTHER; note = 2'-O-methyladenosine-3'-phosphate
  modified_base 4: mod_base = OTHER; note = 2'-O-methylcytidine-3'-phosphate
  modified_base 5: mod_base = OTHER; note = 2'-O-methyladenosine-3'-phosphate
  modified_base 6: mod_base = OTHER; note = 2'-fluorocytidine-3'-phosphate
  modified_base 7: mod_base = OTHER; note = 2'-O-methyladenosine-3'-phosphate
  modified_base 8: mod_base = OTHER; note = 2'-fluorouridine-3'-phosphate
  modified_base 9: mod_base = OTHER; note = 2'-fluorocytidine-3'-phosphate
  modified_base 10: mod_base = OTHER; note = 2'-O-methyladenosine-3'-phosphate
  modified_base 11: mod_base = OTHER; note = 2'-O-methylguanosine-3'-phosphate
  modified_base 12: mod_base = OTHER; note = 2'-O-methylcytidine-3'-phosphate
  modified_base 13: mod_base = OTHER; note = 2'-O-methylcytidine-3'-phosphate
  modified_base 14: mod_base = OTHER; note = 2'-fluoroadenosine-3'-phosphate
  modified_base 15: mod_base = OTHER; note = 2'-O-methyladenosine-3'-phosphate
  modified_base 16: mod_base = OTHER; note = 2'-fluorocytidine-3'-phosphate
  modified_base 17: mod_base = OTHER; note = 2'-O-methylcytidine-3'-phosphate
  modified_base 18: mod_base = OTHER; note = 2'-O-methyluridine-3'-phosphate
  modified_base 19: mod_base = OTHER; note = 2'-O-methylguanosine-3'-phosphate
  modified_base 20: mod_base = OTHER; note = 2'-O-methylguanosine-3'-phosphate
  modified_base 21: mod_base = OTHER; note = 2'-O-methyladenosine-3'-phosphorothioate
  modified_base 22: mod_base = OTHER; note = 2'-O-methyladenosine-3'-phosphorothioate
  modified_base 23: mod_base = OTHER; note = 2'-O-methyluridine-3'-phosphate
aaacacatcagccaacctggaat

SEQ ID NO: 612 - RNA, 23 nt, synthetic construct
  source 1..23: mol_type = other RNA
  modified_base 1: mod_base = OTHER; note = 2'-O-methyladenosine-3'-phosphorothioate
  modified_base 2: mod_base = OTHER; note = 2'-fluorouridine -3'-phosphorothioate
  modified_base 3: mod_base = OTHER; note = 2'-O-methyluridine-3'-phosphate
  modified_base 4: mod_base = OTHER; note = 2'-O-methyluridine-3'-phosphate
  modified_base 5: mod_base = OTHER; note = 2'-O-methyladenosine-3'-phosphate
  modified_base 6: mod_base = OTHER; note = 2'-fluorocytidine-3'-phosphate
  modified_base 7: mod_base = OTHER; note = 2'-O-methylcytidine-3'-phosphate
  modified_base 8: mod_base = OTHER; note = 2'-fluorocytidine-3'-phosphate
  modified_base 9: mod_base = OTHER; note = 2'-fluoroadenosine-3'-phosphate
  modified_base 10: mod_base = OTHER; note = 2'-O-methyluridine-3'-phosphate
  modified_base 11: mod_base = OTHER; note = 2'-O-methylcytidine-3'-phosphate
  modified_base 12: mod_base = OTHER; note = 2'-O-methyluridine-3'-phosphate
  modified_base 13: mod_base = OTHER; note = 2'-O-methylcytidine-3'-phosphate
  modified_base 14: mod_base = OTHER; note = 2'-fluorocytidine-3'-phosphate
  modified_base 15: mod_base = OTHER; note = 2'-O-methylcytidine-3'-phosphate
  modified_base 16: mod_base = OTHER; note = 2'-fluoroadenosine-3'-phosphate
  modified_base 17: mod_base = OTHER; note = 2'-O-methyladenosine-3'-phosphate
  modified_base 18: mod_base = OTHER; note = 2'-O-methylcytidine-3'-phosphate
  modified_base 19: mod_base = OTHER; note = 2'-O-methyladenosine-3'-phosphate
  modified_base 20: mod_base = OTHER; note = 2'-O-methylcytidine-3'-phosphate
  modified_base 21: mod_base = OTHER; note = 2'-O-methyladenosine-3'-phosphorothioate
  modified_base 22: mod_base = OTHER; note = 2'-O-methyluridine-3'-phosphorothioate
  modified_base 23: mod_base = OTHER; note = 2'-O-methylcytidine-3'-phosphate
atttacccatctcccaacacatc

SEQ ID NO: 613 - RNA, 23 nt, synthetic construct
  source 1..23: mol_type = other RNA
  modified_base 1: mod_base = OTHER; note = 2'-O-methyladenosine-3'-phosphorothioate
  modified_base 2: mod_base = OTHER; note = 2'-fluorouridine -3'-phosphorothioate
  modified_base 3: mod_base = OTHER; note = 2'-O-methyluridine-3'-phosphate
  modified_base 4: mod_base = OTHER; note = 2'-O-methyluridine-3'-phosphate
  modified_base 5: mod_base = OTHER; note = 2'-O-methyladenosine-3'-phosphate
  modified_base 6: mod_base = OTHER; note = 2'-fluoroguanosine-3'-phosphate
  modified_base 7: mod_base = OTHER; note = 2'-O-methyladenosine-3'-phosphate
  modified_base 8: mod_base = OTHER; note = 2'-fluoroadenosine-3'-phosphate
  modified_base 9: mod_base = OTHER; note = 2'-fluoroguanosine-3'-phosphate
  modified_base 10: mod_base = OTHER; note = 2'-O-methyladenosine-3'-phosphate
  modified_base 11: mod_base = OTHER; note = 2'-O-methyladenosine-3'-phosphate
  modified_base 12: mod_base = OTHER; note = 2'-O-methyladenosine-3'-phosphate
  modified_base 13: mod_base = OTHER; note = 2'-O-methylcytidine-3'-phosphate
  modified_base 14: mod_base = OTHER; note = 2'-fluoroguanosine-3'-phosphate
  modified_base 15: mod_base = OTHER; note = 2'-O-methylcytidine-3'-phosphate
  modified_base 16: mod_base = OTHER; note = 2'-fluorouridine-3'-phosphate
  modified_base 17: mod_base = OTHER; note = 2'-O-methyluridine-3'-phosphate
  modified_base 18: mod_base = OTHER; note = 2'-O-methyluridine-3'-phosphate
  modified_base 19: mod_base = OTHER; note = 2'-O-methyladenosine-3'-phosphate
  modified_base 20: mod_base = OTHER; note = 2'-O-methylcytidine-3'-phosphate
  modified_base 21: mod_base = OTHER; note = 2'-O-methylcytidine-3'-phosphorothioate
  modified_base 22: mod_base = OTHER; note = 2'-O-methylcytidine-3'-phosphorothioate
  modified_base 23: mod_base = OTHER; note = 2'-O-methyladenosine-3'-phosphate
atttagaagaaacgctttaccca

SEQ ID NO: 614 - RNA, 23 nt, synthetic construct
  source 1..23: mol_type = other RNA
  modified_base 1: mod_base = OTHER; note = 2'-O-methyladenosine-3'-phosphorothioate
  modified_base 2: mod_base = OTHER; note = 2'-fluoroguanosine-3'-phosphorothioate
  modified_base 3: mod_base = OTHER; note = 2'-O-methyladenosine-3'-phosphate
  modified_base 4: mod_base = OTHER; note = 2'-O-methyladenosine-3'-phosphate
  modified_base 5: mod_base = OTHER; note = 2'-O-methyladenosine-3'-phosphate
  modified_base 6: mod_base = OTHER; note = 2'-fluorouridine-3'-phosphate
  modified_base 7: mod_base = OTHER; note = 2'-O-methylcytidine-3'-phosphate
  modified_base 8: mod_base = OTHER; note = 2'-fluoroadenosine-3'-phosphate
  modified_base 9: mod_base = OTHER; note = 2'-fluorouridine-3'-phosphate
  modified_base 10: mod_base = OTHER; note = 2'-O-methylguanosine-3'-phosphate
  modified_base 11: mod_base = OTHER; note = 2'-O-methylcytidine-3'-phosphate
  modified_base 12: mod_base = OTHER; note = 2'-O-methyluridine-3'-phosphate
  modified_base 13: mod_base = OTHER; note = 2'-O-methyluridine-3'-phosphate
  modified_base 14: mod_base = OTHER; note = 2'-fluorouridine-3'-phosphate
  modified_base 15: mod_base = OTHER; note = 2'-O-methylcytidine-3'-phosphate
  modified_base 16: mod_base = OTHER; note = 2'-fluorouridine-3'-phosphate
  modified_base 17: mod_base = OTHER; note = 2'-O-methylguanosine-3'-phosphate
  modified_base 18: mod_base = OTHER; note = 2'-O-methylguanosine-3'-phosphate
  modified_base 19: mod_base = OTHER; note = 2'-O-methylguanosine-3'-phosphate
  modified_base 20: mod_base = OTHER; note = 2'-O-methyluridine-3'-phosphate
  modified_base 21: mod_base = OTHER; note = 2'-O-methyladenosine-3'-phosphorothioate
  modified_base 22: mod_base = OTHER; note = 2'-O-methylguanosine-3'-phosphorothioate
  modified_base 23: mod_base = OTHER; note = 2'-O-methyladenosine-3'-phosphate
agaaatcatgctttctgggtaga

SEQ ID NO: 615 - RNA, 23 nt, synthetic construct
  source 1..23: mol_type = other RNA
  modified_base 1: mod_base = OTHER; note = 2'-O-methyladenosine-3'-phosphorothioate
  modified_base 2: mod_base = OTHER; note = 2'-fluoroadenosine-3'-phosphorothioate
  modified_base 3: mod_base = OTHER; note = 2'-O-methylguanosine-3'-phosphate
  modified_base 4: mod_base = OTHER; note = 2'-O-methylguanosine-3'-phosphate
  modified_base 5: mod_base = OTHER; note = 2'-O-methyladenosine-3'-phosphate
  modified_base 6: mod_base = OTHER; note = 2'-fluorocytidine-3'-phosphate
  modified_base 7: mod_base = OTHER; note = 2'-O-methyluridine-3'-phosphate
  modified_base 8: mod_base = OTHER; note = 2'-fluorouridine-3'-phosphate
  modified_base 9: mod_base = OTHER; note = 2'-fluoroadenosine-3'-phosphate
  modified_base 10: mod_base = OTHER; note = 2'-O-methylguanosine-3'-phosphate
  modified_base 11: mod_base = OTHER; note = 2'-O-methylguanosine-3'-phosphate
  modified_base 12: mod_base = OTHER; note = 2'-O-methylguanosine-3'-phosphate
  modified_base 13: mod_base = OTHER; note = 2'-O-methylcytidine-3'-phosphate
  modified_base 14: mod_base = OTHER; note = 2'-fluoroadenosine-3'-phosphate
  modified_base 15: mod_base = OTHER; note = 2'-O-methylguanosine-3'-phosphate
  modified_base 16: mod_base = OTHER; note = 2'-fluoroguanosine-3'-phosphate
  modified_base 17: mod_base = OTHER; note = 2'-O-methyladenosine-3'-phosphate
  modified_base 18: mod_base = OTHER; note = 2'-O-methyladenosine-3'-phosphate
  modified_base 19: mod_base = OTHER; note = 2'-O-methyladenosine-3'-phosphate
  modified_base 20: mod_base = OTHER; note = 2'-O-methyluridine-3'-phosphate
  modified_base 21: mod_base = OTHER; note = 2'-O-methylcytidine-3'-phosphorothioate
  modified_base 22: mod_base = OTHER; note = 2'-O-methyladenosine-3'-phosphorothioate
  modified_base 23: mod_base = OTHER; note = 2'-O-methyluridine-3'-phosphate
aaggacttagggcaggaaatcat

SEQ ID NO: 616 - RNA, 23 nt, synthetic construct
  source 1..23: mol_type = other RNA
  modified_base 1: mod_base = OTHER; note = 2'-O-methyladenosine-3'-phosphorothioate
  modified_base 2: mod_base = OTHER; note = 2'-fluorouridine -3'-phosphorothioate
  modified_base 3: mod_base = OTHER; note = 2'-O-methylguanosine-3'-phosphate
  modified_base 4: mod_base = OTHER; note = 2'-O-methyladenosine-3'-phosphate
  modified_base 5: mod_base = OTHER; note = 2'-O-methylcytidine-3'-phosphate
  modified_base 6: mod_base = OTHER; note = 2'-fluoroadenosine-3'-phosphate
  modified_base 7: mod_base = OTHER; note = 2'-O-methyluridine-3'-phosphate
  modified_base 8: mod_base = OTHER; note = 2'-fluorocytidine-3'-phosphate
  modified_base 9: mod_base = OTHER; note = 2'-fluorouridine-3'-phosphate
  modified_base 10: mod_base = OTHER; note = 2'-O-methyluridine-3'-phosphate
  modified_base 11: mod_base = OTHER; note = 2'-O-methylcytidine-3'-phosphate
  modified_base 12: mod_base = OTHER; note = 2'-O-methyluridine-3'-phosphate
  modified_base 13: mod_base = OTHER; note = 2'-O-methylcytidine-3'-phosphate
  modified_base 14: mod_base = OTHER; note = 2'-fluoroadenosine-3'-phosphate
  modified_base 15: mod_base = OTHER; note = 2'-O-methylcytidine-3'-phosphate
  modified_base 16: mod_base = OTHER; note = 2'-fluoroadenosine-3'-phosphate
  modified_base 17: mod_base = OTHER; note = 2'-O-methylguanosine-3'-phosphate
  modified_base 18: mod_base = OTHER; note = 2'-O-methylguanosine-3'-phosphate
  modified_base 19: mod_base = OTHER; note = 2'-O-methyladenosine-3'-phosphate
  modified_base 20: mod_base = OTHER; note = 2'-O-methylcytidine-3'-phosphate
  modified_base 21: mod_base = OTHER; note = 2'-O-methyluridine-3'-phosphorothioate
  modified_base 22: mod_base = OTHER; note = 2'-O-methyluridine-3'-phosphorothioate
  modified_base 23: mod_base = OTHER; note = 2'-O-methyladenosine-3'-phosphate
atgacatcttctcacaggactta

SEQ ID NO: 617 - RNA, 23 nt, synthetic construct
  source 1..23: mol_type = other RNA
  modified_base 1: mod_base = OTHER; note = 2'-O-methyladenosine-3'-phosphorothioate
  modified_base 2: mod_base = OTHER; note = 2'-fluorocytidine-3'-phosphorothioate
  modified_base 3: mod_base = OTHER; note = 2'-O-methylcytidine-3'-phosphate
  modified_base 4: mod_base = OTHER; note = 2'-O-methyluridine-3'-phosphate
  modified_base 5: mod_base = OTHER; note = 2'-O-methylcytidine-3'-phosphate
  modified_base 6: mod_base = OTHER; note = 2'-fluorocytidine-3'-phosphate
  modified_base 7: mod_base = OTHER; note = 2'-O-methylcytidine-3'-phosphate
  modified_base 8: mod_base = OTHER; note = 2'-fluorouridine-3'-phosphate
  modified_base 9: mod_base = OTHER; note = 2'-fluorocytidine-3'-phosphate
  modified_base 10: mod_base = OTHER; note = 2'-O-methylcytidine-3'-phosphate
  modified_base 11: mod_base = OTHER; note = 2'-O-methylcytidine-3'-phosphate
  modified_base 12: mod_base = OTHER; note = 2'-O-methyluridine-3'-phosphate
  modified_base 13: mod_base = OTHER; note = 2'-O-methyladenosine-3'-phosphate
  modified_base 14: mod_base = OTHER; note = 2'-fluoroguanosine-3'-phosphate
  modified_base 15: mod_base = OTHER; note = 2'-O-methyluridine-3'-phosphate
  modified_base 16: mod_base = OTHER; note = 2'-fluorocytidine-3'-phosphate
  modified_base 17: mod_base = OTHER; note = 2'-O-methylcytidine-3'-phosphate
  modified_base 18: mod_base = OTHER; note = 2'-O-methylcytidine-3'-phosphate
  modified_base 19: mod_base = OTHER; note = 2'-O-methyluridine-3'-phosphate
  modified_base 20: mod_base = OTHER; note = 2'-O-methylguanosine-3'-phosphate
  modified_base 21: mod_base = OTHER; note = 2'-O-methyladenosine-3'-phosphorothioate
  modified_base 22: mod_base = OTHER; note = 2'-O-methylcytidine-3'-phosphorothioate
  modified_base 23: mod_base = OTHER; note = 2'-O-methyladenosine-3'-phosphate
acctccctccctagtccctgaca

SEQ ID NO: 618 - RNA, 23 nt, synthetic construct
  source 1..23: mol_type = other RNA
  modified_base 1: mod_base = OTHER; note = 2'-O-methyladenosine-3'-phosphorothioate
  modified_base 2: mod_base = OTHER; note = 2'-fluorouridine -3'-phosphorothioate
  modified_base 3: mod_base = OTHER; note = 2'-O-methyluridine-3'-phosphate
  modified_base 4: mod_base = OTHER; note = 2'-O-methylguanosine-3'-phosphate
  modified_base 5: mod_base = OTHER; note = 2'-O-methylguanosine-3'-phosphate
  modified_base 6: mod_base = OTHER; note = 2'-fluoroguanosine-3'-phosphate
  modified_base 7: mod_base = OTHER; note = 2'-O-methyladenosine-3'-phosphate
  modified_base 8: mod_base = OTHER; note = 2'-fluoroguanosine-3'-phosphate
  modified_base 9: mod_base = OTHER; note = 2'-fluoroadenosine-3'-phosphate
  modified_base 10: mod_base = OTHER; note = 2'-O-methylguanosine-3'-phosphate
  modified_base 11: mod_base = OTHER; note = 2'-O-methylguanosine-3'-phosphate
  modified_base 12: mod_base = OTHER; note = 2'-O-methylcytidine-3'-phosphate
  modified_base 13: mod_base = OTHER; note = 2'-O-methyluridine-3'-phosphate
  modified_base 14: mod_base = OTHER; note = 2'-fluoroadenosine-3'-phosphate
  modified_base 15: mod_base = OTHER; note = 2'-O-methyladenosine-3'-phosphate
  modified_base 16: mod_base = OTHER; note = 2'-fluoroguanosine-3'-phosphate
  modified_base 17: mod_base = OTHER; note = 2'-O-methyluridine-3'-phosphate
  modified_base 18: mod_base = OTHER; note = 2'-O-methyladenosine-3'-phosphate
  modified_base 19: mod_base = OTHER; note = 2'-O-methyladenosine-3'-phosphate
  modified_base 20: mod_base = OTHER; note = 2'-O-methyluridine-3'-phosphate
  modified_base 21: mod_base = OTHER; note = 2'-O-methyluridine-3'-phosphorothioate
  modified_base 22: mod_base = OTHER; note = 2'-O-methyluridine-3'-phosphorothioate
  modified_base 23: mod_base = OTHER; note = 2'-O-methyluridine-3'-phosphate
attgggagaggctaagtaatttt

SEQ ID NO: 619 - RNA, 23 nt, synthetic construct
  source 1..23: mol_type = other RNA
  modified_base 1: mod_base = OTHER; note = 2'-O-methyladenosine-3'-phosphorothioate
  modified_base 2: mod_base = OTHER; note = 2'-fluorouridine -3'-phosphorothioate
  modified_base 3: mod_base = OTHER; note = 2'-O-methyluridine-3'-phosphate
  modified_base 4: mod_base = OTHER; note = 2'-O-methylguanosine-3'-phosphate
  modified_base 5: mod_base = OTHER; note = 2'-O-methyladenosine-3'-phosphate
  modified_base 6: mod_base = OTHER; note = 2'-fluoroguanosine-3'-phosphate
  modified_base 7: mod_base = OTHER; note = 2'-O-methylguanosine-3'-phosphate
  modified_base 8: mod_base = OTHER; note = 2'-fluoroadenosine-3'-phosphate
  modified_base 9: mod_base = OTHER; note = 2'-fluorocytidine-3'-phosphate
  modified_base 10: mod_base = OTHER; note = 2'-O-methyluridine-3'-phosphate
  modified_base 11: mod_base = OTHER; note = 2'-O-methyluridine-3'-phosphate
  modified_base 12: mod_base = OTHER; note = 2'-O-methyluridine-3'-phosphate
  modified_base 13: mod_base = OTHER; note = 2'-O-methylcytidine-3'-phosphate
  modified_base 14: mod_base = OTHER; note = 2'-fluorouridine-3'-phosphate
  modified_base 15: mod_base = OTHER; note = 2'-O-methylcytidine-3'-phosphate
  modified_base 16: mod_base = OTHER; note = 2'-fluoroadenosine-3'-phosphate
  modified_base 17: mod_base = OTHER; note = 2'-O-methyluridine-3'-phosphate
  modified_base 18: mod_base = OTHER; note = 2'-O-methylcytidine-3'-phosphate
  modified_base 19: mod_base = OTHER; note = 2'-O-methyluridine-3'-phosphate
  modified_base 20: mod_base = OTHER; note = 2'-O-methyluridine-3'-phosphate
  modified_base 21: mod_base = OTHER; note = 2'-O-methylguanosine-3'-phosphorothioate
  modified_base 22: mod_base = OTHER; note = 2'-O-methylguanosine-3'-phosphorothioate
  modified_base 23: mod_base = OTHER; note = 2'-O-methylguanosine-3'-phosphate
attgaggactttctcatcttggg

SEQ ID NO: 620 - RNA, 23 nt, synthetic construct
  source 1..23: mol_type = other RNA
  modified_base 1: mod_base = OTHER; note = 2'-O-methyladenosine-3'-phosphorothioate
  modified_base 2: mod_base = OTHER; note = 2'-fluoroadenosine-3'-phosphorothioate
  modified_base 3: mod_base = OTHER; note = 2'-O-methylcytidine-3'-phosphate
  modified_base 4: mod_base = OTHER; note = 2'-O-methylcytidine-3'-phosphate
  modified_base 5: mod_base = OTHER; note = 2'-O-methyladenosine-3'-phosphate
  modified_base 6: mod_base = OTHER; note = 2'-fluorouridine-3'-phosphate
  modified_base 7: mod_base = OTHER; note = 2'-O-methylcytidine-3'-phosphate
  modified_base 8: mod_base = OTHER; note = 2'-fluorouridine-3'-phosphate
  modified_base 9: mod_base = OTHER; note = 2'-fluoroadenosine-3'-phosphate
  modified_base 10: mod_base = OTHER; note = 2'-O-methyluridine-3'-phosphate
  modified_base 11: mod_base = OTHER; note = 2'-O-methylcytidine-3'-phosphate
  modified_base 12: mod_base = OTHER; note = 2'-O-methyluridine-3'-phosphate
  modified_base 13: mod_base = OTHER; note = 2'-O-methylguanosine-3'-phosphate
  modified_base 14: mod_base = OTHER; note = 2'-fluorocytidine-3'-phosphate
  modified_base 15: mod_base = OTHER; note = 2'-O-methyluridine-3'-phosphate
  modified_base 16: mod_base = OTHER; note = 2'-fluorouridine-3'-phosphate
  modified_base 17: mod_base = OTHER; note = 2'-O-methylcytidine-3'-phosphate
  modified_base 18: mod_base = OTHER; note = 2'-O-methylcytidine-3'-phosphate
  modified_base 19: mod_base = OTHER; note = 2'-O-methyluridine-3'-phosphate
  modified_base 20: mod_base = OTHER; note = 2'-O-methylcytidine-3'-phosphate
  modified_base 21: mod_base = OTHER; note = 2'-O-methylcytidine-3'-phosphorothioate
  modified_base 22: mod_base = OTHER; note = 2'-O-methyluridine-3'-phosphorothioate
  modified_base 23: mod_base = OTHER; note = 2'-O-methylcytidine-3'-phosphate
aaccatctatctgcttcctcctc

SEQ ID NO: 621 - RNA, 23 nt, synthetic construct
  source 1..23: mol_type = other RNA
  modified_base 1: mod_base = OTHER; note = 2'-O-methyladenosine-3'-phosphorothioate
  modified_base 2: mod_base = OTHER; note = 2'-fluorouridine -3'-phosphorothioate
  modified_base 3: mod_base = OTHER; note = 2'-O-methyluridine-3'-phosphate
  modified_base 4: mod_base = OTHER; note = 2'-O-methyladenosine-3'-phosphate
  modified_base 5: mod_base = OTHER; note = 2'-O-methylcytidine-3'-phosphate
  modified_base 6: mod_base = OTHER; note = 2'-fluorocytidine-3'-phosphate
  modified_base 7: mod_base = OTHER; note = 2'-O-methylcytidine-3'-phosphate
  modified_base 8: mod_base = OTHER; note = 2'-fluorouridine-3'-phosphate
  modified_base 9: mod_base = OTHER; note = 2'-fluoroguanosine-3'-phosphate
  modified_base 10: mod_base = OTHER; note = 2'-O-methylcytidine-3'-phosphate
  modified_base 11: mod_base = OTHER; note = 2'-O-methyluridine-3'-phosphate
  modified_base 12: mod_base = OTHER; note = 2'-O-methyluridine-3'-phosphate
  modified_base 13: mod_base = OTHER; note = 2'-O-methylcytidine-3'-phosphate
  modified_base 14: mod_base = OTHER; note = 2'-fluoroadenosine-3'-phosphate
  modified_base 15: mod_base = OTHER; note = 2'-O-methyladenosine-3'-phosphate
  modified_base 16: mod_base = OTHER; note = 2'-fluoroguanosine-3'-phosphate
  modified_base 17: mod_base = OTHER; note = 2'-O-methylcytidine-3'-phosphate
  modified_base 18: mod_base = OTHER; note = 2'-O-methylcytidine-3'-phosphate
  modified_base 19: mod_base = OTHER; note = 2'-O-methyluridine-3'-phosphate
  modified_base 20: mod_base = OTHER; note = 2'-O-methylguanosine-3'-phosphate
  modified_base 21: mod_base = OTHER; note = 2'-O-methylcytidine-3'-phosphorothioate
  modified_base 22: mod_base = OTHER; note = 2'-O-methyluridine-3'-phosphorothioate
  modified_base 23: mod_base = OTHER; note = 2'-O-methylguanosine-3'-phosphate
attaccctgcttcaagcctgctg

SEQ ID NO: 622 - RNA, 23 nt, synthetic construct
  source 1..23: mol_type = other RNA
  modified_base 1: mod_base = OTHER; note = 2'-O-methyladenosine-3'-phosphorothioate
  modified_base 2: mod_base = OTHER; note = 2'-fluoroguanosine-3'-phosphorothioate
  modified_base 3: mod_base = OTHER; note = 2'-O-methylguanosine-3'-phosphate
  modified_base 4: mod_base = OTHER; note = 2'-O-methylcytidine-3'-phosphate
  modified_base 5: mod_base = OTHER; note = 2'-O-methylcytidine-3'-phosphate
  modified_base 6: mod_base = OTHER; note = 2'-fluoroadenosine-3'-phosphate
  modified_base 7: mod_base = OTHER; note = 2'-O-methylguanosine-3'-phosphate
  modified_base 8: mod_base = OTHER; note = 2'-fluorocytidine-3'-phosphate
  modified_base 9: mod_base = OTHER; note = 2'-fluorocytidine-3'-phosphate
  modified_base 10: mod_base = OTHER; note = 2'-O-methyluridine-3'-phosphate
  modified_base 11: mod_base = OTHER; note = 2'-O-methylguanosine-3'-phosphate
  modified_base 12: mod_base = OTHER; note = 2'-O-methylcytidine-3'-phosphate
  modified_base 13: mod_base = OTHER; note = 2'-O-methyluridine-3'-phosphate
  modified_base 14: mod_base = OTHER; note = 2'-fluorouridine-3'-phosphate
  modified_base 15: mod_base = OTHER; note = 2'-O-methyladenosine-3'-phosphate
  modified_base 16: mod_base = OTHER; note = 2'-fluorocytidine-3'-phosphate
  modified_base 17: mod_base = OTHER; note = 2'-O-methylcytidine-3'-phosphate
  modified_base 18: mod_base = OTHER; note = 2'-O-methylcytidine-3'-phosphate
  modified_base 19: mod_base = OTHER; note = 2'-O-methyluridine-3'-phosphate
  modified_base 20: mod_base = OTHER; note = 2'-O-methylguanosine-3'-phosphate
  modified_base 21: mod_base = OTHER; note = 2'-O-methylcytidine-3'-phosphorothioate
  modified_base 22: mod_base = OTHER; note = 2'-O-methyluridine-3'-phosphorothioate
  modified_base 23: mod_base = OTHER; note = 2'-O-methyluridine-3'-phosphate
aggccagcctgcttaccctgctt

SEQ ID NO: 623 - RNA, 23 nt, synthetic construct
  source 1..23: mol_type = other RNA
  modified_base 1: mod_base = OTHER; note = 2'-O-methyladenosine-3'-phosphorothioate
  modified_base 2: mod_base = OTHER; note = 2'-fluoroadenosine-3'-phosphorothioate
  modified_base 3: mod_base = OTHER; note = 2'-O-methyladenosine-3'-phosphate
  modified_base 4: mod_base = OTHER; note = 2'-O-methylcytidine-3'-phosphate
  modified_base 5: mod_base = OTHER; note = 2'-O-methyladenosine-3'-phosphate
  modified_base 6: mod_base = OTHER; note = 2'-fluoroguanosine-3'-phosphate
  modified_base 7: mod_base = OTHER; note = 2'-O-methylcytidine-3'-phosphate
  modified_base 8: mod_base = OTHER; note = 2'-fluorocytidine-3'-phosphate
  modified_base 9: mod_base = OTHER; note = 2'-fluorocytidine-3'-phosphate
  modified_base 10: mod_base = OTHER; note = 2'-O-methyluridine-3'-phosphate
  modified_base 11: mod_base = OTHER; note = 2'-O-methyluridine-3'-phosphate
  modified_base 12: mod_base = OTHER; note = 2'-O-methyladenosine-3'-phosphate
  modified_base 13: mod_base = OTHER; note = 2'-O-methylcytidine-3'-phosphate
  modified_base 14: mod_base = OTHER; note = 2'-fluorocytidine-3'-phosphate
  modified_base 15: mod_base = OTHER; note = 2'-O-methylcytidine-3'-phosphate
  modified_base 16: mod_base = OTHER; note = 2'-fluorouridine-3'-phosphate
  modified_base 17: mod_base = OTHER; note = 2'-O-methylguanosine-3'-phosphate
  modified_base 18: mod_base = OTHER; note = 2'-O-methylguanosine-3'-phosphate
  modified_base 19: mod_base = OTHER; note = 2'-O-methylguanosine-3'-phosphate
  modified_base 20: mod_base = OTHER; note = 2'-O-methylcytidine-3'-phosphate
  modified_base 21: mod_base = OTHER; note = 2'-O-methylcytidine-3'-phosphorothioate
  modified_base 22: mod_base = OTHER; note = 2'-O-methyladenosine-3'-phosphorothioate
  modified_base 23: mod_base = OTHER; note = 2'-O-methylguanosine-3'-phosphate
aaacagcccttaccctgggccag

SEQ ID NO: 624 - RNA, 23 nt, synthetic construct
  source 1..23: mol_type = other RNA
  modified_base 1: mod_base = OTHER; note = 2'-O-methyladenosine-3'-phosphorothioate
  modified_base 2: mod_base = OTHER; note = 2'-fluorocytidine-3'-phosphorothioate
  modified_base 3: mod_base = OTHER; note = 2'-O-methyluridine-3'-phosphate
  modified_base 4: mod_base = OTHER; note = 2'-O-methyluridine-3'-phosphate
  modified_base 5: mod_base = OTHER; note = 2'-O-methyladenosine-3'-phosphate
  modified_base 6: mod_base = OTHER; note = 2'-fluoroadenosine-3'-phosphate
  modified_base 7: mod_base = OTHER; note = 2'-O-methylguanosine-3'-phosphate
  modified_base 8: mod_base = OTHER; note = 2'-fluoroguanosine-3'-phosphate
  modified_base 9: mod_base = OTHER; note = 2'-fluorouridine-3'-phosphate
  modified_base 10: mod_base = OTHER; note = 2'-O-methyladenosine-3'-phosphate
  modified_base 11: mod_base = OTHER; note = 2'-O-methylcytidine-3'-phosphate
  modified_base 12: mod_base = OTHER; note = 2'-O-methylcytidine-3'-phosphate
  modified_base 13: mod_base = OTHER; note = 2'-O-methyluridine-3'-phosphate
  modified_base 14: mod_base = OTHER; note = 2'-fluorocytidine-3'-phosphate
  modified_base 15: mod_base = OTHER; note = 2'-O-methyladenosine-3'-phosphate
  modified_base 16: mod_base = OTHER; note = 2'-fluoroadenosine-3'-phosphate
  modified_base 17: mod_base = OTHER; note = 2'-O-methylcytidine-3'-phosphate
  modified_base 18: mod_base = OTHER; note = 2'-O-methyladenosine-3'-phosphate
  modified_base 19: mod_base = OTHER; note = 2'-O-methylguanosine-3'-phosphate
  modified_base 20: mod_base = OTHER; note = 2'-O-methylcytidine-3'-phosphate
  modified_base 21: mod_base = OTHER; note = 2'-O-methylcytidine-3'-phosphorothioate
  modified_base 22: mod_base = OTHER; note = 2'-O-methylcytidine-3'-phosphorothioate
  modified_base 23: mod_base = OTHER; note = 2'-O-methyluridine-3'-phosphate
acttaaggtacctcaacagccct

SEQ ID NO: 625 - RNA, 23 nt, synthetic construct
  source 1..23: mol_type = other RNA
  modified_base 1: mod_base = OTHER; note = 2'-O-methyladenosine-3'-phosphorothioate
  modified_base 2: mod_base = OTHER; note = 2'-fluorouridine -3'-phosphorothioate
  modified_base 3: mod_base = OTHER; note = 2'-O-methylcytidine-3'-phosphate
  modified_base 4: mod_base = OTHER; note = 2'-O-methyluridine-3'-phosphate
  modified_base 5: mod_base = OTHER; note = 2'-O-methyluridine-3'-phosphate
  modified_base 6: mod_base = OTHER; note = 2'-fluoroguanosine-3'-phosphate
  modified_base 7: mod_base = OTHER; note = 2'-O-methyladenosine-3'-phosphate
  modified_base 8: mod_base = OTHER; note = 2'-fluorocytidine-3'-phosphate
  modified_base 9: mod_base = OTHER; note = 2'-fluorocytidine-3'-phosphate
  modified_base 10: mod_base = OTHER; note = 2'-O-methyluridine-3'-phosphate
  modified_base 11: mod_base = OTHER; note = 2'-O-methyluridine-3'-phosphate
  modified_base 12: mod_base = OTHER; note = 2'-O-methylcytidine-3'-phosphate
  modified_base 13: mod_base = OTHER; note = 2'-O-methylcytidine-3'-phosphate
  modified_base 14: mod_base = OTHER; note = 2'-fluorocytidine-3'-phosphate
  modified_base 15: mod_base = OTHER; note = 2'-O-methyluridine-3'-phosphate
  modified_base 16: mod_base = OTHER; note = 2'-fluorouridine-3'-phosphate
  modified_base 17: mod_base = OTHER; note = 2'-O-methyladenosine-3'-phosphate
  modified_base 18: mod_base = OTHER; note = 2'-O-methyladenosine-3'-phosphate
  modified_base 19: mod_base = OTHER; note = 2'-O-methylguanosine-3'-phosphate
  modified_base 20: mod_base = OTHER; note = 2'-O-methylguanosine-3'-phosphate
  modified_base 21: mod_base = OTHER; note = 2'-O-methyluridine-3'-phosphorothioate
  modified_base 22: mod_base = OTHER; note = 2'-O-methyladenosine-3'-phosphorothioate
  modified_base 23: mod_base = OTHER; note = 2'-O-methylcytidine-3'-phosphate
atcttgaccttcccttaaggtac

SEQ ID NO: 626 - RNA, 23 nt, synthetic construct
  source 1..23: mol_type = other RNA
  modified_base 1: mod_base = OTHER; note = 2'-O-methyladenosine-3'-phosphorothioate
  modified_base 2: mod_base = OTHER; note = 2'-fluorouridine -3'-phosphorothioate
  modified_base 3: mod_base = OTHER; note = 2'-O-methyluridine-3'-phosphate
  modified_base 4: mod_base = OTHER; note = 2'-O-methylguanosine-3'-phosphate
  modified_base 5: mod_base = OTHER; note = 2'-O-methylcytidine-3'-phosphate
  modified_base 6: mod_base = OTHER; note = 2'-fluorocytidine-3'-phosphate
  modified_base 7: mod_base = OTHER; note = 2'-O-methylcytidine-3'-phosphate
  modified_base 8: mod_base = OTHER; note = 2'-fluoroadenosine-3'-phosphate
  modified_base 9: mod_base = OTHER; note = 2'-fluorouridine-3'-phosphate
  modified_base 10: mod_base = OTHER; note = 2'-O-methylcytidine-3'-phosphate
  modified_base 11: mod_base = OTHER; note = 2'-O-methyluridine-3'-phosphate
  modified_base 12: mod_base = OTHER; note = 2'-O-methylcytidine-3'-phosphate
  modified_base 13: mod_base = OTHER; note = 2'-O-methylcytidine-3'-phosphate
  modified_base 14: mod_base = OTHER; note = 2'-fluorocytidine-3'-phosphate
  modified_base 15: mod_base = OTHER; note = 2'-O-methyluridine-3'-phosphate
  modified_base 16: mod_base = OTHER; note = 2'-fluorocytidine-3'-phosphate
  modified_base 17: mod_base = OTHER; note = 2'-O-methyluridine-3'-phosphate
  modified_base 18: mod_base = OTHER; note = 2'-O-methyluridine-3'-phosphate
  modified_base 19: mod_base = OTHER; note = 2'-O-methylguanosine-3'-phosphate
  modified_base 20: mod_base = OTHER; note = 2'-O-methyladenosine-3'-phosphate
  modified_base 21: mod_base = OTHER; note = 2'-O-methylcytidine-3'-phosphorothioate
  modified_base 22: mod_base = OTHER; note = 2'-O-methylcytidine-3'-phosphorothioate
  modified_base 23: mod_base = OTHER; note = 2'-O-methyluridine-3'-phosphate
attgcccatctccctcttgacct

SEQ ID NO: 627 - RNA, 23 nt, synthetic construct
  source 1..23: mol_type = other RNA
  modified_base 1: mod_base = OTHER; note = 2'-O-methyladenosine-3'-phosphorothioate
  modified_base 2: mod_base = OTHER; note = 2'-fluorocytidine-3'-phosphorothioate
  modified_base 3: mod_base = OTHER; note = 2'-O-methylcytidine-3'-phosphate
  modified_base 4: mod_base = OTHER; note = 2'-O-methyluridine-3'-phosphate
  modified_base 5: mod_base = OTHER; note = 2'-O-methyladenosine-3'-phosphate
  modified_base 6: mod_base = OTHER; note = 2'-fluoroadenosine-3'-phosphate
  modified_base 7: mod_base = OTHER; note = 2'-O-methylguanosine-3'-phosphate
  modified_base 8: mod_base = OTHER; note = 2'-fluorocytidine-3'-phosphate
  modified_base 9: mod_base = OTHER; note = 2'-fluoroadenosine-3'-phosphate
  modified_base 10: mod_base = OTHER; note = 2'-O-methyluridine-3'-phosphate
  modified_base 11: mod_base = OTHER; note = 2'-O-methylcytidine-3'-phosphate
  modified_base 12: mod_base = OTHER; note = 2'-O-methylcytidine-3'-phosphate
  modified_base 13: mod_base = OTHER; note = 2'-O-methyluridine-3'-phosphate
  modified_base 14: mod_base = OTHER; note = 2'-fluorocytidine-3'-phosphate
  modified_base 15: mod_base = OTHER; note = 2'-O-methylcytidine-3'-phosphate
  modified_base 16: mod_base = OTHER; note = 2'-fluorocytidine-3'-phosphate
  modified_base 17: mod_base = OTHER; note = 2'-O-methyluridine-3'-phosphate
  modified_base 18: mod_base = OTHER; note = 2'-O-methylcytidine-3'-phosphate
  modified_base 19: mod_base = OTHER; note = 2'-O-methyladenosine-3'-phosphate
  modified_base 20: mod_base = OTHER; note = 2'-O-methylguanosine-3'-phosphate
  modified_base 21: mod_base = OTHER; note = 2'-O-methylcytidine-3'-phosphorothioate
  modified_base 22: mod_base = OTHER; note = 2'-O-methylguanosine-3'-phosphorothioate
  modified_base 23: mod_base = OTHER; note = 2'-O-methylcytidine-3'-phosphate
acctaagcatcctccctcagcgc

SEQ ID NO: 628 - RNA, 23 nt, synthetic construct
  source 1..23: mol_type = other RNA
  modified_base 1: mod_base = OTHER; note = 2'-O-methyladenosine-3'-phosphorothioate
  modified_base 2: mod_base = OTHER; note = 2'-fluorouridine -3'-phosphorothioate
  modified_base 3: mod_base = OTHER; note = 2'-O-methyluridine-3'-phosphate
  modified_base 4: mod_base = OTHER; note = 2'-O-methyluridine-3'-phosphate
  modified_base 5: mod_base = OTHER; note = 2'-O-methyluridine-3'-phosphate
  modified_base 6: mod_base = OTHER; note = 2'-fluorocytidine-3'-phosphate
  modified_base 7: mod_base = OTHER; note = 2'-O-methylcytidine-3'-phosphate
  modified_base 8: mod_base = OTHER; note = 2'-fluorouridine-3'-phosphate
  modified_base 9: mod_base = OTHER; note = 2'-fluoroguanosine-3'-phosphate
  modified_base 10: mod_base = OTHER; note = 2'-O-methyladenosine-3'-phosphate
  modified_base 11: mod_base = OTHER; note = 2'-O-methylcytidine-3'-phosphate
  modified_base 12: mod_base = OTHER; note = 2'-O-methyluridine-3'-phosphate
  modified_base 13: mod_base = OTHER; note = 2'-O-methylcytidine-3'-phosphate
  modified_base 14: mod_base = OTHER; note = 2'-fluorocytidine-3'-phosphate
  modified_base 15: mod_base = OTHER; note = 2'-O-methyluridine-3'-phosphate
  modified_base 16: mod_base = OTHER; note = 2'-fluoroguanosine-3'-phosphate
  modified_base 17: mod_base = OTHER; note = 2'-O-methyluridine-3'-phosphate
  modified_base 18: mod_base = OTHER; note = 2'-O-methyluridine-3'-phosphate
  modified_base 19: mod_base = OTHER; note = 2'-O-methyluridine-3'-phosphate
  modified_base 20: mod_base = OTHER; note = 2'-O-methylcytidine-3'-phosphate
  modified_base 21: mod_base = OTHER; note = 2'-O-methyluridine-3'-phosphorothioate
  modified_base 22: mod_base = OTHER; note = 2'-O-methylguanosine-3'-phosphorothioate
  modified_base 23: mod_base = OTHER; note = 2'-O-methylguanosine-3'-phosphate
attttcctgactcctgtttctgg

SEQ ID NO: 629 - RNA, 23 nt, synthetic construct
  source 1..23: mol_type = other RNA
  modified_base 1: mod_base = OTHER; note = 2'-O-methyladenosine-3'-phosphorothioate
  modified_base 2: mod_base = OTHER; note = 2'-fluorouridine -3'-phosphorothioate
  modified_base 3: mod_base = OTHER; note = 2'-O-methyluridine-3'-phosphate
  modified_base 4: mod_base = OTHER; note = 2'-O-methyladenosine-3'-phosphate
  modified_base 5: mod_base = OTHER; note = 2'-O-methylguanosine-3'-phosphate
  modified_base 6: mod_base = OTHER; note = 2'-fluorouridine-3'-phosphate
  modified_base 7: mod_base = OTHER; note = 2'-O-methylguanosine-3'-phosphate
  modified_base 8: mod_base = OTHER; note = 2'-fluorocytidine-3'-phosphate
  modified_base 9: mod_base = OTHER; note = 2'-fluorocytidine-3'-phosphate
  modified_base 10: mod_base = OTHER; note = 2'-O-methyluridine-3'-phosphate
  modified_base 11: mod_base = OTHER; note = 2'-O-methylcytidine-3'-phosphate
  modified_base 12: mod_base = OTHER; note = 2'-O-methyladenosine-3'-phosphate
  modified_base 13: mod_base = OTHER; note = 2'-O-methyluridine-3'-phosphate
  modified_base 14: mod_base = OTHER; note = 2'-fluorouridine-3'-phosphate
  modified_base 15: mod_base = OTHER; note = 2'-O-methyluridine-3'-phosphate
  modified_base 16: mod_base = OTHER; note = 2'-fluorouridine-3'-phosphate
  modified_base 17: mod_base = OTHER; note = 2'-O-methylcytidine-3'-phosphate
  modified_base 18: mod_base = OTHER; note = 2'-O-methylcytidine-3'-phosphate
  modified_base 19: mod_base = OTHER; note = 2'-O-methyluridine-3'-phosphate
  modified_base 20: mod_base = OTHER; note = 2'-O-methylguanosine-3'-phosphate
  modified_base 21: mod_base = OTHER; note = 2'-O-methyladenosine-3'-phosphorothioate
  modified_base 22: mod_base = OTHER; note = 2'-O-methylcytidine-3'-phosphorothioate
  modified_base 23: mod_base = OTHER; note = 2'-O-methyluridine-3'-phosphate
attagtgcctcattttcctgact

SEQ ID NO: 630 - RNA, 23 nt, synthetic construct
  source 1..23: mol_type = other RNA
  modified_base 1: mod_base = OTHER; note = 2'-O-methyladenosine-3'-phosphorothioate
  modified_base 2: mod_base = OTHER; note = 2'-fluoroadenosine-3'-phosphorothioate
  modified_base 3: mod_base = OTHER; note = 2'-O-methyladenosine-3'-phosphate
  modified_base 4: mod_base = OTHER; note = 2'-O-methylcytidine-3'-phosphate
  modified_base 5: mod_base = OTHER; note = 2'-O-methyluridine-3'-phosphate
  modified_base 6: mod_base = OTHER; note = 2'-fluorouridine-3'-phosphate
  modified_base 7: mod_base = OTHER; note = 2'-O-methylcytidine-3'-phosphate
  modified_base 8: mod_base = OTHER; note = 2'-fluorouridine-3'-phosphate
  modified_base 9: mod_base = OTHER; note = 2'-fluorouridine-3'-phosphate
  modified_base 10: mod_base = OTHER; note = 2'-O-methyladenosine-3'-phosphate
  modified_base 11: mod_base = OTHER; note = 2'-O-methylguanosine-3'-phosphate
  modified_base 12: mod_base = OTHER; note = 2'-O-methylguanosine-3'-phosphate
  modified_base 13: mod_base = OTHER; note = 2'-O-methylcytidine-3'-phosphate
  modified_base 14: mod_base = OTHER; note = 2'-fluorouridine-3'-phosphate
  modified_base 15: mod_base = OTHER; note = 2'-O-methyluridine-3'-phosphate
  modified_base 16: mod_base = OTHER; note = 2'-fluoroadenosine-3'-phosphate
  modified_base 17: mod_base = OTHER; note = 2'-O-methylguanosine-3'-phosphate
  modified_base 18: mod_base = OTHER; note = 2'-O-methyluridine-3'-phosphate
  modified_base 19: mod_base = OTHER; note = 2'-O-methylguanosine-3'-phosphate
  modified_base 20: mod_base = OTHER; note = 2'-O-methylcytidine-3'-phosphate
  modified_base 21: mod_base = OTHER; note = 2'-O-methylcytidine-3'-phosphorothioate
  modified_base 22: mod_base = OTHER; note = 2'-O-methyluridine-3'-phosphorothioate
  modified_base 23: mod_base = OTHER; note = 2'-O-methylcytidine-3'-phosphate
aaacttcttaggcttagtgcctc

SEQ ID NO: 631 - RNA, 23 nt, synthetic construct
  source 1..23: mol_type = other RNA
  modified_base 1: mod_base = OTHER; note = 2'-O-methyladenosine-3'-phosphorothioate
  modified_base 2: mod_base = OTHER; note = 2'-fluoroguanosine-3'-phosphorothioate
  modified_base 3: mod_base = OTHER; note = 2'-O-methyladenosine-3'-phosphate
  modified_base 4: mod_base = OTHER; note = 2'-O-methyladenosine-3'-phosphate
  modified_base 5: mod_base = OTHER; note = 2'-O-methyladenosine-3'-phosphate
  modified_base 6: mod_base = OTHER; note = 2'-fluoroadenosine-3'-phosphate
  modified_base 7: mod_base = OTHER; note = 2'-O-methyladenosine-3'-phosphate
  modified_base 8: mod_base = OTHER; note = 2'-fluorocytidine-3'-phosphate
  modified_base 9: mod_base = OTHER; note = 2'-fluorocytidine-3'-phosphate
  modified_base 10: mod_base = OTHER; note = 2'-O-methyladenosine-3'-phosphate
  modified_base 11: mod_base = OTHER; note = 2'-O-methylguanosine-3'-phosphate
  modified_base 12: mod_base = OTHER; note = 2'-O-methylguanosine-3'-phosphate
  modified_base 13: mod_base = OTHER; note = 2'-O-methylguanosine-3'-phosphate
  modified_base 14: mod_base = OTHER; note = 2'-fluoroadenosine-3'-phosphate
  modified_base 15: mod_base = OTHER; note = 2'-O-methyladenosine-3'-phosphate
  modified_base 16: mod_base = OTHER; note = 2'-fluorocytidine-3'-phosphate
  modified_base 17: mod_base = OTHER; note = 2'-O-methyluridine-3'-phosphate
  modified_base 18: mod_base = OTHER; note = 2'-O-methyluridine-3'-phosphate
  modified_base 19: mod_base = OTHER; note = 2'-O-methylcytidine-3'-phosphate
  modified_base 20: mod_base = OTHER; note = 2'-O-methyluridine-3'-phosphate
  modified_base 21: mod_base = OTHER; note = 2'-O-methyluridine-3'-phosphorothioate
  modified_base 22: mod_base = OTHER; note = 2'-O-methyladenosine-3'-phosphorothioate
  modified_base 23: mod_base = OTHER; note = 2'-O-methylguanosine-3'-phosphate
agaaaaaccagggaacttcttag

SEQ ID NO: 632 - RNA, 23 nt, synthetic construct
  source 1..23: mol_type = other RNA
  modified_base 1: mod_base = OTHER; note = 2'-O-methyladenosine-3'-phosphorothioate
  modified_base 2: mod_base = OTHER; note = 2'-fluorouridine -3'-phosphorothioate
  modified_base 3: mod_base = OTHER; note = 2'-O-methyladenosine-3'-phosphate
  modified_base 4: mod_base = OTHER; note = 2'-O-methyladenosine-3'-phosphate
  modified_base 5: mod_base = OTHER; note = 2'-O-methyladenosine-3'-phosphate
  modified_base 6: mod_base = OTHER; note = 2'-fluorouridine-3'-phosphate
  modified_base 7: mod_base = OTHER; note = 2'-O-methylguanosine-3'-phosphate
  modified_base 8: mod_base = OTHER; note = 2'-fluorocytidine-3'-phosphate
  modified_base 9: mod_base = OTHER; note = 2'-fluorouridine-3'-phosphate
  modified_base 10: mod_base = OTHER; note = 2'-O-methyluridine-3'-phosphate
  modified_base 11: mod_base = OTHER; note = 2'-O-methylguanosine-3'-phosphate
  modified_base 12: mod_base = OTHER; note = 2'-O-methyluridine-3'-phosphate
  modified_base 13: mod_base = OTHER; note = 2'-O-methylcytidine-3'-phosphate
  modified_base 14: mod_base = OTHER; note = 2'-fluorouridine-3'-phosphate
  modified_base 15: mod_base = OTHER; note = 2'-O-methylcytidine-3'-phosphate
  modified_base 16: mod_base = OTHER; note = 2'-fluorocytidine-3'-phosphate
  modified_base 17: mod_base = OTHER; note = 2'-O-methylcytidine-3'-phosphate
  modified_base 18: mod_base = OTHER; note = 2'-O-methyladenosine-3'-phosphate
  modified_base 19: mod_base = OTHER; note = 2'-O-methylguanosine-3'-phosphate
  modified_base 20: mod_base = OTHER; note = 2'-O-methyluridine-3'-phosphate
  modified_base 21: mod_base = OTHER; note = 2'-O-methylguanosine-3'-phosphorothioate
  modified_base 22: mod_base = OTHER; note = 2'-O-methylguanosine-3'-phosphorothioate
  modified_base 23: mod_base = OTHER; note = 2'-O-methylguanosine-3'-phosphate
ataaatgcttgtctcccagtggg

SEQ ID NO: 633 - RNA, 23 nt, synthetic construct
  source 1..23: mol_type = other RNA
  modified_base 1: mod_base = OTHER; note = 2'-O-methyladenosine-3'-phosphorothioate
  modified_base 2: mod_base = OTHER; note = 2'-fluoroguanosine-3'-phosphorothioate
  modified_base 3: mod_base = OTHER; note = 2'-O-methyladenosine-3'-phosphate
  modified_base 4: mod_base = OTHER; note = 2'-O-methyladenosine-3'-phosphate
  modified_base 5: mod_base = OTHER; note = 2'-O-methyladenosine-3'-phosphate
  modified_base 6: mod_base = OTHER; note = 2'-fluoroguanosine-3'-phosphate
  modified_base 7: mod_base = OTHER; note = 2'-O-methyladenosine-3'-phosphate
  modified_base 8: mod_base = OTHER; note = 2'-fluoroadenosine-3'-phosphate
  modified_base 9: mod_base = OTHER; note = 2'-fluoroadenosine-3'-phosphate
  modified_base 10: mod_base = OTHER; note = 2'-O-methylguanosine-3'-phosphate
  modified_base 11: mod_base = OTHER; note = 2'-O-methyluridine-3'-phosphate
  modified_base 12: mod_base = OTHER; note = 2'-O-methyladenosine-3'-phosphate
  modified_base 13: mod_base = OTHER; note = 2'-O-methyluridine-3'-phosphate
  modified_base 14: mod_base = OTHER; note = 2'-fluoroadenosine-3'-phosphate
  modified_base 15: mod_base = OTHER; note = 2'-O-methyladenosine-3'-phosphate
  modified_base 16: mod_base = OTHER; note = 2'-fluoroadenosine-3'-phosphate
  modified_base 17: mod_base = OTHER; note = 2'-O-methyluridine-3'-phosphate
  modified_base 18: mod_base = OTHER; note = 2'-O-methylguanosine-3'-phosphate
  modified_base 19: mod_base = OTHER; note = 2'-O-methylcytidine-3'-phosphate
  modified_base 20: mod_base = OTHER; note = 2'-O-methyluridine-3'-phosphate
  modified_base 21: mod_base = OTHER; note = 2'-O-methyluridine-3'-phosphorothioate
  modified_base 22: mod_base = OTHER; note = 2'-O-methylguanosine-3'-phosphorothioate
  modified_base 23: mod_base = OTHER; note = 2'-O-methyluridine-3'-phosphate
agaaagaaagtataaatgcttgt

SEQ ID NO: 634 - RNA, 23 nt, synthetic construct
  source 1..23: mol_type = other RNA
  modified_base 1: mod_base = OTHER; note = 2'-O-methyladenosine-3'-phosphorothioate
  modified_base 2: mod_base = OTHER; note = 2'-fluoroadenosine-3'-phosphorothioate
  modified_base 3: mod_base = OTHER; note = 2'-O-methylguanosine-3'-phosphate
  modified_base 4: mod_base = OTHER; note = 2'-O-methylcytidine-3'-phosphate
  modified_base 5: mod_base = OTHER; note = 2'-O-methylguanosine-3'-phosphate
  modified_base 6: mod_base = OTHER; note = 2'-fluoroadenosine-3'-phosphate
  modified_base 7: mod_base = OTHER; note = 2'-O-methylguanosine-3'-phosphate
  modified_base 8: mod_base = OTHER; note = 2'-fluoroadenosine-3'-phosphate
  modified_base 9: mod_base = OTHER; note = 2'-fluorocytidine-3'-phosphate
  modified_base 10: mod_base = OTHER; note = 2'-O-methyluridine-3'-phosphate
  modified_base 11: mod_base = OTHER; note = 2'-O-methylcytidine-3'-phosphate
  modified_base 12: mod_base = OTHER; note = 2'-O-methylguanosine-3'-phosphate
  modified_base 13: mod_base = OTHER; note = 2'-O-methyladenosine-3'-phosphate
  modified_base 14: mod_base = OTHER; note = 2'-fluorouridine-3'-phosphate
  modified_base 15: mod_base = OTHER; note = 2'-O-methylcytidine-3'-phosphate
  modified_base 16: mod_base = OTHER; note = 2'-fluorouridine-3'-phosphate
  modified_base 17: mod_base = OTHER; note = 2'-O-methylcytidine-3'-phosphate
  modified_base 18: mod_base = OTHER; note = 2'-O-methyladenosine-3'-phosphate
  modified_base 19: mod_base = OTHER; note = 2'-O-methyladenosine-3'-phosphate
  modified_base 20: mod_base = OTHER; note = 2'-O-methyladenosine-3'-phosphate
  modified_base 21: mod_base = OTHER; note = 2'-O-methyladenosine-3'-phosphorothioate
  modified_base 22: mod_base = OTHER; note = 2'-O-methyladenosine-3'-phosphorothioate
  modified_base 23: mod_base = OTHER; note = 2'-O-methyladenosine-3'-phosphate
aagcgagactcgatctcaaaaaa

SEQ ID NO: 635 - RNA, 23 nt, synthetic construct
  source 1..23: mol_type = other RNA
  modified_base 1: mod_base = OTHER; note = 2'-O-methyladenosine-3'-phosphorothioate
  modified_base 2: mod_base = OTHER; note = 2'-fluoroadenosine-3'-phosphorothioate
  modified_base 3: mod_base = OTHER; note = 2'-O-methylguanosine-3'-phosphate
  modified_base 4: mod_base = OTHER; note = 2'-O-methylcytidine-3'-phosphate
  modified_base 5: mod_base = OTHER; note = 2'-O-methylcytidine-3'-phosphate
  modified_base 6: mod_base = OTHER; note = 2'-fluorouridine-3'-phosphate
  modified_base 7: mod_base = OTHER; note = 2'-O-methylguanosine-3'-phosphate
  modified_base 8: mod_base = OTHER; note = 2'-fluoroguanosine-3'-phosphate
  modified_base 9: mod_base = OTHER; note = 2'-fluorouridine-3'-phosphate
  modified_base 10: mod_base = OTHER; note = 2'-O-methylguanosine-3'-phosphate
  modified_base 11: mod_base = OTHER; note = 2'-O-methyladenosine-3'-phosphate
  modified_base 12: mod_base = OTHER; note = 2'-O-methylcytidine-3'-phosphate
  modified_base 13: mod_base = OTHER; note = 2'-O-methyladenosine-3'-phosphate
  modified_base 14: mod_base = OTHER; note = 2'-fluoroguanosine-3'-phosphate
  modified_base 15: mod_base = OTHER; note = 2'-O-methyladenosine-3'-phosphate
  modified_base 16: mod_base = OTHER; note = 2'-fluoroguanosine-3'-phosphate
  modified_base 17: mod_base = OTHER; note = 2'-O-methylcytidine-3'-phosphate
  modified_base 18: mod_base = OTHER; note = 2'-O-methylguanosine-3'-phosphate
  modified_base 19: mod_base = OTHER; note = 2'-O-methyladenosine-3'-phosphate
  modified_base 20: mod_base = OTHER; note = 2'-O-methylguanosine-3'-phosphate
  modified_base 21: mod_base = OTHER; note = 2'-O-methyladenosine-3'-phosphorothioate
  modified_base 22: mod_base = OTHER; note = 2'-O-methylcytidine-3'-phosphorothioate
  modified_base 23: mod_base = OTHER; note = 2'-O-methyluridine-3'-phosphate
aagcctggtgacagagcgagact

SEQ ID NO: 636 - RNA, 23 nt, synthetic construct
  source 1..23: mol_type = other RNA
  modified_base 1: mod_base = OTHER; note = 2'-O-methyladenosine-3'-phosphorothioate
  modified_base 2: mod_base = OTHER; note = 2'-fluorocytidine-3'-phosphorothioate
  modified_base 3: mod_base = OTHER; note = 2'-O-methyladenosine-3'-phosphate
  modified_base 4: mod_base = OTHER; note = 2'-O-methyladenosine-3'-phosphate
  modified_base 5: mod_base = OTHER; note = 2'-O-methylguanosine-3'-phosphate
  modified_base 6: mod_base = OTHER; note = 2'-fluoroadenosine-3'-phosphate
  modified_base 7: mod_base = OTHER; note = 2'-O-methyluridine-3'-phosphate
  modified_base 8: mod_base = OTHER; note = 2'-fluorocytidine-3'-phosphate
  modified_base 9: mod_base = OTHER; note = 2'-fluoroguanosine-3'-phosphate
  modified_base 10: mod_base = OTHER; note = 2'-O-methyluridine-3'-phosphate
  modified_base 11: mod_base = OTHER; note = 2'-O-methylguanosine-3'-phosphate
  modified_base 12: mod_base = OTHER; note = 2'-O-methyluridine-3'-phosphate
  modified_base 13: mod_base = OTHER; note = 2'-O-methylcytidine-3'-phosphate
  modified_base 14: mod_base = OTHER; note = 2'-fluoroadenosine-3'-phosphate
  modified_base 15: mod_base = OTHER; note = 2'-O-methylcytidine-3'-phosphate
  modified_base 16: mod_base = OTHER; note = 2'-fluorouridine-3'-phosphate
  modified_base 17: mod_base = OTHER; note = 2'-O-methylguanosine-3'-phosphate
  modified_base 18: mod_base = OTHER; note = 2'-O-methylcytidine-3'-phosphate
  modified_base 19: mod_base = OTHER; note = 2'-O-methyladenosine-3'-phosphate
  modified_base 20: mod_base = OTHER; note = 2'-O-methylcytidine-3'-phosphate
  modified_base 21: mod_base = OTHER; note = 2'-O-methyluridine-3'-phosphorothioate
  modified_base 22: mod_base = OTHER; note = 2'-O-methylcytidine-3'-phosphorothioate
  modified_base 23: mod_base = OTHER; note = 2'-O-methylcytidine-3'-phosphate
acaagatcgtgtcactgcactcc

SEQ ID NO: 637 - RNA, 23 nt, synthetic construct
  source 1..23: mol_type = other RNA
  modified_base 1: mod_base = OTHER; note = 2'-O-methyladenosine-3'-phosphorothioate
  modified_base 2: mod_base = OTHER; note = 2'-fluoroadenosine-3'-phosphorothioate
  modified_base 3: mod_base = OTHER; note = 2'-O-methylguanosine-3'-phosphate
  modified_base 4: mod_base = OTHER; note = 2'-O-methyladenosine-3'-phosphate
  modified_base 5: mod_base = OTHER; note = 2'-O-methylcytidine-3'-phosphate
  modified_base 6: mod_base = OTHER; note = 2'-fluoroguanosine-3'-phosphate
  modified_base 7: mod_base = OTHER; note = 2'-O-methylguanosine-3'-phosphate
  modified_base 8: mod_base = OTHER; note = 2'-fluoroadenosine-3'-phosphate
  modified_base 9: mod_base = OTHER; note = 2'-fluoroguanosine-3'-phosphate
  modified_base 10: mod_base = OTHER; note = 2'-O-methylguanosine-3'-phosphate
  modified_base 11: mod_base = OTHER; note = 2'-O-methyluridine-3'-phosphate
  modified_base 12: mod_base = OTHER; note = 2'-O-methyluridine-3'-phosphate
  modified_base 13: mod_base = OTHER; note = 2'-O-methylguanosine-3'-phosphate
  modified_base 14: mod_base = OTHER; note = 2'-fluorocytidine-3'-phosphate
  modified_base 15: mod_base = OTHER; note = 2'-O-methyladenosine-3'-phosphate
  modified_base 16: mod_base = OTHER; note = 2'-fluoroguanosine-3'-phosphate
  modified_base 17: mod_base = OTHER; note = 2'-O-methyluridine-3'-phosphate
  modified_base 18: mod_base = OTHER; note = 2'-O-methylguanosine-3'-phosphate
  modified_base 19: mod_base = OTHER; note = 2'-O-methyladenosine-3'-phosphate
  modified_base 20: mod_base = OTHER; note = 2'-O-methylguanosine-3'-phosphate
  modified_base 21: mod_base = OTHER; note = 2'-O-methylcytidine-3'-phosphorothioate
  modified_base 22: mod_base = OTHER; note = 2'-O-methylcytidine-3'-phosphorothioate
  modified_base 23: mod_base = OTHER; note = 2'-O-methyladenosine-3'-phosphate
aagacggaggttgcagtgagcca

SEQ ID NO: 638 - RNA, 23 nt, synthetic construct
  source 1..23: mol_type = other RNA
  modified_base 1: mod_base = OTHER; note = 2'-O-methyladenosine-3'-phosphorothioate
  modified_base 2: mod_base = OTHER; note = 2'-fluorouridine -3'-phosphorothioate
  modified_base 3: mod_base = OTHER; note = 2'-O-methyluridine-3'-phosphate
  modified_base 4: mod_base = OTHER; note = 2'-O-methylguanosine-3'-phosphate
  modified_base 5: mod_base = OTHER; note = 2'-O-methyladenosine-3'-phosphate
  modified_base 6: mod_base = OTHER; note = 2'-fluoroadenosine-3'-phosphate
  modified_base 7: mod_base = OTHER; note = 2'-O-methylcytidine-3'-phosphate
  modified_base 8: mod_base = OTHER; note = 2'-fluorocytidine-3'-phosphate
  modified_base 9: mod_base = OTHER; note = 2'-fluorocytidine-3'-phosphate
  modified_base 10: mod_base = OTHER; note = 2'-O-methyladenosine-3'-phosphate
  modified_base 11: mod_base = OTHER; note = 2'-O-methylguanosine-3'-phosphate
  modified_base 12: mod_base = OTHER; note = 2'-O-methylguanosine-3'-phosphate
  modified_base 13: mod_base = OTHER; note = 2'-O-methyladenosine-3'-phosphate
  modified_base 14: mod_base = OTHER; note = 2'-fluoroguanosine-3'-phosphate
  modified_base 15: mod_base = OTHER; note = 2'-O-methyladenosine-3'-phosphate
  modified_base 16: mod_base = OTHER; note = 2'-fluorocytidine-3'-phosphate
  modified_base 17: mod_base = OTHER; note = 2'-O-methylguanosine-3'-phosphate
  modified_base 18: mod_base = OTHER; note = 2'-O-methylguanosine-3'-phosphate
  modified_base 19: mod_base = OTHER; note = 2'-O-methyladenosine-3'-phosphate
  modified_base 20: mod_base = OTHER; note = 2'-O-methylguanosine-3'-phosphate
  modified_base 21: mod_base = OTHER; note = 2'-O-methylguanosine-3'-phosphorothioate
  modified_base 22: mod_base = OTHER; note = 2'-O-methyluridine-3'-phosphorothioate
  modified_base 23: mod_base = OTHER; note = 2'-O-methyluridine-3'-phosphate
attgaacccaggagacggaggtt

SEQ ID NO: 639 - RNA, 23 nt, synthetic construct
  source 1..23: mol_type = other RNA
  modified_base 1: mod_base = OTHER; note = 2'-O-methyladenosine-3'-phosphorothioate
  modified_base 2: mod_base = OTHER; note = 2'-fluorocytidine-3'-phosphorothioate
  modified_base 3: mod_base = OTHER; note = 2'-O-methyluridine-3'-phosphate
  modified_base 4: mod_base = OTHER; note = 2'-O-methylcytidine-3'-phosphate
  modified_base 5: mod_base = OTHER; note = 2'-O-methylguanosine-3'-phosphate
  modified_base 6: mod_base = OTHER; note = 2'-fluoroguanosine-3'-phosphate
  modified_base 7: mod_base = OTHER; note = 2'-O-methylguanosine-3'-phosphate
  modified_base 8: mod_base = OTHER; note = 2'-fluoroadenosine-3'-phosphate
  modified_base 9: mod_base = OTHER; note = 2'-fluoroguanosine-3'-phosphate
  modified_base 10: mod_base = OTHER; note = 2'-O-methylguanosine-3'-phosphate
  modified_base 11: mod_base = OTHER; note = 2'-O-methylcytidine-3'-phosphate
  modified_base 12: mod_base = OTHER; note = 2'-O-methyluridine-3'-phosphate
  modified_base 13: mod_base = OTHER; note = 2'-O-methylguanosine-3'-phosphate
  modified_base 14: mod_base = OTHER; note = 2'-fluoroadenosine-3'-phosphate
  modified_base 15: mod_base = OTHER; note = 2'-O-methylguanosine-3'-phosphate
  modified_base 16: mod_base = OTHER; note = 2'-fluoroguanosine-3'-phosphate
  modified_base 17: mod_base = OTHER; note = 2'-O-methylcytidine-3'-phosphate
  modified_base 18: mod_base = OTHER; note = 2'-O-methyladenosine-3'-phosphate
  modified_base 19: mod_base = OTHER; note = 2'-O-methylguanosine-3'-phosphate
  modified_base 20: mod_base = OTHER; note = 2'-O-methyladenosine-3'-phosphate
  modified_base 21: mod_base = OTHER; note = 2'-O-methyladenosine-3'-phosphorothioate
  modified_base 22: mod_base = OTHER; note = 2'-O-methylguanosine-3'-phosphorothioate
  modified_base 23: mod_base = OTHER; note = 2'-O-methyladenosine-3'-phosphate
actcgggaggctgaggcagaaga

SEQ ID NO: 640 - RNA, 23 nt, synthetic construct
  source 1..23: mol_type = other RNA
  modified_base 1: mod_base = OTHER; note = 2'-O-methyladenosine-3'-phosphorothioate
  modified_base 2: mod_base = OTHER; note = 2'-fluoroadenosine-3'-phosphorothioate
  modified_base 3: mod_base = OTHER; note = 2'-O-methylguanosine-3'-phosphate
  modified_base 4: mod_base = OTHER; note = 2'-O-methyladenosine-3'-phosphate
  modified_base 5: mod_base = OTHER; note = 2'-O-methyladenosine-3'-phosphate
  modified_base 6: mod_base = OTHER; note = 2'-fluoroguanosine-3'-phosphate
  modified_base 7: mod_base = OTHER; note = 2'-O-methyladenosine-3'-phosphate
  modified_base 8: mod_base = OTHER; note = 2'-fluoroadenosine-3'-phosphate
  modified_base 9: mod_base = OTHER; note = 2'-fluorouridine-3'-phosphate
  modified_base 10: mod_base = OTHER; note = 2'-O-methylcytidine-3'-phosphate
  modified_base 11: mod_base = OTHER; note = 2'-O-methyladenosine-3'-phosphate
  modified_base 12: mod_base = OTHER; note = 2'-O-methylcytidine-3'-phosphate
  modified_base 13: mod_base = OTHER; note = 2'-O-methyluridine-3'-phosphate
  modified_base 14: mod_base = OTHER; note = 2'-fluorouridine-3'-phosphate
  modified_base 15: mod_base = OTHER; note = 2'-O-methylguanosine-3'-phosphate
  modified_base 16: mod_base = OTHER; note = 2'-fluoroadenosine-3'-phosphate
  modified_base 17: mod_base = OTHER; note = 2'-O-methyladenosine-3'-phosphate
  modified_base 18: mod_base = OTHER; note = 2'-O-methylcytidine-3'-phosphate
  modified_base 19: mod_base = OTHER; note = 2'-O-methylcytidine-3'-phosphate
  modified_base 20: mod_base = OTHER; note = 2'-O-methylcytidine-3'-phosphate
  modified_base 21: mod_base = OTHER; note = 2'-O-methyladenosine-3'-phosphorothioate
  modified_base 22: mod_base = OTHER; note = 2'-O-methylguanosine-3'-phosphorothioate
  modified_base 23: mod_base = OTHER; note = 2'-O-methylguanosine-3'-phosphate
aagaagaatcacttgaacccagg

SEQ ID NO: 641 - RNA, 23 nt, synthetic construct
  source 1..23: mol_type = other RNA
  modified_base 1: mod_base = OTHER; note = 2'-O-methyladenosine-3'-phosphorothioate
  modified_base 2: mod_base = OTHER; note = 2'-fluoroguanosine-3'-phosphorothioate
  modified_base 3: mod_base = OTHER; note = 2'-O-methylcytidine-3'-phosphate
  modified_base 4: mod_base = OTHER; note = 2'-O-methylcytidine-3'-phosphate
  modified_base 5: mod_base = OTHER; note = 2'-O-methyluridine-3'-phosphate
  modified_base 6: mod_base = OTHER; note = 2'-fluoroguanosine-3'-phosphate
  modified_base 7: mod_base = OTHER; note = 2'-O-methyluridine-3'-phosphate
  modified_base 8: mod_base = OTHER; note = 2'-fluoroadenosine-3'-phosphate
  modified_base 9: mod_base = OTHER; note = 2'-fluoroadenosine-3'-phosphate
  modified_base 10: mod_base = OTHER; note = 2'-O-methyluridine-3'-phosphate
  modified_base 11: mod_base = OTHER; note = 2'-O-methylcytidine-3'-phosphate
  modified_base 12: mod_base = OTHER; note = 2'-O-methylcytidine-3'-phosphate
  modified_base 13: mod_base = OTHER; note = 2'-O-methylcytidine-3'-phosphate
  modified_base 14: mod_base = OTHER; note = 2'-fluoroadenosine-3'-phosphate
  modified_base 15: mod_base = OTHER; note = 2'-O-methylguanosine-3'-phosphate
  modified_base 16: mod_base = OTHER; note = 2'-fluorocytidine-3'-phosphate
  modified_base 17: mod_base = OTHER; note = 2'-O-methyluridine-3'-phosphate
  modified_base 18: mod_base = OTHER; note = 2'-O-methylguanosine-3'-phosphate
  modified_base 19: mod_base = OTHER; note = 2'-O-methylcytidine-3'-phosphate
  modified_base 20: mod_base = OTHER; note = 2'-O-methyluridine-3'-phosphate
  modified_base 21: mod_base = OTHER; note = 2'-O-methylcytidine-3'-phosphorothioate
  modified_base 22: mod_base = OTHER; note = 2'-O-methylguanosine-3'-phosphorothioate
  modified_base 23: mod_base = OTHER; note = 2'-O-methylguanosine-3'-phosphate
agcctgtaatcccagctgctcgg

SEQ ID NO: 642 - RNA, 23 nt, synthetic construct
  source 1..23: mol_type = other RNA
  modified_base 1: mod_base = OTHER; note = 2'-O-methyladenosine-3'-phosphorothioate
  modified_base 2: mod_base = OTHER; note = 2'-fluoroadenosine-3'-phosphorothioate
  modified_base 3: mod_base = OTHER; note = 2'-O-methyladenosine-3'-phosphate
  modified_base 4: mod_base = OTHER; note = 2'-O-methyluridine-3'-phosphate
  modified_base 5: mod_base = OTHER; note = 2'-O-methyladenosine-3'-phosphate
  modified_base 6: mod_base = OTHER; note = 2'-fluorocytidine-3'-phosphate
  modified_base 7: mod_base = OTHER; note = 2'-O-methyladenosine-3'-phosphate
  modified_base 8: mod_base = OTHER; note = 2'-fluoroadenosine-3'-phosphate
  modified_base 9: mod_base = OTHER; note = 2'-fluoroadenosine-3'-phosphate
  modified_base 10: mod_base = OTHER; note = 2'-O-methyladenosine-3'-phosphate
  modified_base 11: mod_base = OTHER; note = 2'-O-methyladenosine-3'-phosphate
  modified_base 12: mod_base = OTHER; note = 2'-O-methyluridine-3'-phosphate
  modified_base 13: mod_base = OTHER; note = 2'-O-methyluridine-3'-phosphate
  modified_base 14: mod_base = OTHER; note = 2'-fluoroadenosine-3'-phosphate
  modified_base 15: mod_base = OTHER; note = 2'-O-methylguanosine-3'-phosphate
  modified_base 16: mod_base = OTHER; note = 2'-fluorouridine-3'-phosphate
  modified_base 17: mod_base = OTHER; note = 2'-O-methylguanosine-3'-phosphate
  modified_base 18: mod_base = OTHER; note = 2'-O-methylguanosine-3'-phosphate
  modified_base 19: mod_base = OTHER; note = 2'-O-methylguanosine-3'-phosphate
  modified_base 20: mod_base = OTHER; note = 2'-O-methylcytidine-3'-phosphate
  modified_base 21: mod_base = OTHER; note = 2'-O-methylguanosine-3'-phosphorothioate
  modified_base 22: mod_base = OTHER; note = 2'-O-methylcytidine-3'-phosphorothioate
  modified_base 23: mod_base = OTHER; note = 2'-O-methylcytidine-3'-phosphate
aaatacaaaaattagtgggcgcc

SEQ ID NO: 643 - RNA, 23 nt, synthetic construct
  source 1..23: mol_type = other RNA
  modified_base 1: mod_base = OTHER; note = 2'-O-methyladenosine-3'-phosphorothioate
  modified_base 2: mod_base = OTHER; note = 2'-fluorouridine -3'-phosphorothioate
  modified_base 3: mod_base = OTHER; note = 2'-O-methylcytidine-3'-phosphate
  modified_base 4: mod_base = OTHER; note = 2'-O-methylguanosine-3'-phosphate
  modified_base 5: mod_base = OTHER; note = 2'-O-methyluridine-3'-phosphate
  modified_base 6: mod_base = OTHER; note = 2'-fluorouridine-3'-phosphate
  modified_base 7: mod_base = OTHER; note = 2'-O-methyluridine-3'-phosphate
  modified_base 8: mod_base = OTHER; note = 2'-fluorocytidine-3'-phosphate
  modified_base 9: mod_base = OTHER; note = 2'-fluorouridine-3'-phosphate
  modified_base 10: mod_base = OTHER; note = 2'-O-methyladenosine-3'-phosphate
  modified_base 11: mod_base = OTHER; note = 2'-O-methylcytidine-3'-phosphate
  modified_base 12: mod_base = OTHER; note = 2'-O-methyluridine-3'-phosphate
  modified_base 13: mod_base = OTHER; note = 2'-O-methyladenosine-3'-phosphate
  modified_base 14: mod_base = OTHER; note = 2'-fluoroadenosine-3'-phosphate
  modified_base 15: mod_base = OTHER; note = 2'-O-methylguanosine-3'-phosphate
  modified_base 16: mod_base = OTHER; note = 2'-fluoroadenosine-3'-phosphate
  modified_base 17: mod_base = OTHER; note = 2'-O-methyladenosine-3'-phosphate
  modified_base 18: mod_base = OTHER; note = 2'-O-methyluridine-3'-phosphate
  modified_base 19: mod_base = OTHER; note = 2'-O-methyladenosine-3'-phosphate
  modified_base 20: mod_base = OTHER; note = 2'-O-methylcytidine-3'-phosphate
  modified_base 21: mod_base = OTHER; note = 2'-O-methyladenosine-3'-phosphorothioate
  modified_base 22: mod_base = OTHER; note = 2'-O-methyladenosine-3'-phosphorothioate
  modified_base 23: mod_base = OTHER; note = 2'-O-methyladenosine-3'-phosphate
atcgtttctactaagaatacaaa

SEQ ID NO: 644 - RNA, 23 nt, synthetic construct
  source 1..23: mol_type = other RNA
  modified_base 1: mod_base = OTHER; note = 2'-O-methyladenosine-3'-phosphorothioate
  modified_base 2: mod_base = OTHER; note = 2'-fluoroadenosine-3'-phosphorothioate
  modified_base 3: mod_base = OTHER; note = 2'-O-methyluridine-3'-phosphate
  modified_base 4: mod_base = OTHER; note = 2'-O-methylguanosine-3'-phosphate
  modified_base 5: mod_base = OTHER; note = 2'-O-methyluridine-3'-phosphate
  modified_base 6: mod_base = OTHER; note = 2'-fluorouridine-3'-phosphate
  modified_base 7: mod_base = OTHER; note = 2'-O-methylguanosine-3'-phosphate
  modified_base 8: mod_base = OTHER; note = 2'-fluoroadenosine-3'-phosphate
  modified_base 9: mod_base = OTHER; note = 2'-fluoroadenosine-3'-phosphate
  modified_base 10: mod_base = OTHER; note = 2'-O-methyladenosine-3'-phosphate
  modified_base 11: mod_base = OTHER; note = 2'-O-methylcytidine-3'-phosphate
  modified_base 12: mod_base = OTHER; note = 2'-O-methylcytidine-3'-phosphate
  modified_base 13: mod_base = OTHER; note = 2'-O-methyluridine-3'-phosphate
  modified_base 14: mod_base = OTHER; note = 2'-fluorocytidine-3'-phosphate
  modified_base 15: mod_base = OTHER; note = 2'-O-methylguanosine-3'-phosphate
  modified_base 16: mod_base = OTHER; note = 2'-fluorouridine-3'-phosphate
  modified_base 17: mod_base = OTHER; note = 2'-O-methyluridine-3'-phosphate
  modified_base 18: mod_base = OTHER; note = 2'-O-methyluridine-3'-phosphate
  modified_base 19: mod_base = OTHER; note = 2'-O-methylcytidine-3'-phosphate
  modified_base 20: mod_base = OTHER; note = 2'-O-methyluridine-3'-phosphate
  modified_base 21: mod_base = OTHER; note = 2'-O-methyladenosine-3'-phosphorothioate
  modified_base 22: mod_base = OTHER; note = 2'-O-methylcytidine-3'-phosphorothioate
  modified_base 23: mod_base = OTHER; note = 2'-O-methyluridine-3'-phosphate
aatgttgaaacctcgtttctact

SEQ ID NO: 645 - RNA, 23 nt, synthetic construct
  source 1..23: mol_type = other RNA
  modified_base 1: mod_base = OTHER; note = 2'-O-methyladenosine-3'-phosphorothioate
  modified_base 2: mod_base = OTHER; note = 2'-fluoroadenosine-3'-phosphorothioate
  modified_base 3: mod_base = OTHER; note = 2'-O-methyluridine-3'-phosphate
  modified_base 4: mod_base = OTHER; note = 2'-O-methylcytidine-3'-phosphate
  modified_base 5: mod_base = OTHER; note = 2'-O-methylcytidine-3'-phosphate
  modified_base 6: mod_base = OTHER; note = 2'-fluorouridine-3'-phosphate
  modified_base 7: mod_base = OTHER; note = 2'-O-methylguanosine-3'-phosphate
  modified_base 8: mod_base = OTHER; note = 2'-fluoroguanosine-3'-phosphate
  modified_base 9: mod_base = OTHER; note = 2'-fluorocytidine-3'-phosphate
  modified_base 10: mod_base = OTHER; note = 2'-O-methylcytidine-3'-phosphate
  modified_base 11: mod_base = OTHER; note = 2'-O-methyladenosine-3'-phosphate
  modified_base 12: mod_base = OTHER; note = 2'-O-methyladenosine-3'-phosphate
  modified_base 13: mod_base = OTHER; note = 2'-O-methylcytidine-3'-phosphate
  modified_base 14: mod_base = OTHER; note = 2'-fluoroadenosine-3'-phosphate
  modified_base 15: mod_base = OTHER; note = 2'-O-methyluridine-3'-phosphate
  modified_base 16: mod_base = OTHER; note = 2'-fluoroguanosine-3'-phosphate
  modified_base 17: mod_base = OTHER; note = 2'-O-methyluridine-3'-phosphate
  modified_base 18: mod_base = OTHER; note = 2'-O-methyluridine-3'-phosphate
  modified_base 19: mod_base = OTHER; note = 2'-O-methylguanosine-3'-phosphate
  modified_base 20: mod_base = OTHER; note = 2'-O-methyladenosine-3'-phosphate
  modified_base 21: mod_base = OTHER; note = 2'-O-methyladenosine-3'-phosphorothioate
  modified_base 22: mod_base = OTHER; note = 2'-O-methyladenosine-3'-phosphorothioate
  modified_base 23: mod_base = OTHER; note = 2'-O-methylcytidine-3'-phosphate
aatcctggccaacatgttgaaac

SEQ ID NO: 646 - RNA, 23 nt, synthetic construct
  source 1..23: mol_type = other RNA
  modified_base 1: mod_base = OTHER; note = 2'-O-methyladenosine-3'-phosphorothioate
  modified_base 2: mod_base = OTHER; note = 2'-fluoroadenosine-3'-phosphorothioate
  modified_base 3: mod_base = OTHER; note = 2'-O-methylguanosine-3'-phosphate
  modified_base 4: mod_base = OTHER; note = 2'-O-methyladenosine-3'-phosphate
  modified_base 5: mod_base = OTHER; note = 2'-O-methylguanosine-3'-phosphate
  modified_base 6: mod_base = OTHER; note = 2'-fluoroadenosine-3'-phosphate
  modified_base 7: mod_base = OTHER; note = 2'-O-methyluridine-3'-phosphate
  modified_base 8: mod_base = OTHER; note = 2'-fluorouridine-3'-phosphate
  modified_base 9: mod_base = OTHER; note = 2'-fluoroguanosine-3'-phosphate
  modified_base 10: mod_base = OTHER; note = 2'-O-methyladenosine-3'-phosphate
  modified_base 11: mod_base = OTHER; note = 2'-O-methylguanosine-3'-phosphate
  modified_base 12: mod_base = OTHER; note = 2'-O-methyladenosine-3'-phosphate
  modified_base 13: mod_base = OTHER; note = 2'-O-methylcytidine-3'-phosphate
  modified_base 14: mod_base = OTHER; note = 2'-fluorocytidine-3'-phosphate
  modified_base 15: mod_base = OTHER; note = 2'-O-methyladenosine-3'-phosphate
  modified_base 16: mod_base = OTHER; note = 2'-fluorouridine-3'-phosphate
  modified_base 17: mod_base = OTHER; note = 2'-O-methylcytidine-3'-phosphate
  modified_base 18: mod_base = OTHER; note = 2'-O-methylcytidine-3'-phosphate
  modified_base 19: mod_base = OTHER; note = 2'-O-methyluridine-3'-phosphate
  modified_base 20: mod_base = OTHER; note = 2'-O-methylguanosine-3'-phosphate
  modified_base 21: mod_base = OTHER; note = 2'-O-methylguanosine-3'-phosphorothioate
  modified_base 22: mod_base = OTHER; note = 2'-O-methylcytidine-3'-phosphorothioate
  modified_base 23: mod_base = OTHER; note = 2'-O-methylcytidine-3'-phosphate
aagagattgagaccatcctggcc

SEQ ID NO: 647 - RNA, 23 nt, synthetic construct
  source 1..23: mol_type = other RNA
  modified_base 1: mod_base = OTHER; note = 2'-O-methyladenosine-3'-phosphorothioate
  modified_base 2: mod_base = OTHER; note = 2'-fluorouridine -3'-phosphorothioate
  modified_base 3: mod_base = OTHER; note = 2'-O-methylcytidine-3'-phosphate
  modified_base 4: mod_base = OTHER; note = 2'-O-methyladenosine-3'-phosphate
  modified_base 5: mod_base = OTHER; note = 2'-O-methyladenosine-3'-phosphate
  modified_base 6: mod_base = OTHER; note = 2'-fluoroguanosine-3'-phosphate
  modified_base 7: mod_base = OTHER; note = 2'-O-methyladenosine-3'-phosphate
  modified_base 8: mod_base = OTHER; note = 2'-fluoroguanosine-3'-phosphate
  modified_base 9: mod_base = OTHER; note = 2'-fluoroguanosine-3'-phosphate
  modified_base 10: mod_base = OTHER; note = 2'-O-methyluridine-3'-phosphate
  modified_base 11: mod_base = OTHER; note = 2'-O-methylcytidine-3'-phosphate
  modified_base 12: mod_base = OTHER; note = 2'-O-methyladenosine-3'-phosphate
  modified_base 13: mod_base = OTHER; note = 2'-O-methyladenosine-3'-phosphate
  modified_base 14: mod_base = OTHER; note = 2'-fluoroguanosine-3'-phosphate
  modified_base 15: mod_base = OTHER; note = 2'-O-methyladenosine-3'-phosphate
  modified_base 16: mod_base = OTHER; note = 2'-fluoroguanosine-3'-phosphate
  modified_base 17: mod_base = OTHER; note = 2'-O-methyladenosine-3'-phosphate
  modified_base 18: mod_base = OTHER; note = 2'-O-methyluridine-3'-phosphate
  modified_base 19: mod_base = OTHER; note = 2'-O-methyluridine-3'-phosphate
  modified_base 20: mod_base = OTHER; note = 2'-O-methylguanosine-3'-phosphate
  modified_base 21: mod_base = OTHER; note = 2'-O-methyladenosine-3'-phosphorothioate
  modified_base 22: mod_base = OTHER; note = 2'-O-methylguanosine-3'-phosphorothioate
  modified_base 23: mod_base = OTHER; note = 2'-O-methyladenosine-3'-phosphate
atcaagaggtcaagagattgaga

SEQ ID NO: 648 - RNA, 23 nt, synthetic construct
  source 1..23: mol_type = other RNA
  modified_base 1: mod_base = OTHER; note = 2'-O-methyladenosine-3'-phosphorothioate
  modified_base 2: mod_base = OTHER; note = 2'-fluoroadenosine-3'-phosphorothioate
  modified_base 3: mod_base = OTHER; note = 2'-O-methylguanosine-3'-phosphate
  modified_base 4: mod_base = OTHER; note = 2'-O-methyluridine-3'-phosphate
  modified_base 5: mod_base = OTHER; note = 2'-O-methylcytidine-3'-phosphate
  modified_base 6: mod_base = OTHER; note = 2'-fluoroguanosine-3'-phosphate
  modified_base 7: mod_base = OTHER; note = 2'-O-methylguanosine-3'-phosphate
  modified_base 8: mod_base = OTHER; note = 2'-fluoroguanosine-3'-phosphate
  modified_base 9: mod_base = OTHER; note = 2'-fluorouridine-3'-phosphate
  modified_base 10: mod_base = OTHER; note = 2'-O-methylguanosine-3'-phosphate
  modified_base 11: mod_base = OTHER; note = 2'-O-methylguanosine-3'-phosphate
  modified_base 12: mod_base = OTHER; note = 2'-O-methyladenosine-3'-phosphate
  modified_base 13: mod_base = OTHER; note = 2'-O-methyluridine-3'-phosphate
  modified_base 14: mod_base = OTHER; note = 2'-fluorocytidine-3'-phosphate
  modified_base 15: mod_base = OTHER; note = 2'-O-methyladenosine-3'-phosphate
  modified_base 16: mod_base = OTHER; note = 2'-fluoroadenosine-3'-phosphate
  modified_base 17: mod_base = OTHER; note = 2'-O-methylguanosine-3'-phosphate
  modified_base 18: mod_base = OTHER; note = 2'-O-methyladenosine-3'-phosphate
  modified_base 19: mod_base = OTHER; note = 2'-O-methylguanosine-3'-phosphate
  modified_base 20: mod_base = OTHER; note = 2'-O-methylguanosine-3'-phosphate
  modified_base 21: mod_base = OTHER; note = 2'-O-methyluridine-3'-phosphorothioate
  modified_base 22: mod_base = OTHER; note = 2'-O-methylcytidine-3'-phosphorothioate
  modified_base 23: mod_base = OTHER; note = 2'-O-methyladenosine-3'-phosphate
aagtcgggtggatcaagaggtca

SEQ ID NO: 649 - RNA, 23 nt, synthetic construct
  source 1..23: mol_type = other RNA
  modified_base 1: mod_base = OTHER; note = 2'-O-methyladenosine-3'-phosphorothioate
  modified_base 2: mod_base = OTHER; note = 2'-fluoroadenosine-3'-phosphorothioate
  modified_base 3: mod_base = OTHER; note = 2'-O-methylcytidine-3'-phosphate
  modified_base 4: mod_base = OTHER; note = 2'-O-methyluridine-3'-phosphate
  modified_base 5: mod_base = OTHER; note = 2'-O-methyluridine-3'-phosphate
  modified_base 6: mod_base = OTHER; note = 2'-fluorocytidine-3'-phosphate
  modified_base 7: mod_base = OTHER; note = 2'-O-methylguanosine-3'-phosphate
  modified_base 8: mod_base = OTHER; note = 2'-fluoroguanosine-3'-phosphate
  modified_base 9: mod_base = OTHER; note = 2'-fluoroguanosine-3'-phosphate
  modified_base 10: mod_base = OTHER; note = 2'-O-methyladenosine-3'-phosphate
  modified_base 11: mod_base = OTHER; note = 2'-O-methylguanosine-3'-phosphate
  modified_base 12: mod_base = OTHER; note = 2'-O-methylguanosine-3'-phosphate
  modified_base 13: mod_base = OTHER; note = 2'-O-methylcytidine-3'-phosphate
  modified_base 14: mod_base = OTHER; note = 2'-fluorocytidine-3'-phosphate
  modified_base 15: mod_base = OTHER; note = 2'-O-methyladenosine-3'-phosphate
  modified_base 16: mod_base = OTHER; note = 2'-fluoroadenosine-3'-phosphate
  modified_base 17: mod_base = OTHER; note = 2'-O-methylguanosine-3'-phosphate
  modified_base 18: mod_base = OTHER; note = 2'-O-methyluridine-3'-phosphate
  modified_base 19: mod_base = OTHER; note = 2'-O-methylcytidine-3'-phosphate
  modified_base 20: mod_base = OTHER; note = 2'-O-methylguanosine-3'-phosphate
  modified_base 21: mod_base = OTHER; note = 2'-O-methylguanosine-3'-phosphorothioate
  modified_base 22: mod_base = OTHER; note = 2'-O-methylguanosine-3'-phosphorothioate
  modified_base 23: mod_base = OTHER; note = 2'-O-methyluridine-3'-phosphate
aacttcgggaggccaagtcgggt

SEQ ID NO: 650 - RNA, 23 nt, synthetic construct
  source 1..23: mol_type = other RNA
  modified_base 1: mod_base = OTHER; note = 2'-O-methyladenosine-3'-phosphorothioate
  modified_base 2: mod_base = OTHER; note = 2'-fluoroguanosine-3'-phosphorothioate
  modified_base 3: mod_base = OTHER; note = 2'-O-methylcytidine-3'-phosphate
  modified_base 4: mod_base = OTHER; note = 2'-O-methylcytidine-3'-phosphate
  modified_base 5: mod_base = OTHER; note = 2'-O-methyluridine-3'-phosphate
  modified_base 6: mod_base = OTHER; note = 2'-fluoroadenosine-3'-phosphate
  modified_base 7: mod_base = OTHER; note = 2'-O-methyluridine-3'-phosphate
  modified_base 8: mod_base = OTHER; note = 2'-fluoroadenosine-3'-phosphate
  modified_base 9: mod_base = OTHER; note = 2'-fluoroadenosine-3'-phosphate
  modified_base 10: mod_base = OTHER; note = 2'-O-methyluridine-3'-phosphate
  modified_base 11: mod_base = OTHER; note = 2'-O-methylcytidine-3'-phosphate
  modified_base 12: mod_base = OTHER; note = 2'-O-methyluridine-3'-phosphate
  modified_base 13: mod_base = OTHER; note = 2'-O-methylcytidine-3'-phosphate
  modified_base 14: mod_base = OTHER; note = 2'-fluoroadenosine-3'-phosphate
  modified_base 15: mod_base = OTHER; note = 2'-O-methyluridine-3'-phosphate
  modified_base 16: mod_base = OTHER; note = 2'-fluorocytidine-3'-phosphate
  modified_base 17: mod_base = OTHER; note = 2'-O-methyladenosine-3'-phosphate
  modified_base 18: mod_base = OTHER; note = 2'-O-methylcytidine-3'-phosphate
  modified_base 19: mod_base = OTHER; note = 2'-O-methyluridine-3'-phosphate
  modified_base 20: mod_base = OTHER; note = 2'-O-methyluridine-3'-phosphate
  modified_base 21: mod_base = OTHER; note = 2'-O-methylcytidine-3'-phosphorothioate
  modified_base 22: mod_base = OTHER; note = 2'-O-methylguanosine-3'-phosphorothioate
  modified_base 23: mod_base = OTHER; note = 2'-O-methylguanosine-3'-phosphate
agcctataatctcatcacttcgg

SEQ ID NO: 651 - RNA, 23 nt, synthetic construct
  source 1..23: mol_type = other RNA
  modified_base 1: mod_base = OTHER; note = 2'-O-methyladenosine-3'-phosphorothioate
  modified_base 2: mod_base = OTHER; note = 2'-fluorouridine -3'-phosphorothioate
  modified_base 3: mod_base = OTHER; note = 2'-O-methyluridine-3'-phosphate
  modified_base 4: mod_base = OTHER; note = 2'-O-methyladenosine-3'-phosphate
  modified_base 5: mod_base = OTHER; note = 2'-O-methyladenosine-3'-phosphate
  modified_base 6: mod_base = OTHER; note = 2'-fluoroguanosine-3'-phosphate
  modified_base 7: mod_base = OTHER; note = 2'-O-methyladenosine-3'-phosphate
  modified_base 8: mod_base = OTHER; note = 2'-fluoroadenosine-3'-phosphate
  modified_base 9: mod_base = OTHER; note = 2'-fluoroadenosine-3'-phosphate
  modified_base 10: mod_base = OTHER; note = 2'-O-methylguanosine-3'-phosphate
  modified_base 11: mod_base = OTHER; note = 2'-O-methyluridine-3'-phosphate
  modified_base 12: mod_base = OTHER; note = 2'-O-methyladenosine-3'-phosphate
  modified_base 13: mod_base = OTHER; note = 2'-O-methyluridine-3'-phosphate
  modified_base 14: mod_base = OTHER; note = 2'-fluoroadenosine-3'-phosphate
  modified_base 15: mod_base = OTHER; note = 2'-O-methyladenosine-3'-phosphate
  modified_base 16: mod_base = OTHER; note = 2'-fluoroguanosine-3'-phosphate
  modified_base 17: mod_base = OTHER; note = 2'-O-methylcytidine-3'-phosphate
  modified_base 18: mod_base = OTHER; note = 2'-O-methylcytidine-3'-phosphate
  modified_base 19: mod_base = OTHER; note = 2'-O-methyladenosine-3'-phosphate
  modified_base 20: mod_base = OTHER; note = 2'-O-methylguanosine-3'-phosphate
  modified_base 21: mod_base = OTHER; note = 2'-O-methylguanosine-3'-phosphorothioate
  modified_base 22: mod_base = OTHER; note = 2'-O-methylcytidine-3'-phosphorothioate
  modified_base 23: mod_base = OTHER; note = 2'-O-methylguanosine-3'-phosphate
attaagaaagtataagccaggcg

SEQ ID NO: 652 - RNA, 23 nt, synthetic construct
  source 1..23: mol_type = other RNA
  modified_base 1: mod_base = OTHER; note = 2'-O-methyladenosine-3'-phosphorothioate
  modified_base 2: mod_base = OTHER; note = 2'-fluoroadenosine-3'-phosphorothioate
  modified_base 3: mod_base = OTHER; note = 2'-O-methyluridine-3'-phosphate
  modified_base 4: mod_base = OTHER; note = 2'-O-methyluridine-3'-phosphate
  modified_base 5: mod_base = OTHER; note = 2'-O-methyluridine-3'-phosphate
  modified_base 6: mod_base = OTHER; note = 2'-fluoroguanosine-3'-phosphate
  modified_base 7: mod_base = OTHER; note = 2'-O-methyluridine-3'-phosphate
  modified_base 8: mod_base = OTHER; note = 2'-fluorouridine-3'-phosphate
  modified_base 9: mod_base = OTHER; note = 2'-fluoroguanosine-3'-phosphate
  modified_base 10: mod_base = OTHER; note = 2'-O-methyladenosine-3'-phosphate
  modified_base 11: mod_base = OTHER; note = 2'-O-methyluridine-3'-phosphate
  modified_base 12: mod_base = OTHER; note = 2'-O-methyluridine-3'-phosphate
  modified_base 13: mod_base = OTHER; note = 2'-O-methyluridine-3'-phosphate
  modified_base 14: mod_base = OTHER; note = 2'-fluorouridine-3'-phosphate
  modified_base 15: mod_base = OTHER; note = 2'-O-methylcytidine-3'-phosphate
  modified_base 16: mod_base = OTHER; note = 2'-fluorouridine-3'-phosphate
  modified_base 17: mod_base = OTHER; note = 2'-O-methyluridine-3'-phosphate
  modified_base 18: mod_base = OTHER; note = 2'-O-methyluridine-3'-phosphate
  modified_base 19: mod_base = OTHER; note = 2'-O-methylcytidine-3'-phosphate
  modified_base 20: mod_base = OTHER; note = 2'-O-methyluridine-3'-phosphate
  modified_base 21: mod_base = OTHER; note = 2'-O-methylcytidine-3'-phosphorothioate
  modified_base 22: mod_base = OTHER; note = 2'-O-methylcytidine-3'-phosphorothioate
  modified_base 23: mod_base = OTHER; note = 2'-O-methyluridine-3'-phosphate
aatttgttgattttctttctcct

SEQ ID NO: 653 - RNA, 23 nt, synthetic construct
  source 1..23: mol_type = other RNA
  modified_base 1: mod_base = OTHER; note = 2'-O-methyladenosine-3'-phosphorothioate
  modified_base 2: mod_base = OTHER; note = 2'-fluorouridine -3'-phosphorothioate
  modified_base 3: mod_base = OTHER; note = 2'-O-methyladenosine-3'-phosphate
  modified_base 4: mod_base = OTHER; note = 2'-O-methyladenosine-3'-phosphate
  modified_base 5: mod_base = OTHER; note = 2'-O-methylcytidine-3'-phosphate
  modified_base 6: mod_base = OTHER; note = 2'-fluorocytidine-3'-phosphate
  modified_base 7: mod_base = OTHER; note = 2'-O-methylcytidine-3'-phosphate
  modified_base 8: mod_base = OTHER; note = 2'-fluorouridine-3'-phosphate
  modified_base 9: mod_base = OTHER; note = 2'-fluorouridine-3'-phosphate
  modified_base 10: mod_base = OTHER; note = 2'-O-methylcytidine-3'-phosphate
  modified_base 11: mod_base = OTHER; note = 2'-O-methyluridine-3'-phosphate
  modified_base 12: mod_base = OTHER; note = 2'-O-methyluridine-3'-phosphate
  modified_base 13: mod_base = OTHER; note = 2'-O-methyluridine-3'-phosphate
  modified_base 14: mod_base = OTHER; note = 2'-fluoroadenosine-3'-phosphate
  modified_base 15: mod_base = OTHER; note = 2'-O-methyluridine-3'-phosphate
  modified_base 16: mod_base = OTHER; note = 2'-fluoroguanosine-3'-phosphate
  modified_base 17: mod_base = OTHER; note = 2'-O-methyladenosine-3'-phosphate
  modified_base 18: mod_base = OTHER; note = 2'-O-methylcytidine-3'-phosphate
  modified_base 19: mod_base = OTHER; note = 2'-O-methyluridine-3'-phosphate
  modified_base 20: mod_base = OTHER; note = 2'-O-methylcytidine-3'-phosphate
  modified_base 21: mod_base = OTHER; note = 2'-O-methyladenosine-3'-phosphorothioate
  modified_base 22: mod_base = OTHER; note = 2'-O-methylcytidine-3'-phosphorothioate
  modified_base 23: mod_base = OTHER; note = 2'-O-methyladenosine-3'-phosphate
ataacccttctttatgactcaca

SEQ ID NO: 654 - RNA, 23 nt, synthetic construct
  source 1..23: mol_type = other RNA
  modified_base 1: mod_base = OTHER; note = 2'-O-methyladenosine-3'-phosphorothioate
  modified_base 2: mod_base = OTHER; note = 2'-fluorouridine -3'-phosphorothioate
  modified_base 3: mod_base = OTHER; note = 2'-O-methylguanosine-3'-phosphate
  modified_base 4: mod_base = OTHER; note = 2'-O-methylguanosine-3'-phosphate
  modified_base 5: mod_base = OTHER; note = 2'-O-methyladenosine-3'-phosphate
  modified_base 6: mod_base = OTHER; note = 2'-fluorocytidine-3'-phosphate
  modified_base 7: mod_base = OTHER; note = 2'-O-methylcytidine-3'-phosphate
  modified_base 8: mod_base = OTHER; note = 2'-fluoroadenosine-3'-phosphate
  modified_base 9: mod_base = OTHER; note = 2'-fluorouridine-3'-phosphate
  modified_base 10: mod_base = OTHER; note = 2'-O-methylcytidine-3'-phosphate
  modified_base 11: mod_base = OTHER; note = 2'-O-methyladenosine-3'-phosphate
  modified_base 12: mod_base = OTHER; note = 2'-O-methylcytidine-3'-phosphate
  modified_base 13: mod_base = OTHER; note = 2'-O-methylcytidine-3'-phosphate
  modified_base 14: mod_base = OTHER; note = 2'-fluorocytidine-3'-phosphate
  modified_base 15: mod_base = OTHER; note = 2'-O-methyluridine-3'-phosphate
  modified_base 16: mod_base = OTHER; note = 2'-fluoroadenosine-3'-phosphate
  modified_base 17: mod_base = OTHER; note = 2'-O-methyladenosine-3'-phosphate
  modified_base 18: mod_base = OTHER; note = 2'-O-methylcytidine-3'-phosphate
  modified_base 19: mod_base = OTHER; note = 2'-O-methylcytidine-3'-phosphate
  modified_base 20: mod_base = OTHER; note = 2'-O-methylcytidine-3'-phosphate
  modified_base 21: mod_base = OTHER; note = 2'-O-methyluridine-3'-phosphorothioate
  modified_base 22: mod_base = OTHER; note = 2'-O-methyluridine-3'-phosphorothioate
  modified_base 23: mod_base = OTHER; note = 2'-O-methylcytidine-3'-phosphate
atggaccatcaccctaacccttc

SEQ ID NO: 655 - RNA, 23 nt, synthetic construct
  source 1..23: mol_type = other RNA
  modified_base 1: mod_base = OTHER; note = 2'-O-methyladenosine-3'-phosphorothioate
  modified_base 2: mod_base = OTHER; note = 2'-fluorouridine -3'-phosphorothioate
  modified_base 3: mod_base = OTHER; note = 2'-O-methyluridine-3'-phosphate
  modified_base 4: mod_base = OTHER; note = 2'-O-methylguanosine-3'-phosphate
  modified_base 5: mod_base = OTHER; note = 2'-O-methyladenosine-3'-phosphate
  modified_base 6: mod_base = OTHER; note = 2'-fluoroadenosine-3'-phosphate
  modified_base 7: mod_base = OTHER; note = 2'-O-methylguanosine-3'-phosphate
  modified_base 8: mod_base = OTHER; note = 2'-fluoroadenosine-3'-phosphate
  modified_base 9: mod_base = OTHER; note = 2'-fluoroadenosine-3'-phosphate
  modified_base 10: mod_base = OTHER; note = 2'-O-methylcytidine-3'-phosphate
  modified_base 11: mod_base = OTHER; note = 2'-O-methyluridine-3'-phosphate
  modified_base 12: mod_base = OTHER; note = 2'-O-methylguanosine-3'-phosphate
  modified_base 13: mod_base = OTHER; note = 2'-O-methyluridine-3'-phosphate
  modified_base 14: mod_base = OTHER; note = 2'-fluorouridine-3'-phosphate
  modified_base 15: mod_base = OTHER; note = 2'-O-methylguanosine-3'-phosphate
  modified_base 16: mod_base = OTHER; note = 2'-fluorocytidine-3'-phosphate
  modified_base 17: mod_base = OTHER; note = 2'-O-methyluridine-3'-phosphate
  modified_base 18: mod_base = OTHER; note = 2'-O-methylcytidine-3'-phosphate
  modified_base 19: mod_base = OTHER; note = 2'-O-methyluridine-3'-phosphate
  modified_base 20: mod_base = OTHER; note = 2'-O-methylguanosine-3'-phosphate
  modified_base 21: mod_base = OTHER; note = 2'-O-methylguanosine-3'-phosphorothioate
  modified_base 22: mod_base = OTHER; note = 2'-O-methyladenosine-3'-phosphorothioate
  modified_base 23: mod_base = OTHER; note = 2'-O-methylcytidine-3'-phosphate
attgaagaactgttgctctggac

SEQ ID NO: 656 - RNA, 23 nt, synthetic construct
  source 1..23: mol_type = other RNA
  modified_base 1: mod_base = OTHER; note = 2'-O-methyladenosine-3'-phosphorothioate
  modified_base 2: mod_base = OTHER; note = 2'-fluorouridine -3'-phosphorothioate
  modified_base 3: mod_base = OTHER; note = 2'-O-methyladenosine-3'-phosphate
  modified_base 4: mod_base = OTHER; note = 2'-O-methylcytidine-3'-phosphate
  modified_base 5: mod_base = OTHER; note = 2'-O-methyladenosine-3'-phosphate
  modified_base 6: mod_base = OTHER; note = 2'-fluoroguanosine-3'-phosphate
  modified_base 7: mod_base = OTHER; note = 2'-O-methyladenosine-3'-phosphate
  modified_base 8: mod_base = OTHER; note = 2'-fluoroguanosine-3'-phosphate
  modified_base 9: mod_base = OTHER; note = 2'-fluorouridine-3'-phosphate
  modified_base 10: mod_base = OTHER; note = 2'-O-methyladenosine-3'-phosphate
  modified_base 11: mod_base = OTHER; note = 2'-O-methylcytidine-3'-phosphate
  modified_base 12: mod_base = OTHER; note = 2'-O-methyladenosine-3'-phosphate
  modified_base 13: mod_base = OTHER; note = 2'-O-methylcytidine-3'-phosphate
  modified_base 14: mod_base = OTHER; note = 2'-fluorouridine-3'-phosphate
  modified_base 15: mod_base = OTHER; note = 2'-O-methyluridine-3'-phosphate
  modified_base 16: mod_base = OTHER; note = 2'-fluoroguanosine-3'-phosphate
  modified_base 17: mod_base = OTHER; note = 2'-O-methyladenosine-3'-phosphate
  modified_base 18: mod_base = OTHER; note = 2'-O-methyladenosine-3'-phosphate
  modified_base 19: mod_base = OTHER; note = 2'-O-methylguanosine-3'-phosphate
  modified_base 20: mod_base = OTHER; note = 2'-O-methyladenosine-3'-phosphate
  modified_base 21: mod_base = OTHER; note = 2'-O-methyladenosine-3'-phosphorothioate
  modified_base 22: mod_base = OTHER; note = 2'-O-methylcytidine-3'-phosphorothioate
  modified_base 23: mod_base = OTHER; note = 2'-O-methyluridine-3'-phosphate
atacagagtacacttgaagaact

SEQ ID NO: 657 - RNA, 23 nt, synthetic construct
  source 1..23: mol_type = other RNA
  modified_base 1: mod_base = OTHER; note = 2'-O-methyladenosine-3'-phosphorothioate
  modified_base 2: mod_base = OTHER; note = 2'-fluorouridine -3'-phosphorothioate
  modified_base 3: mod_base = OTHER; note = 2'-O-methylcytidine-3'-phosphate
  modified_base 4: mod_base = OTHER; note = 2'-O-methylcytidine-3'-phosphate
  modified_base 5: mod_base = OTHER; note = 2'-O-methylcytidine-3'-phosphate
  modified_base 6: mod_base = OTHER; note = 2'-fluoroadenosine-3'-phosphate
  modified_base 7: mod_base = OTHER; note = 2'-O-methylguanosine-3'-phosphate
  modified_base 8: mod_base = OTHER; note = 2'-fluoroadenosine-3'-phosphate
  modified_base 9: mod_base = OTHER; note = 2'-fluoroadenosine-3'-phosphate
  modified_base 10: mod_base = OTHER; note = 2'-O-methylguanosine-3'-phosphate
  modified_base 11: mod_base = OTHER; note = 2'-O-methylcytidine-3'-phosphate
  modified_base 12: mod_base = OTHER; note = 2'-O-methylcytidine-3'-phosphate
  modified_base 13: mod_base = OTHER; note = 2'-O-methyluridine-3'-phosphate
  modified_base 14: mod_base = OTHER; note = 2'-fluoroadenosine-3'-phosphate
  modified_base 15: mod_base = OTHER; note = 2'-O-methylcytidine-3'-phosphate
  modified_base 16: mod_base = OTHER; note = 2'-fluoroadenosine-3'-phosphate
  modified_base 17: mod_base = OTHER; note = 2'-O-methylguanosine-3'-phosphate
  modified_base 18: mod_base = OTHER; note = 2'-O-methyladenosine-3'-phosphate
  modified_base 19: mod_base = OTHER; note = 2'-O-methylguanosine-3'-phosphate
  modified_base 20: mod_base = OTHER; note = 2'-O-methyluridine-3'-phosphate
  modified_base 21: mod_base = OTHER; note = 2'-O-methyladenosine-3'-phosphorothioate
  modified_base 22: mod_base = OTHER; note = 2'-O-methylcytidine-3'-phosphorothioate
  modified_base 23: mod_base = OTHER; note = 2'-O-methyladenosine-3'-phosphate
atcccagaagcctacagagtaca

SEQ ID NO: 658 - RNA, 23 nt, synthetic construct
  source 1..23: mol_type = other RNA
  modified_base 1: mod_base = OTHER; note = 2'-O-methyladenosine-3'-phosphorothioate
  modified_base 2: mod_base = OTHER; note = 2'-fluorocytidine-3'-phosphorothioate
  modified_base 3: mod_base = OTHER; note = 2'-O-methylcytidine-3'-phosphate
  modified_base 4: mod_base = OTHER; note = 2'-O-methyluridine-3'-phosphate
  modified_base 5: mod_base = OTHER; note = 2'-O-methylguanosine-3'-phosphate
  modified_base 6: mod_base = OTHER; note = 2'-fluoroadenosine-3'-phosphate
  modified_base 7: mod_base = OTHER; note = 2'-O-methyladenosine-3'-phosphate
  modified_base 8: mod_base = OTHER; note = 2'-fluoroadenosine-3'-phosphate
  modified_base 9: mod_base = OTHER; note = 2'-fluoroadenosine-3'-phosphate
  modified_base 10: mod_base = OTHER; note = 2'-O-methylguanosine-3'-phosphate
  modified_base 11: mod_base = OTHER; note = 2'-O-methylguanosine-3'-phosphate
  modified_base 12: mod_base = OTHER; note = 2'-O-methylguanosine-3'-phosphate
  modified_base 13: mod_base = OTHER; note = 2'-O-methyladenosine-3'-phosphate
  modified_base 14: mod_base = OTHER; note = 2'-fluorocytidine-3'-phosphate
  modified_base 15: mod_base = OTHER; note = 2'-O-methylcytidine-3'-phosphate
  modified_base 16: mod_base = OTHER; note = 2'-fluorouridine-3'-phosphate
  modified_base 17: mod_base = OTHER; note = 2'-O-methylcytidine-3'-phosphate
  modified_base 18: mod_base = OTHER; note = 2'-O-methylcytidine-3'-phosphate
  modified_base 19: mod_base = OTHER; note = 2'-O-methylcytidine-3'-phosphate
  modified_base 20: mod_base = OTHER; note = 2'-O-methyladenosine-3'-phosphate
  modified_base 21: mod_base = OTHER; note = 2'-O-methylguanosine-3'-phosphorothioate
  modified_base 22: mod_base = OTHER; note = 2'-O-methyladenosine-3'-phosphorothioate
  modified_base 23: mod_base = OTHER; note = 2'-O-methyladenosine-3'-phosphate
acctgaaaagggacctcccagaa

SEQ ID NO: 659 - RNA, 23 nt, synthetic construct
  source 1..23: mol_type = other RNA
  modified_base 1: mod_base = OTHER; note = 2'-O-methyladenosine-3'-phosphorothioate
  modified_base 2: mod_base = OTHER; note = 2'-fluoroadenosine-3'-phosphorothioate
  modified_base 3: mod_base = OTHER; note = 2'-O-methyluridine-3'-phosphate
  modified_base 4: mod_base = OTHER; note = 2'-O-methyladenosine-3'-phosphate
  modified_base 5: mod_base = OTHER; note = 2'-O-methylguanosine-3'-phosphate
  modified_base 6: mod_base = OTHER; note = 2'-fluorocytidine-3'-phosphate
  modified_base 7: mod_base = OTHER; note = 2'-O-methyluridine-3'-phosphate
  modified_base 8: mod_base = OTHER; note = 2'-fluorouridine-3'-phosphate
  modified_base 9: mod_base = OTHER; note = 2'-fluorouridine-3'-phosphate
  modified_base 10: mod_base = OTHER; note = 2'-O-methylguanosine-3'-phosphate
  modified_base 11: mod_base = OTHER; note = 2'-O-methyladenosine-3'-phosphate
  modified_base 12: mod_base = OTHER; note = 2'-O-methylcytidine-3'-phosphate
  modified_base 13: mod_base = OTHER; note = 2'-O-methyluridine-3'-phosphate
  modified_base 14: mod_base = OTHER; note = 2'-fluorouridine-3'-phosphate
  modified_base 15: mod_base = OTHER; note = 2'-O-methyluridine-3'-phosphate
  modified_base 16: mod_base = OTHER; note = 2'-fluoroguanosine-3'-phosphate
  modified_base 17: mod_base = OTHER; note = 2'-O-methyluridine-3'-phosphate
  modified_base 18: mod_base = OTHER; note = 2'-O-methylguanosine-3'-phosphate
  modified_base 19: mod_base = OTHER; note = 2'-O-methylguanosine-3'-phosphate
  modified_base 20: mod_base = OTHER; note = 2'-O-methyladenosine-3'-phosphate
  modified_base 21: mod_base = OTHER; note = 2'-O-methylcytidine-3'-phosphorothioate
  modified_base 22: mod_base = OTHER; note = 2'-O-methyladenosine-3'-phosphorothioate
  modified_base 23: mod_base = OTHER; note = 2'-O-methylcytidine-3'-phosphate
aatagctttgactttgtggacac

SEQ ID NO: 660 - RNA, 23 nt, synthetic construct
  source 1..23: mol_type = other RNA
  modified_base 1: mod_base = OTHER; note = 2'-O-methyladenosine-3'-phosphorothioate
  modified_base 2: mod_base = OTHER; note = 2'-fluoroadenosine-3'-phosphorothioate
  modified_base 3: mod_base = OTHER; note = 2'-O-methyladenosine-3'-phosphate
  modified_base 4: mod_base = OTHER; note = 2'-O-methyladenosine-3'-phosphate
  modified_base 5: mod_base = OTHER; note = 2'-O-methylguanosine-3'-phosphate
  modified_base 6: mod_base = OTHER; note = 2'-fluoroguanosine-3'-phosphate
  modified_base 7: mod_base = OTHER; note = 2'-O-methylcytidine-3'-phosphate
  modified_base 8: mod_base = OTHER; note = 2'-fluoroadenosine-3'-phosphate
  modified_base 9: mod_base = OTHER; note = 2'-fluoroadenosine-3'-phosphate
  modified_base 10: mod_base = OTHER; note = 2'-O-methyladenosine-3'-phosphate
  modified_base 11: mod_base = OTHER; note = 2'-O-methyluridine-3'-phosphate
  modified_base 12: mod_base = OTHER; note = 2'-O-methyladenosine-3'-phosphate
  modified_base 13: mod_base = OTHER; note = 2'-O-methyladenosine-3'-phosphate
  modified_base 14: mod_base = OTHER; note = 2'-fluorocytidine-3'-phosphate
  modified_base 15: mod_base = OTHER; note = 2'-O-methyladenosine-3'-phosphate
  modified_base 16: mod_base = OTHER; note = 2'-fluorouridine-3'-phosphate
  modified_base 17: mod_base = OTHER; note = 2'-O-methylguanosine-3'-phosphate
  modified_base 18: mod_base = OTHER; note = 2'-O-methyluridine-3'-phosphate
  modified_base 19: mod_base = OTHER; note = 2'-O-methyluridine-3'-phosphate
  modified_base 20: mod_base = OTHER; note = 2'-O-methyladenosine-3'-phosphate
  modified_base 21: mod_base = OTHER; note = 2'-O-methylguanosine-3'-phosphorothioate
  modified_base 22: mod_base = OTHER; note = 2'-O-methyluridine-3'-phosphorothioate
  modified_base 23: mod_base = OTHER; note = 2'-O-methyladenosine-3'-phosphate
aaaaggcaaataacatgttagta

SEQ ID NO: 661 - RNA, 23 nt, synthetic construct
  source 1..23: mol_type = other RNA
  modified_base 1: mod_base = OTHER; note = 2'-O-methyladenosine-3'-phosphorothioate
  modified_base 2: mod_base = OTHER; note = 2'-fluoroadenosine-3'-phosphorothioate
  modified_base 3: mod_base = OTHER; note = 2'-O-methylguanosine-3'-phosphate
  modified_base 4: mod_base = OTHER; note = 2'-O-methyladenosine-3'-phosphate
  modified_base 5: mod_base = OTHER; note = 2'-O-methyluridine-3'-phosphate
  modified_base 6: mod_base = OTHER; note = 2'-fluoroadenosine-3'-phosphate
  modified_base 7: mod_base = OTHER; note = 2'-O-methyladenosine-3'-phosphate
  modified_base 8: mod_base = OTHER; note = 2'-fluorouridine-3'-phosphate
  modified_base 9: mod_base = OTHER; note = 2'-fluoroguanosine-3'-phosphate
  modified_base 10: mod_base = OTHER; note = 2'-O-methyladenosine-3'-phosphate
  modified_base 11: mod_base = OTHER; note = 2'-O-methylguanosine-3'-phosphate
  modified_base 12: mod_base = OTHER; note = 2'-O-methyladenosine-3'-phosphate
  modified_base 13: mod_base = OTHER; note = 2'-O-methyladenosine-3'-phosphate
  modified_base 14: mod_base = OTHER; note = 2'-fluorouridine-3'-phosphate
  modified_base 15: mod_base = OTHER; note = 2'-O-methyluridine-3'-phosphate
  modified_base 16: mod_base = OTHER; note = 2'-fluorocytidine-3'-phosphate
  modified_base 17: mod_base = OTHER; note = 2'-O-methyladenosine-3'-phosphate
  modified_base 18: mod_base = OTHER; note = 2'-O-methyladenosine-3'-phosphate
  modified_base 19: mod_base = OTHER; note = 2'-O-methyladenosine-3'-phosphate
  modified_base 20: mod_base = OTHER; note = 2'-O-methyladenosine-3'-phosphate
  modified_base 21: mod_base = OTHER; note = 2'-O-methylguanosine-3'-phosphorothioate
  modified_base 22: mod_base = OTHER; note = 2'-O-methylguanosine-3'-phosphorothioate
  modified_base 23: mod_base = OTHER; note = 2'-O-methylcytidine-3'-phosphate
aagataatgagaattcaaaaggc

SEQ ID NO: 662 - RNA, 23 nt, synthetic construct
  source 1..23: mol_type = other RNA
  modified_base 1: mod_base = OTHER; note = 2'-O-methyladenosine-3'-phosphorothioate
  modified_base 2: mod_base = OTHER; note = 2'-fluorouridine -3'-phosphorothioate
  modified_base 3: mod_base = OTHER; note = 2'-O-methylcytidine-3'-phosphate
  modified_base 4: mod_base = OTHER; note = 2'-O-methyluridine-3'-phosphate
  modified_base 5: mod_base = OTHER; note = 2'-O-methylguanosine-3'-phosphate
  modified_base 6: mod_base = OTHER; note = 2'-fluoroguanosine-3'-phosphate
  modified_base 7: mod_base = OTHER; note = 2'-O-methyladenosine-3'-phosphate
  modified_base 8: mod_base = OTHER; note = 2'-fluoroadenosine-3'-phosphate
  modified_base 9: mod_base = OTHER; note = 2'-fluoroadenosine-3'-phosphate
  modified_base 10: mod_base = OTHER; note = 2'-O-methyladenosine-3'-phosphate
  modified_base 11: mod_base = OTHER; note = 2'-O-methylcytidine-3'-phosphate
  modified_base 12: mod_base = OTHER; note = 2'-O-methyluridine-3'-phosphate
  modified_base 13: mod_base = OTHER; note = 2'-O-methylcytidine-3'-phosphate
  modified_base 14: mod_base = OTHER; note = 2'-fluorocytidine-3'-phosphate
  modified_base 15: mod_base = OTHER; note = 2'-O-methyladenosine-3'-phosphate
  modified_base 16: mod_base = OTHER; note = 2'-fluorocytidine-3'-phosphate
  modified_base 17: mod_base = OTHER; note = 2'-O-methyladenosine-3'-phosphate
  modified_base 18: mod_base = OTHER; note = 2'-O-methyladenosine-3'-phosphate
  modified_base 19: mod_base = OTHER; note = 2'-O-methyluridine-3'-phosphate
  modified_base 20: mod_base = OTHER; note = 2'-O-methyladenosine-3'-phosphate
  modified_base 21: mod_base = OTHER; note = 2'-O-methylcytidine-3'-phosphorothioate
  modified_base 22: mod_base = OTHER; note = 2'-O-methyladenosine-3'-phosphorothioate
  modified_base 23: mod_base = OTHER; note = 2'-O-methyladenosine-3'-phosphate
atctggaaaactccacaatacaa

SEQ ID NO: 663 - RNA, 23 nt, synthetic construct
  source 1..23: mol_type = other RNA
  modified_base 1: mod_base = OTHER; note = 2'-O-methyladenosine-3'-phosphorothioate
  modified_base 2: mod_base = OTHER; note = 2'-fluoroadenosine-3'-phosphorothioate
  modified_base 3: mod_base = OTHER; note = 2'-O-methyluridine-3'-phosphate
  modified_base 4: mod_base = OTHER; note = 2'-O-methylcytidine-3'-phosphate
  modified_base 5: mod_base = OTHER; note = 2'-O-methyladenosine-3'-phosphate
  modified_base 6: mod_base = OTHER; note = 2'-fluorocytidine-3'-phosphate
  modified_base 7: mod_base = OTHER; note = 2'-O-methyladenosine-3'-phosphate
  modified_base 8: mod_base = OTHER; note = 2'-fluorouridine-3'-phosphate
  modified_base 9: mod_base = OTHER; note = 2'-fluoroguanosine-3'-phosphate
  modified_base 10: mod_base = OTHER; note = 2'-O-methyluridine-3'-phosphate
  modified_base 11: mod_base = OTHER; note = 2'-O-methylcytidine-3'-phosphate
  modified_base 12: mod_base = OTHER; note = 2'-O-methyladenosine-3'-phosphate
  modified_base 13: mod_base = OTHER; note = 2'-O-methylcytidine-3'-phosphate
  modified_base 14: mod_base = OTHER; note = 2'-fluoroadenosine-3'-phosphate
  modified_base 15: mod_base = OTHER; note = 2'-O-methylcytidine-3'-phosphate
  modified_base 16: mod_base = OTHER; note = 2'-fluoroguanosine-3'-phosphate
  modified_base 17: mod_base = OTHER; note = 2'-O-methylguanosine-3'-phosphate
  modified_base 18: mod_base = OTHER; note = 2'-O-methylcytidine-3'-phosphate
  modified_base 19: mod_base = OTHER; note = 2'-O-methylcytidine-3'-phosphate
  modified_base 20: mod_base = OTHER; note = 2'-O-methyluridine-3'-phosphate
  modified_base 21: mod_base = OTHER; note = 2'-O-methylcytidine-3'-phosphorothioate
  modified_base 22: mod_base = OTHER; note = 2'-O-methyluridine-3'-phosphorothioate
  modified_base 23: mod_base = OTHER; note = 2'-O-methylguanosine-3'-phosphate
aatcacatgtcacacggcctctg

SEQ ID NO: 664 - RNA, 23 nt, synthetic construct
  source 1..23: mol_type = other RNA
  modified_base 1: mod_base = OTHER; note = 2'-O-methyladenosine-3'-phosphorothioate
  modified_base 2: mod_base = OTHER; note = 2'-fluoroadenosine-3'-phosphorothioate
  modified_base 3: mod_base = OTHER; note = 2'-O-methyladenosine-3'-phosphate
  modified_base 4: mod_base = OTHER; note = 2'-O-methylguanosine-3'-phosphate
  modified_base 5: mod_base = OTHER; note = 2'-O-methyladenosine-3'-phosphate
  modified_base 6: mod_base = OTHER; note = 2'-fluorouridine-3'-phosphate
  modified_base 7: mod_base = OTHER; note = 2'-O-methylguanosine-3'-phosphate
  modified_base 8: mod_base = OTHER; note = 2'-fluoroadenosine-3'-phosphate
  modified_base 9: mod_base = OTHER; note = 2'-fluorouridine-3'-phosphate
  modified_base 10: mod_base = OTHER; note = 2'-O-methylguanosine-3'-phosphate
  modified_base 11: mod_base = OTHER; note = 2'-O-methyluridine-3'-phosphate
  modified_base 12: mod_base = OTHER; note = 2'-O-methyladenosine-3'-phosphate
  modified_base 13: mod_base = OTHER; note = 2'-O-methyladenosine-3'-phosphate
  modified_base 14: mod_base = OTHER; note = 2'-fluorouridine-3'-phosphate
  modified_base 15: mod_base = OTHER; note = 2'-O-methylcytidine-3'-phosphate
  modified_base 16: mod_base = OTHER; note = 2'-fluoroadenosine-3'-phosphate
  modified_base 17: mod_base = OTHER; note = 2'-O-methylcytidine-3'-phosphate
  modified_base 18: mod_base = OTHER; note = 2'-O-methyladenosine-3'-phosphate
  modified_base 19: mod_base = OTHER; note = 2'-O-methyluridine-3'-phosphate
  modified_base 20: mod_base = OTHER; note = 2'-O-methylguanosine-3'-phosphate
  modified_base 21: mod_base = OTHER; note = 2'-O-methyluridine-3'-phosphorothioate
  modified_base 22: mod_base = OTHER; note = 2'-O-methylcytidine-3'-phosphorothioate
  modified_base 23: mod_base = OTHER; note = 2'-O-methyladenosine-3'-phosphate
aaagatgatgtaatcacatgtca

SEQ ID NO: 665 - RNA, 23 nt, synthetic construct
  source 1..23: mol_type = other RNA
  modified_base 1: mod_base = OTHER; note = 2'-O-methyladenosine-3'-phosphorothioate
  modified_base 2: mod_base = OTHER; note = 2'-fluoroadenosine-3'-phosphorothioate
  modified_base 3: mod_base = OTHER; note = 2'-O-methyladenosine-3'-phosphate
  modified_base 4: mod_base = OTHER; note = 2'-O-methyluridine-3'-phosphate
  modified_base 5: mod_base = OTHER; note = 2'-O-methylguanosine-3'-phosphate
  modified_base 6: mod_base = OTHER; note = 2'-fluoroadenosine-3'-phosphate
  modified_base 7: mod_base = OTHER; note = 2'-O-methyluridine-3'-phosphate
  modified_base 8: mod_base = OTHER; note = 2'-fluoroguanosine-3'-phosphate
  modified_base 9: mod_base = OTHER; note = 2'-fluorouridine-3'-phosphate
  modified_base 10: mod_base = OTHER; note = 2'-O-methylcytidine-3'-phosphate
  modified_base 11: mod_base = OTHER; note = 2'-O-methyladenosine-3'-phosphate
  modified_base 12: mod_base = OTHER; note = 2'-O-methylguanosine-3'-phosphate
  modified_base 13: mod_base = OTHER; note = 2'-O-methyladenosine-3'-phosphate
  modified_base 14: mod_base = OTHER; note = 2'-fluoroadenosine-3'-phosphate
  modified_base 15: mod_base = OTHER; note = 2'-O-methyladenosine-3'-phosphate
  modified_base 16: mod_base = OTHER; note = 2'-fluoroguanosine-3'-phosphate
  modified_base 17: mod_base = OTHER; note = 2'-O-methyladenosine-3'-phosphate
  modified_base 18: mod_base = OTHER; note = 2'-O-methyluridine-3'-phosphate
  modified_base 19: mod_base = OTHER; note = 2'-O-methylguanosine-3'-phosphate
  modified_base 20: mod_base = OTHER; note = 2'-O-methyladenosine-3'-phosphate
  modified_base 21: mod_base = OTHER; note = 2'-O-methyluridine-3'-phosphorothioate
  modified_base 22: mod_base = OTHER; note = 2'-O-methylguanosine-3'-phosphorothioate
  modified_base 23: mod_base = OTHER; note = 2'-O-methyluridine-3'-phosphate
aaatgatgtcagaaagatgatgt

SEQ ID NO: 666 - RNA, 23 nt, synthetic construct
  source 1..23: mol_type = other RNA
  modified_base 1: mod_base = OTHER; note = 2'-O-methyladenosine-3'-phosphorothioate
  modified_base 2: mod_base = OTHER; note = 2'-fluoroadenosine-3'-phosphorothioate
  modified_base 3: mod_base = OTHER; note = 2'-O-methyluridine-3'-phosphate
  modified_base 4: mod_base = OTHER; note = 2'-O-methyluridine-3'-phosphate
  modified_base 5: mod_base = OTHER; note = 2'-O-methylcytidine-3'-phosphate
  modified_base 6: mod_base = OTHER; note = 2'-fluorocytidine-3'-phosphate
  modified_base 7: mod_base = OTHER; note = 2'-O-methyladenosine-3'-phosphate
  modified_base 8: mod_base = OTHER; note = 2'-fluorouridine-3'-phosphate
  modified_base 9: mod_base = OTHER; note = 2'-fluorouridine-3'-phosphate
  modified_base 10: mod_base = OTHER; note = 2'-O-methyladenosine-3'-phosphate
  modified_base 11: mod_base = OTHER; note = 2'-O-methyladenosine-3'-phosphate
  modified_base 12: mod_base = OTHER; note = 2'-O-methylcytidine-3'-phosphate
  modified_base 13: mod_base = OTHER; note = 2'-O-methyladenosine-3'-phosphate
  modified_base 14: mod_base = OTHER; note = 2'-fluoroadenosine-3'-phosphate
  modified_base 15: mod_base = OTHER; note = 2'-O-methyluridine-3'-phosphate
  modified_base 16: mod_base = OTHER; note = 2'-fluoroguanosine-3'-phosphate
  modified_base 17: mod_base = OTHER; note = 2'-O-methyladenosine-3'-phosphate
  modified_base 18: mod_base = OTHER; note = 2'-O-methyluridine-3'-phosphate
  modified_base 19: mod_base = OTHER; note = 2'-O-methylguanosine-3'-phosphate
  modified_base 20: mod_base = OTHER; note = 2'-O-methyluridine-3'-phosphate
  modified_base 21: mod_base = OTHER; note = 2'-O-methylcytidine-3'-phosphorothioate
  modified_base 22: mod_base = OTHER; note = 2'-O-methyladenosine-3'-phosphorothioate
  modified_base 23: mod_base = OTHER; note = 2'-O-methylguanosine-3'-phosphate
aattccattaacaatgatgtcag

SEQ ID NO: 667 - DNA, 23 bp, synthetic construct
  source 1..23: mol_type = other DNA
agtagccagacatgagctgtgag

SEQ ID NO: 668 - DNA, 23 bp, synthetic construct
  source 1..23: mol_type = other DNA
gtgagggtcaagcacagctatcc

SEQ ID NO: 669 - DNA, 23 bp, synthetic construct
  source 1..23: mol_type = other DNA
ctatccatcagatgatctacttt

SEQ ID NO: 670 - DNA, 23 bp, synthetic construct
  source 1..23: mol_type = other DNA
atgatctactttcagccttcctg

SEQ ID NO: 671 - DNA, 23 bp, synthetic construct
  source 1..23: mol_type = other DNA
ctgagtcccagacaatagaagac

SEQ ID NO: 672 - DNA, 23 bp, synthetic construct
  source 1..23: mol_type = other DNA
caatagaagacaggtggctgtac

SEQ ID NO: 673 - DNA, 23 bp, synthetic construct
  source 1..23: mol_type = other DNA
aggtggctgtacccttggccaag

SEQ ID NO: 674 - DNA, 23 bp, synthetic construct
  source 1..23: mol_type = other DNA
cccttggccaagggtaggtgtgg

SEQ ID NO: 675 - DNA, 23 bp, synthetic construct
  source 1..23: mol_type = other DNA
gtgtggcagtggtgtctgctgtc

SEQ ID NO: 676 - DNA, 23 bp, synthetic construct
  source 1..23: mol_type = other DNA
tctgctgtcactgtgccctcatt

SEQ ID NO: 677 - DNA, 23 bp, synthetic construct
  source 1..23: mol_type = other DNA
ccagcaatcagactcaacagacg

SEQ ID NO: 678 - DNA, 23 bp, synthetic construct
  source 1..23: mol_type = other DNA
agacggagcaactgccatccgag

SEQ ID NO: 679 - DNA, 23 bp, synthetic construct
  source 1..23: mol_type = other DNA
aggctcctgaaccagggccattc

SEQ ID NO: 680 - DNA, 23 bp, synthetic construct
  source 1..23: mol_type = other DNA
ccagggccattcaccaggagcat

SEQ ID NO: 681 - DNA, 23 bp, synthetic construct
  source 1..23: mol_type = other DNA
cggctccctgatgtccagctctg

SEQ ID NO: 682 - DNA, 23 bp, synthetic construct
  source 1..23: mol_type = other DNA
tccagctctggctggtgctgctg

SEQ ID NO: 683 - DNA, 23 bp, synthetic construct
  source 1..23: mol_type = other DNA
tgtgggcactggtgcgagcacag

SEQ ID NO: 684 - DNA, 23 bp, synthetic construct
  source 1..23: mol_type = other DNA
acagggtctgtgtgtccctcctg

SEQ ID NO: 685 - DNA, 23 bp, synthetic construct
  source 1..23: mol_type = other DNA
cccaagcagaacgagctctggtg

SEQ ID NO: 686 - DNA, 23 bp, synthetic construct
  source 1..23: mol_type = other DNA
ctctggtgctggagctagccaag

SEQ ID NO: 687 - DNA, 23 bp, synthetic construct
  source 1..23: mol_type = other DNA
agctagccaagcagcaaatcctg

SEQ ID NO: 688 - DNA, 23 bp, synthetic construct
  source 1..23: mol_type = other DNA
aaatcctggatgggttgcacctg

SEQ ID NO: 689 - DNA, 23 bp, synthetic construct
  source 1..23: mol_type = other DNA
ggttgcacctgaccagtcgtccc

SEQ ID NO: 690 - DNA, 23 bp, synthetic construct
  source 1..23: mol_type = other DNA
agtcgtcccagaataactcatcc

SEQ ID NO: 691 - DNA, 23 bp, synthetic construct
  source 1..23: mol_type = other DNA
agccctccggagactacagccag

SEQ ID NO: 692 - DNA, 23 bp, synthetic construct
  source 1..23: mol_type = other DNA
actacagccagggagtgtggctc

SEQ ID NO: 693 - DNA, 23 bp, synthetic construct
  source 1..23: mol_type = other DNA
ggagtgtggctccagggaatggg

SEQ ID NO: 694 - DNA, 23 bp, synthetic construct
  source 1..23: mol_type = other DNA
gtcatcagctttgctactgtcac

SEQ ID NO: 695 - DNA, 23 bp, synthetic construct
  source 1..23: mol_type = other DNA
tactgtcacagactccacttcag

SEQ ID NO: 696 - DNA, 23 bp, synthetic construct
  source 1..23: mol_type = other DNA
actccacttcagcctacagctcc

SEQ ID NO: 697 - DNA, 23 bp, synthetic construct
  source 1..23: mol_type = other DNA
tccctgctcacttttcacctgtc

SEQ ID NO: 698 - DNA, 23 bp, synthetic construct
  source 1..23: mol_type = other DNA
tttcacctgtccactcctcggtc

SEQ ID NO: 699 - DNA, 23 bp, synthetic construct
  source 1..23: mol_type = other DNA
ggtcccaccacctgtaccatgcc

SEQ ID NO: 700 - DNA, 23 bp, synthetic construct
  source 1..23: mol_type = other DNA
tgtaccatgcccgcctgtggctg

SEQ ID NO: 701 - DNA, 23 bp, synthetic construct
  source 1..23: mol_type = other DNA
cacccttcctggcactctttgct

SEQ ID NO: 702 - DNA, 23 bp, synthetic construct
  source 1..23: mol_type = other DNA
cactctttgcttgaggatcttcc

SEQ ID NO: 703 - DNA, 23 bp, synthetic construct
  source 1..23: mol_type = other DNA
gcactctcctggctgagcaccac

SEQ ID NO: 704 - DNA, 23 bp, synthetic construct
  source 1..23: mol_type = other DNA
ctgagcaccacatcaccaacctg

SEQ ID NO: 705 - DNA, 23 bp, synthetic construct
  source 1..23: mol_type = other DNA
tcaccaacctgggctggcatacc

SEQ ID NO: 706 - DNA, 23 bp, synthetic construct
  source 1..23: mol_type = other DNA
ggctggcataccttaactctgcc

SEQ ID NO: 707 - DNA, 23 bp, synthetic construct
  source 1..23: mol_type = other DNA
tctgccctctagtggcttgaggg

SEQ ID NO: 708 - DNA, 23 bp, synthetic construct
  source 1..23: mol_type = other DNA
tgagaagtctggtgtcctgaaac

SEQ ID NO: 709 - DNA, 23 bp, synthetic construct
  source 1..23: mol_type = other DNA
gtgtcctgaaactgcaactagac

SEQ ID NO: 710 - DNA, 23 bp, synthetic construct
  source 1..23: mol_type = other DNA
caacagcacagttactggacaac

SEQ ID NO: 711 - DNA, 23 bp, synthetic construct
  source 1..23: mol_type = other DNA
tactggacaaccgaggcggctct

SEQ ID NO: 712 - DNA, 23 bp, synthetic construct
  source 1..23: mol_type = other DNA
aggcggctcttggacacagcagg

SEQ ID NO: 713 - DNA, 23 bp, synthetic construct
  source 1..23: mol_type = other DNA
aggacaccagcagcccttcctag

SEQ ID NO: 714 - DNA, 23 bp, synthetic construct
  source 1..23: mol_type = other DNA
gcccttcctagagcttaagatcc

SEQ ID NO: 715 - DNA, 23 bp, synthetic construct
  source 1..23: mol_type = other DNA
agcttaagatccgagccaatgag

SEQ ID NO: 716 - DNA, 23 bp, synthetic construct
  source 1..23: mol_type = other DNA
cgagccaatgagcctggagcagg

SEQ ID NO: 717 - DNA, 23 bp, synthetic construct
  source 1..23: mol_type = other DNA
gcaggcgagaccattacgtagac

SEQ ID NO: 718 - DNA, 23 bp, synthetic construct
  source 1..23: mol_type = other DNA
attacgtagacttccaggaactg

SEQ ID NO: 719 - DNA, 23 bp, synthetic construct
  source 1..23: mol_type = other DNA
tccaggaactgggatggcgggac

SEQ ID NO: 720 - DNA, 23 bp, synthetic construct
  source 1..23: mol_type = other DNA
tggcgggactggatactgcagcc

SEQ ID NO: 721 - DNA, 23 bp, synthetic construct
  source 1..23: mol_type = other DNA
ggtaccagctgaattactgcagt

SEQ ID NO: 722 - DNA, 23 bp, synthetic construct
  source 1..23: mol_type = other DNA
ttactgcagtgggcagtgccctc

SEQ ID NO: 723 - DNA, 23 bp, synthetic construct
  source 1..23: mol_type = other DNA
cccaggcattgctgcctctttcc

SEQ ID NO: 724 - DNA, 23 bp, synthetic construct
  source 1..23: mol_type = other DNA
tctttccattctgccgtcttcag

SEQ ID NO: 725 - DNA, 23 bp, synthetic construct
  source 1..23: mol_type = other DNA
gccgtcttcagcctcctcaaagc

SEQ ID NO: 726 - DNA, 23 bp, synthetic construct
  source 1..23: mol_type = other DNA
ctcctcaaagccaacaatccttg

SEQ ID NO: 727 - DNA, 23 bp, synthetic construct
  source 1..23: mol_type = other DNA
tccttggcctgccagtacctcct

SEQ ID NO: 728 - DNA, 23 bp, synthetic construct
  source 1..23: mol_type = other DNA
agtacctcctgttgtgtccctac

SEQ ID NO: 729 - DNA, 23 bp, synthetic construct
  source 1..23: mol_type = other DNA
ttgtgtccctactgcccgaaggc

SEQ ID NO: 730 - DNA, 23 bp, synthetic construct
  source 1..23: mol_type = other DNA
ccctctctctcctctacctggat

SEQ ID NO: 731 - DNA, 23 bp, synthetic construct
  source 1..23: mol_type = other DNA
tctacctggatcataatggcaat

SEQ ID NO: 732 - DNA, 23 bp, synthetic construct
  source 1..23: mol_type = other DNA
ataatggcaatgtggtcaagacg

SEQ ID NO: 733 - DNA, 23 bp, synthetic construct
  source 1..23: mol_type = other DNA
tcaagacggatgtgccagatatg

SEQ ID NO: 734 - DNA, 23 bp, synthetic construct
  source 1..23: mol_type = other DNA
gtgccagatatggtggtggaggc

SEQ ID NO: 735 - DNA, 23 bp, synthetic construct
  source 1..23: mol_type = other DNA
tggaggcctgtggctgcagctag

SEQ ID NO: 736 - DNA, 23 bp, synthetic construct
  source 1..23: mol_type = other DNA
gctgcagctagcaagaggacctg

SEQ ID NO: 737 - DNA, 23 bp, synthetic construct
  source 1..23: mol_type = other DNA
ggctttggagtgaagagaccaag

SEQ ID NO: 738 - DNA, 23 bp, synthetic construct
  source 1..23: mol_type = other DNA
gaagagaccaagatgaagtttcc

SEQ ID NO: 739 - DNA, 23 bp, synthetic construct
  source 1..23: mol_type = other DNA
cacagggcatctgtgactggagg

SEQ ID NO: 740 - DNA, 23 bp, synthetic construct
  source 1..23: mol_type = other DNA
tggaggcatcagattcctgatcc

SEQ ID NO: 741 - DNA, 23 bp, synthetic construct
  source 1..23: mol_type = other DNA
caacccaacaaccacctggcaat

SEQ ID NO: 742 - DNA, 23 bp, synthetic construct
  source 1..23: mol_type = other DNA
ctggcaatatgactcacttgacc

SEQ ID NO: 743 - DNA, 23 bp, synthetic construct
  source 1..23: mol_type = other DNA
gggacccaaatgggcactttctt

SEQ ID NO: 744 - DNA, 23 bp, synthetic construct
  source 1..23: mol_type = other DNA
gcactttcttgtctgagactctg

SEQ ID NO: 745 - DNA, 23 bp, synthetic construct
  source 1..23: mol_type = other DNA
tctgagactctggcttattccag

SEQ ID NO: 746 - DNA, 23 bp, synthetic construct
  source 1..23: mol_type = other DNA
attccaggttggctgatgtgttg

SEQ ID NO: 747 - DNA, 23 bp, synthetic construct
  source 1..23: mol_type = other DNA
gatgtgttgggagatgggtaaag

SEQ ID NO: 748 - DNA, 23 bp, synthetic construct
  source 1..23: mol_type = other DNA
tgggtaaagcgtttcttctaaag

SEQ ID NO: 749 - DNA, 23 bp, synthetic construct
  source 1..23: mol_type = other DNA
tctacccagaaagcatgatttcc

SEQ ID NO: 750 - DNA, 23 bp, synthetic construct
  source 1..23: mol_type = other DNA
atgatttcctgccctaagtcctg

SEQ ID NO: 751 - DNA, 23 bp, synthetic construct
  source 1..23: mol_type = other DNA
taagtcctgtgagaagatgtcag

SEQ ID NO: 752 - DNA, 23 bp, synthetic construct
  source 1..23: mol_type = other DNA
tgtcagggactagggagggaggg

SEQ ID NO: 753 - DNA, 23 bp, synthetic construct
  source 1..23: mol_type = other DNA
aaaattacttagcctctcccaag

SEQ ID NO: 754 - DNA, 23 bp, synthetic construct
  source 1..23: mol_type = other DNA
cccaagatgagaaagtcctcaag

SEQ ID NO: 755 - DNA, 23 bp, synthetic construct
  source 1..23: mol_type = other DNA
gaggaggaagcagatagatggtc

SEQ ID NO: 756 - DNA, 23 bp, synthetic construct
  source 1..23: mol_type = other DNA
cagcaggcttgaagcagggtaag

SEQ ID NO: 757 - DNA, 23 bp, synthetic construct
  source 1..23: mol_type = other DNA
aagcagggtaagcaggctggccc

SEQ ID NO: 758 - DNA, 23 bp, synthetic construct
  source 1..23: mol_type = other DNA
ctggcccagggtaagggctgttg

SEQ ID NO: 759 - DNA, 23 bp, synthetic construct
  source 1..23: mol_type = other DNA
agggctgttgaggtaccttaagg

SEQ ID NO: 760 - DNA, 23 bp, synthetic construct
  source 1..23: mol_type = other DNA
gtaccttaagggaaggtcaagag

SEQ ID NO: 761 - DNA, 23 bp, synthetic construct
  source 1..23: mol_type = other DNA
aggtcaagagggagatgggcaag

SEQ ID NO: 762 - DNA, 23 bp, synthetic construct
  source 1..23: mol_type = other DNA
gcgctgagggaggatgcttaggg

SEQ ID NO: 763 - DNA, 23 bp, synthetic construct
  source 1..23: mol_type = other DNA
ccagaaacaggagtcaggaaaat

SEQ ID NO: 764 - DNA, 23 bp, synthetic construct
  source 1..23: mol_type = other DNA
agtcaggaaaatgaggcactaag

SEQ ID NO: 765 - DNA, 23 bp, synthetic construct
  source 1..23: mol_type = other DNA
gaggcactaagcctaagaagttc

SEQ ID NO: 766 - DNA, 23 bp, synthetic construct
  source 1..23: mol_type = other DNA
ctaagaagttccctggtttttcc

SEQ ID NO: 767 - DNA, 23 bp, synthetic construct
  source 1..23: mol_type = other DNA
cccactgggagacaagcatttat

SEQ ID NO: 768 - DNA, 23 bp, synthetic construct
  source 1..23: mol_type = other DNA
acaagcatttatactttctttct

SEQ ID NO: 769 - DNA, 23 bp, synthetic construct
  source 1..23: mol_type = other DNA
ttttttgagatcgagtctcgctc

SEQ ID NO: 770 - DNA, 23 bp, synthetic construct
  source 1..23: mol_type = other DNA
agtctcgctctgtcaccaggctg

SEQ ID NO: 771 - DNA, 23 bp, synthetic construct
  source 1..23: mol_type = other DNA
ggagtgcagtgacacgatcttgg

SEQ ID NO: 772 - DNA, 23 bp, synthetic construct
  source 1..23: mol_type = other DNA
tggctcactgcaacctccgtctc

SEQ ID NO: 773 - DNA, 23 bp, synthetic construct
  source 1..23: mol_type = other DNA
aacctccgtctcctgggttcaag

SEQ ID NO: 774 - DNA, 23 bp, synthetic construct
  source 1..23: mol_type = other DNA
tcttctgcctcagcctcccgagc

SEQ ID NO: 775 - DNA, 23 bp, synthetic construct
  source 1..23: mol_type = other DNA
cctgggttcaagtgattcttctg

SEQ ID NO: 776 - DNA, 23 bp, synthetic construct
  source 1..23: mol_type = other DNA
ccgagcagctgggattacaggcg

SEQ ID NO: 777 - DNA, 23 bp, synthetic construct
  source 1..23: mol_type = other DNA
ggcgcccactaatttttgtattc

SEQ ID NO: 778 - DNA, 23 bp, synthetic construct
  source 1..23: mol_type = other DNA
tttgtattcttagtagaaacgag

SEQ ID NO: 779 - DNA, 23 bp, synthetic construct
  source 1..23: mol_type = other DNA
agtagaaacgaggtttcaacatg

SEQ ID NO: 780 - DNA, 23 bp, synthetic construct
  source 1..23: mol_type = other DNA
gtttcaacatgttggccaggatg

SEQ ID NO: 781 - DNA, 23 bp, synthetic construct
  source 1..23: mol_type = other DNA
ggccaggatggtctcaatctctt

SEQ ID NO: 782 - DNA, 23 bp, synthetic construct
  source 1..23: mol_type = other DNA
tctcaatctcttgacctcttgat

SEQ ID NO: 783 - DNA, 23 bp, synthetic construct
  source 1..23: mol_type = other DNA
tgacctcttgatccacccgactt

SEQ ID NO: 784 - DNA, 23 bp, synthetic construct
  source 1..23: mol_type = other DNA
acccgacttggcctcccgaagtg

SEQ ID NO: 785 - DNA, 23 bp, synthetic construct
  source 1..23: mol_type = other DNA
ccgaagtgatgagattataggcg

SEQ ID NO: 786 - DNA, 23 bp, synthetic construct
  source 1..23: mol_type = other DNA
cgcctggcttatactttcttaat

SEQ ID NO: 787 - DNA, 23 bp, synthetic construct
  source 1..23: mol_type = other DNA
aggagaaagaaaatcaacaaatg

SEQ ID NO: 788 - DNA, 23 bp, synthetic construct
  source 1..23: mol_type = other DNA
tgtgagtcataaagaagggttag

SEQ ID NO: 789 - DNA, 23 bp, synthetic construct
  source 1..23: mol_type = other DNA
gaagggttagggtgatggtccag

SEQ ID NO: 790 - DNA, 23 bp, synthetic construct
  source 1..23: mol_type = other DNA
gtccagagcaacagttcttcaag

SEQ ID NO: 791 - DNA, 23 bp, synthetic construct
  source 1..23: mol_type = other DNA
agttcttcaagtgtactctgtag

SEQ ID NO: 792 - DNA, 23 bp, synthetic construct
  source 1..23: mol_type = other DNA
tgtactctgtaggcttctgggag

SEQ ID NO: 793 - DNA, 23 bp, synthetic construct
  source 1..23: mol_type = other DNA
ttctgggaggtcccttttcaggg

SEQ ID NO: 794 - DNA, 23 bp, synthetic construct
  source 1..23: mol_type = other DNA
gtgtccacaaagtcaaagctatt

SEQ ID NO: 795 - DNA, 23 bp, synthetic construct
  source 1..23: mol_type = other DNA
tactaacatgttatttgcctttt

SEQ ID NO: 796 - DNA, 23 bp, synthetic construct
  source 1..23: mol_type = other DNA
gccttttgaattctcattatctt

SEQ ID NO: 797 - DNA, 23 bp, synthetic construct
  source 1..23: mol_type = other DNA
ttgtattgtggagttttccagag

SEQ ID NO: 798 - DNA, 23 bp, synthetic construct
  source 1..23: mol_type = other DNA
cagaggccgtgtgacatgtgatt

SEQ ID NO: 799 - DNA, 23 bp, synthetic construct
  source 1..23: mol_type = other DNA
tgacatgtgattacatcatcttt

SEQ ID NO: 800 - DNA, 23 bp, synthetic construct
  source 1..23: mol_type = other DNA
acatcatctttctgacatcattg

SEQ ID NO: 801 - DNA, 23 bp, synthetic construct
  source 1..23: mol_type = other DNA
ctgacatcattgttaatggaatg

SEQ ID NO: 802 - RNA, 21 nt, synthetic construct
  source 1..21: mol_type = other RNA
ttttttcaaactccattccta

SEQ ID NO: 803 - RNA, 21 nt, synthetic construct
  source 1..21: mol_type = other RNA
actttcatctgtcttcagata

SEQ ID NO: 804 - RNA, 21 nt, synthetic construct
  source 1..21: mol_type = other RNA
cctcataacttctccagtaaa

SEQ ID NO: 805 - RNA, 21 nt, synthetic construct
  source 1..21: mol_type = other RNA
ctcactatctttcaacattaa

SEQ ID NO: 806 - RNA, 21 nt, synthetic construct
  source 1..21: mol_type = other RNA
ctcgttaatgctctcatccaa

SEQ ID NO: 807 - RNA, 21 nt, synthetic construct
  source 1..21: mol_type = other RNA
gttcttcataatccactacta

SEQ ID NO: 808 - RNA, 21 nt, synthetic construct
  source 1..21: mol_type = other RNA
gttgacttcatccaatctcta

SEQ ID NO: 809 - RNA, 21 nt, synthetic construct
  source 1..21: mol_type = other RNA
ctacacaatgaacttcttaaa

SEQ ID NO: 810 - RNA, 21 nt, synthetic construct
  source 1..21: mol_type = other RNA
cacatctagaattcttaatta

SEQ ID NO: 811 - RNA, 21 nt, synthetic construct
  source 1..21: mol_type = other RNA
aaatctctcatagctttctta

SEQ ID NO: 812 - RNA, 21 nt, synthetic construct
  source 1..21: mol_type = other RNA
cctactattgtagaattacta

SEQ ID NO: 813 - RNA, 21 nt, synthetic construct
  source 1..21: mol_type = other RNA
atcttcttttagtgcattaaa

SEQ ID NO: 814 - RNA, 21 nt, synthetic construct
  source 1..21: mol_type = other RNA
ctcatgtactcttctgattca

SEQ ID NO: 815 - RNA, 21 nt, synthetic construct
  source 1..21: mol_type = other RNA
tttctctttgtaccttggaaa

SEQ ID NO: 816 - RNA, 21 nt, synthetic construct
  source 1..21: mol_type = other RNA
tggcttatacatcttcagaaa

SEQ ID NO: 817 - RNA, 21 nt, synthetic construct
  source 1..21: mol_type = other RNA
caaaacaaaactactcctata

SEQ ID NO: 818 - RNA, 21 nt, synthetic construct
  source 1..21: mol_type = other RNA
actagcagaactcttatgaaa

SEQ ID NO: 819 - RNA, 21 nt, synthetic construct
  source 1..21: mol_type = other RNA
ccaagtcactctataattcca

SEQ ID NO: 820 - RNA, 21 nt, synthetic construct
  source 1..21: mol_type = other RNA
tccatttttcttgtcattata

SEQ ID NO: 821 - RNA, 21 nt, synthetic construct
  source 1..21: mol_type = other RNA
caacacctcaactcatcttta

SEQ ID NO: 822 - RNA, 21 nt, synthetic construct
  source 1..21: mol_type = other RNA
actctgaaagatctgatttaa

SEQ ID NO: 823 - RNA, 21 nt, synthetic construct
  source 1..21: mol_type = other RNA
ctagttcttttccgcaatgaa

SEQ ID NO: 824 - RNA, 21 nt, synthetic construct
  source 1..21: mol_type = other RNA
ctttcactctgaagaaatcca

SEQ ID NO: 825 - RNA, 21 nt, synthetic construct
  source 1..21: mol_type = other RNA
tctaacttttctctctttcta

SEQ ID NO: 826 - RNA, 21 nt, synthetic construct
  source 1..21: mol_type = other RNA
tctcaactttgtgtcaaagaa

SEQ ID NO: 827 - RNA, 21 nt, synthetic construct
  source 1..21: mol_type = other RNA
cttcaataatcattcctttaa

SEQ ID NO: 828 - RNA, 21 nt, synthetic construct
  source 1..21: mol_type = other RNA
taactgctcttcgtattaaga

SEQ ID NO: 829 - RNA, 21 nt, synthetic construct
  source 1..21: mol_type = other RNA
tcttctgtcatagttccaaca

SEQ ID NO: 830 - RNA, 21 nt, synthetic construct
  source 1..21: mol_type = other RNA
atctcagaaccatatctgtta

SEQ ID NO: 831 - RNA, 21 nt, synthetic construct
  source 1..21: mol_type = other RNA
tgaatctatcttcattttaca

SEQ ID NO: 832 - RNA, 21 nt, synthetic construct
  source 1..21: mol_type = other RNA
accactaaacttgttccttta

SEQ ID NO: 833 - RNA, 21 nt, synthetic construct
  source 1..21: mol_type = other RNA
agtgttctttactccttacaa

SEQ ID NO: 834 - RNA, 21 nt, synthetic construct
  source 1..21: mol_type = other RNA
ctttactcttaacaggattaa

SEQ ID NO: 835 - RNA, 21 nt, synthetic construct
  source 1..21: mol_type = other RNA
tatacctaagaacatattaca

SEQ ID NO: 836 - RNA, 21 nt, synthetic construct
  source 1..21: mol_type = other RNA
cttctactgagatgatccaaa

SEQ ID NO: 837 - RNA, 21 nt, synthetic construct
  source 1..21: mol_type = other RNA
ctgtattttctcatagagtaa

SEQ ID NO: 838 - RNA, 21 nt, synthetic construct
  source 1..21: mol_type = other RNA
acttttctctttcagttgtaa

SEQ ID NO: 839 - RNA, 21 nt, synthetic construct
  source 1..21: mol_type = other RNA
attaatttctagtctgtgaaa

SEQ ID NO: 840 - RNA, 21 nt, synthetic construct
  source 1..21: mol_type = other RNA
ctctgtataagaggtttcaca

SEQ ID NO: 841 - RNA, 21 nt, synthetic construct
  source 1..21: mol_type = other RNA
gactttcaaagtactaataca

SEQ ID NO: 842 - RNA, 21 nt, synthetic construct
  source 1..21: mol_type = other RNA
tttgccattatacaaagttta

SEQ ID NO: 843 - RNA, 21 nt, synthetic construct
  source 1..21: mol_type = other RNA
gaacactatcgacatacctca

SEQ ID NO: 844 - RNA, 21 nt, synthetic construct
  source 1..21: mol_type = other RNA
tagaatgacatttactaataa

SEQ ID NO: 845 - RNA, 21 nt, synthetic construct
  source 1..21: mol_type = other RNA
aagctacttagaaatgtttaa

SEQ ID NO: 846 - RNA, 21 nt, synthetic construct
  source 1..21: mol_type = other RNA
ccttagtactctcagagatta

SEQ ID NO: 847 - RNA, 21 nt, synthetic construct
  source 1..21: mol_type = other RNA
tgaatgcacactaacgtaata

SEQ ID NO: 848 - RNA, 21 nt, synthetic construct
  source 1..21: mol_type = other RNA
aagcctaatgatgataattaa

SEQ ID NO: 849 - RNA, 21 nt, synthetic construct
  source 1..21: mol_type = other RNA
aaactttttactatcccataa

SEQ ID NO: 850 - RNA, 21 nt, synthetic construct
  source 1..21: mol_type = other RNA
ctagctgatactcttaagtaa

SEQ ID NO: 851 - RNA, 21 nt, synthetic construct
  source 1..21: mol_type = other RNA
agcatgaaaagataactctaa

SEQ ID NO: 852 - RNA, 21 nt, synthetic construct
  source 1..21: mol_type = other RNA
taagccattatgctattagta

SEQ ID NO: 853 - RNA, 21 nt, synthetic construct
  source 1..21: mol_type = other RNA
tctagcttttagctaacataa

SEQ ID NO: 854 - RNA, 21 nt, synthetic construct
  source 1..21: mol_type = other RNA
gtgtgattcttcaaacttcaa

SEQ ID NO: 855 - RNA, 21 nt, synthetic construct
  source 1..21: mol_type = other RNA
tctccagacctaacagtttta

SEQ ID NO: 856 - RNA, 21 nt, synthetic construct
  source 1..21: mol_type = other RNA
ctttttttcatctagccttga

SEQ ID NO: 857 - RNA, 21 nt, synthetic construct
  source 1..21: mol_type = other RNA
caaaataattcttgacatcta

SEQ ID NO: 858 - RNA, 21 nt, synthetic construct
  source 1..21: mol_type = other RNA
gcatcactttctgaaaataaa

SEQ ID NO: 859 - RNA, 21 nt, synthetic construct
  source 1..21: mol_type = other RNA
tcttttgtgaaacatactata

SEQ ID NO: 860 - RNA, 21 nt, synthetic construct
  source 1..21: mol_type = other RNA
ctatttcttccataggctaaa

SEQ ID NO: 861 - RNA, 21 nt, synthetic construct
  source 1..21: mol_type = other RNA
cttcaatgaagtgttaacaaa

SEQ ID NO: 862 - RNA, 21 nt, synthetic construct
  source 1..21: mol_type = other RNA
tttgccttcattctactttca

SEQ ID NO: 863 - RNA, 21 nt, synthetic construct
  source 1..21: mol_type = other RNA
aggtttttaaatgtcctaaaa

SEQ ID NO: 864 - RNA, 21 nt, synthetic construct
  source 1..21: mol_type = other RNA
gaatatctttgagtccttcaa

SEQ ID NO: 865 - RNA, 21 nt, synthetic construct
  source 1..21: mol_type = other RNA
gaacacttccaaagattaata

SEQ ID NO: 866 - RNA, 21 nt, synthetic construct
  source 1..21: mol_type = other RNA
ctaaattttgtctaacaaata

SEQ ID NO: 867 - RNA, 21 nt, synthetic construct
  source 1..21: mol_type = other RNA
gtaaacaacttaaaattgcta

SEQ ID NO: 868 - RNA, 21 nt, synthetic construct
  source 1..21: mol_type = other RNA
aaaataatttactcactcaga

SEQ ID NO: 869 - RNA, 21 nt, synthetic construct
  source 1..21: mol_type = other RNA
gacatctattctgttggtcta

SEQ ID NO: 870 - RNA, 21 nt, synthetic construct
  source 1..21: mol_type = other RNA
taactgagtagtcttatatta

SEQ ID NO: 871 - RNA, 21 nt, synthetic construct
  source 1..21: mol_type = other RNA
tctggaatttagccttctaaa

SEQ ID NO: 872 - RNA, 21 nt, synthetic construct
  source 1..21: mol_type = other RNA
acatgccttgaactcttgaaa

SEQ ID NO: 873 - RNA, 21 nt, synthetic construct
  source 1..21: mol_type = other RNA
atcaagcacttcttgcactta

SEQ ID NO: 874 - RNA, 21 nt, synthetic construct
  source 1..21: mol_type = other RNA
cttgcttttcatctttataca

SEQ ID NO: 875 - RNA, 21 nt, synthetic construct
  source 1..21: mol_type = other RNA
ttttctccctatgtaatatca

SEQ ID NO: 876 - RNA, 21 nt, synthetic construct
  source 1..21: mol_type = other RNA
tgctttcttctatgtctaaaa

SEQ ID NO: 877 - RNA, 21 nt, synthetic construct
  source 1..21: mol_type = other RNA
acctgcttagcaaatcgtcta

SEQ ID NO: 878 - RNA, 21 nt, synthetic construct
  source 1..21: mol_type = other RNA
atattcctctaccctttcaca

SEQ ID NO: 879 - RNA, 21 nt, synthetic construct
  source 1..21: mol_type = other RNA
tcccacttttctttgggttta

SEQ ID NO: 880 - RNA, 21 nt, synthetic construct
  source 1..21: mol_type = other RNA
aggcttcttgtatatacttaa

SEQ ID NO: 881 - RNA, 21 nt, synthetic construct
  source 1..21: mol_type = other RNA
aaacttgatctgtgtttcaga

SEQ ID NO: 882 - RNA, 21 nt, synthetic construct
  source 1..21: mol_type = other RNA
tttgctttaatgctaaattca

SEQ ID NO: 883 - RNA, 21 nt, synthetic construct
  source 1..21: mol_type = other RNA
agactagctgttatttgtata

SEQ ID NO: 884 - RNA, 21 nt, synthetic construct
  source 1..21: mol_type = other RNA
ttcctactttcccttgaataa

SEQ ID NO: 885 - RNA, 21 nt, synthetic construct
  source 1..21: mol_type = other RNA
cagaactgaatgctcaagtca

SEQ ID NO: 886 - RNA, 21 nt, synthetic construct
  source 1..21: mol_type = other RNA
tcttgttactaatttctcata

SEQ ID NO: 887 - RNA, 21 nt, synthetic construct
  source 1..21: mol_type = other RNA
ctcagtgatagcctttataca

SEQ ID NO: 888 - RNA, 21 nt, synthetic construct
  source 1..21: mol_type = other RNA
ttttatgctcctaaaacatca

SEQ ID NO: 889 - RNA, 21 nt, synthetic construct
  source 1..21: mol_type = other RNA
ttctccttaggttatgttcaa

SEQ ID NO: 890 - RNA, 21 nt, synthetic construct
  source 1..21: mol_type = other RNA
attgctcatcgagacataaaa

SEQ ID NO: 891 - RNA, 21 nt, synthetic construct
  source 1..21: mol_type = other RNA
cctttgtacatacacacttaa

SEQ ID NO: 892 - RNA, 21 nt, synthetic construct
  source 1..21: mol_type = other RNA
ttgaaccaagagcacatgaaa

SEQ ID NO: 893 - RNA, 21 nt, synthetic construct
  source 1..21: mol_type = other RNA
tcagggattttaaagtctaaa

SEQ ID NO: 894 - RNA, 21 nt, synthetic construct
  source 1..21: mol_type = other RNA
tacttgcttataaagtgataa

SEQ ID NO: 895 - RNA, 21 nt, synthetic construct
  source 1..21: mol_type = other RNA
atgcatctaaacctaccttga

SEQ ID NO: 896 - RNA, 21 nt, synthetic construct
  source 1..21: mol_type = other RNA
ttgggaaaacactattatgaa

SEQ ID NO: 897 - RNA, 21 nt, synthetic construct
  source 1..21: mol_type = other RNA
aaactccaaagagaaatgaaa

SEQ ID NO: 898 - RNA, 21 nt, synthetic construct
  source 1..21: mol_type = other RNA
atgggcatttttcaaaacata

SEQ ID NO: 899 - RNA, 21 nt, synthetic construct
  source 1..21: mol_type = other RNA
ataatggaacttggactcaaa

SEQ ID NO: 900 - RNA, 21 nt, synthetic construct
  source 1..21: mol_type = other RNA
tgtgtagatgacgaaaccaaa

SEQ ID NO: 901 - RNA, 21 nt, synthetic construct
  source 1..21: mol_type = other RNA
ttctacctcaaagataagaca

SEQ ID NO: 902 - RNA, 21 nt, synthetic construct
  source 1..21: mol_type = other RNA
agaaggcatattgagttatta

SEQ ID NO: 903 - RNA, 21 nt, synthetic construct
  source 1..21: mol_type = other RNA
atggagtttttctgctattta

SEQ ID NO: 904 - RNA, 21 nt, synthetic construct
  source 1..21: mol_type = other RNA
tcagtttctcattagtttgta

SEQ ID NO: 905 - RNA, 21 nt, synthetic construct
  source 1..21: mol_type = other RNA
ctgcatatataagaacgaaaa

SEQ ID NO: 906 - RNA, 21 nt, synthetic construct
  source 1..21: mol_type = other RNA
tgagccaaaatattaaattca

SEQ ID NO: 907 - RNA, 21 nt, synthetic construct
  source 1..21: mol_type = other RNA
agaatgatatttcctgtttta

SEQ ID NO: 908 - RNA, 21 nt, synthetic construct
  source 1..21: mol_type = other RNA
gtgctctatataaatcttcca

SEQ ID NO: 909 - RNA, 21 nt, synthetic construct
  source 1..21: mol_type = other RNA
tttacagagaagcatcttata

SEQ ID NO: 910 - RNA, 21 nt, synthetic construct
  source 1..21: mol_type = other RNA
gtcttgagttctgcatgacaa

SEQ ID NO: 911 - RNA, 21 nt, synthetic construct
  source 1..21: mol_type = other RNA
cttcaaatctataattttaca

SEQ ID NO: 912 - RNA, 21 nt, synthetic construct
  source 1..21: mol_type = other RNA
gaagcatatagaactctatta

SEQ ID NO: 913 - RNA, 21 nt, synthetic construct
  source 1..21: mol_type = other RNA
gagctgcttctaaataacaaa

SEQ ID NO: 914 - RNA, 21 nt, synthetic construct
  source 1..21: mol_type = other RNA
tgactgtatttcctgatcata

SEQ ID NO: 915 - RNA, 21 nt, synthetic construct
  source 1..21: mol_type = other RNA
gttctgaaggatatacttcta

SEQ ID NO: 916 - RNA, 21 nt, synthetic construct
  source 1..21: mol_type = other RNA
gtgaagcatgattcaatacta

SEQ ID NO: 917 - RNA, 21 nt, synthetic construct
  source 1..21: mol_type = other RNA
aatgctgcttcacagatttta

SEQ ID NO: 918 - RNA, 21 nt, synthetic construct
  source 1..21: mol_type = other RNA
tgtgggttatgttaatctgaa

SEQ ID NO: 919 - RNA, 21 nt, synthetic construct
  source 1..21: mol_type = other RNA
gagtacagaagaatgctcata

SEQ ID NO: 920 - RNA, 21 nt, synthetic construct
  source 1..21: mol_type = other RNA
ctgtatttcatcctagattta

SEQ ID NO: 921 - RNA, 21 nt, synthetic construct
  source 1..21: mol_type = other RNA
aatctggtaaatgctggaaaa

SEQ ID NO: 922 - RNA, 21 nt, synthetic construct
  source 1..21: mol_type = other RNA
tgctcagattacctgatcgta

SEQ ID NO: 923 - RNA, 21 nt, synthetic construct
  source 1..21: mol_type = other RNA
gacagctatggagtttgcgta

SEQ ID NO: 924 - RNA, 21 nt, synthetic construct
  source 1..21: mol_type = other RNA
tagaacatgctcacttacaaa

SEQ ID NO: 925 - RNA, 21 nt, synthetic construct
  source 1..21: mol_type = other RNA
attatgcttcatttcactata

SEQ ID NO: 926 - RNA, 21 nt, synthetic construct
  source 1..21: mol_type = other RNA
caacagcaagtcataaaagta

SEQ ID NO: 927 - RNA, 21 nt, synthetic construct
  source 1..21: mol_type = other RNA
ttgtctgaaaatgtctttaaa

SEQ ID NO: 928 - RNA, 21 nt, synthetic construct
  source 1..21: mol_type = other RNA
tgttggttcaaaggacaatta

SEQ ID NO: 929 - RNA, 21 nt, synthetic construct
  source 1..21: mol_type = other RNA
tctaaactttaatatatcgaa

SEQ ID NO: 930 - RNA, 21 nt, synthetic construct
  source 1..21: mol_type = other RNA
aagtgaaacatgactgtcgta

SEQ ID NO: 931 - RNA, 21 nt, synthetic construct
  source 1..21: mol_type = other RNA
atcgtccatacagttttcata

SEQ ID NO: 932 - RNA, 21 nt, synthetic construct
  source 1..21: mol_type = other RNA
cttcaggaaatagtaggaaaa

SEQ ID NO: 933 - RNA, 21 nt, synthetic construct
  source 1..21: mol_type = other RNA
caccctttctgtaaggactga

SEQ ID NO: 934 - RNA, 21 nt, synthetic construct
  source 1..21: mol_type = other RNA
aaagagatacctgacatccta

SEQ ID NO: 935 - RNA, 21 nt, synthetic construct
  source 1..21: mol_type = other RNA
atgagcattaatgttttctga

SEQ ID NO: 936 - RNA, 21 nt, synthetic construct
  source 1..21: mol_type = other RNA
tgacattttttctcatagaaa

SEQ ID NO: 937 - RNA, 21 nt, synthetic construct
  source 1..21: mol_type = other RNA
cagagattaaatgactactaa

SEQ ID NO: 938 - RNA, 21 nt, synthetic construct
  source 1..21: mol_type = other RNA
gctgtcaaatgttatattgta

SEQ ID NO: 939 - RNA, 21 nt, synthetic construct
  source 1..21: mol_type = other RNA
aatataatactacagcaaaaa

SEQ ID NO: 940 - RNA, 21 nt, synthetic construct
  source 1..21: mol_type = other RNA
ggtgtctaaatataatttcaa

SEQ ID NO: 941 - RNA, 21 nt, synthetic construct
  source 1..21: mol_type = other RNA
ctctttatacaaaatgagaga

SEQ ID NO: 942 - RNA, 21 nt, synthetic construct
  source 1..21: mol_type = other RNA
gcagtaccaaatgaataaaaa

SEQ ID NO: 943 - RNA, 21 nt, synthetic construct
  source 1..21: mol_type = other RNA
ttgttggtacacaaggtaaaa

SEQ ID NO: 944 - RNA, 21 nt, synthetic construct
  source 1..21: mol_type = other RNA
ctcttatttaacttaaccgta

SEQ ID NO: 945 - RNA, 21 nt, synthetic construct
  source 1..21: mol_type = other RNA
tgcttgatgatacaatgaata

SEQ ID NO: 946 - RNA, 21 nt, synthetic construct
  source 1..21: mol_type = other RNA
aactgggaaagacaatttgaa

SEQ ID NO: 947 - RNA, 21 nt, synthetic construct
  source 1..21: mol_type = other RNA
ctccttatatgactatttgaa

SEQ ID NO: 948 - RNA, 21 nt, synthetic construct
  source 1..21: mol_type = other RNA
agtcatgctaaccaatggaaa

SEQ ID NO: 949 - RNA, 21 nt, synthetic construct
  source 1..21: mol_type = other RNA
cctgaagtcacacagctaata

SEQ ID NO: 950 - RNA, 21 nt, synthetic construct
  source 1..21: mol_type = other RNA
ttgctgctgacaacaaagata

SEQ ID NO: 951 - RNA, 21 nt, synthetic construct
  source 1..21: mol_type = other RNA
tactgactttgcctgtaaaga

SEQ ID NO: 952 - RNA, 21 nt, synthetic construct
  source 1..21: mol_type = other RNA
aatccctattttaaaattcca

SEQ ID NO: 953 - RNA, 21 nt, synthetic construct
  source 1..21: mol_type = other RNA
gtgccttaggagattacccta

SEQ ID NO: 954 - RNA, 21 nt, synthetic construct
  source 1..21: mol_type = other RNA
gacaatctaaatatatcatca

SEQ ID NO: 955 - RNA, 21 nt, synthetic construct
  source 1..21: mol_type = other RNA
tgtgataatgaacaccgtaaa

SEQ ID NO: 956 - RNA, 21 nt, synthetic construct
  source 1..21: mol_type = other RNA
tcaccgttgtaaagactttta

SEQ ID NO: 957 - RNA, 21 nt, synthetic construct
  source 1..21: mol_type = other RNA
ttagagaagcttcctgacata

SEQ ID NO: 958 - RNA, 21 nt, synthetic construct
  source 1..21: mol_type = other RNA
aacagtaaagaaatgctacta

SEQ ID NO: 959 - RNA, 21 nt, synthetic construct
  source 1..21: mol_type = other RNA
tatgttctgacttgagagtta

SEQ ID NO: 960 - RNA, 21 nt, synthetic construct
  source 1..21: mol_type = other RNA
ttagagcatgctatctttaga

SEQ ID NO: 961 - RNA, 21 nt, synthetic construct
  source 1..21: mol_type = other RNA
tagtctttgattgaaataaga

SEQ ID NO: 962 - RNA, 21 nt, synthetic construct
  source 1..21: mol_type = other RNA
ttggtaaacgagatttaacaa

SEQ ID NO: 963 - RNA, 21 nt, synthetic construct
  source 1..21: mol_type = other RNA
gtctgaaaattgctttcatta

SEQ ID NO: 964 - RNA, 21 nt, synthetic construct
  source 1..21: mol_type = other RNA
atgaacttgttgccttgtaaa

SEQ ID NO: 965 - RNA, 21 nt, synthetic construct
  source 1..21: mol_type = other RNA
gggcaataaactgtatcaaaa

SEQ ID NO: 966 - RNA, 21 nt, synthetic construct
  source 1..21: mol_type = other RNA
acatgttagcatataatgtaa

SEQ ID NO: 967 - RNA, 21 nt, synthetic construct
  source 1..21: mol_type = other RNA
tgtgagagtatagaatttcta

SEQ ID NO: 968 - RNA, 21 nt, synthetic construct
  source 1..21: mol_type = other RNA
atccttcatttggcactataa

SEQ ID NO: 969 - RNA, 21 nt, synthetic construct
  source 1..21: mol_type = other RNA
acatttagaaagtagctttaa

SEQ ID NO: 970 - RNA, 21 nt, synthetic construct
  source 1..21: mol_type = other RNA
aactgttctataaagcaaaga

SEQ ID NO: 971 - RNA, 21 nt, synthetic construct
  source 1..21: mol_type = other RNA
cctccagagatgaaagatcta

SEQ ID NO: 972 - RNA, 21 nt, synthetic construct
  source 1..21: mol_type = other RNA
ttgtttaactatgactcctaa

SEQ ID NO: 973 - RNA, 21 nt, synthetic construct
  source 1..21: mol_type = other RNA
ctgtttgacaatgctttgtta

SEQ ID NO: 974 - RNA, 21 nt, synthetic construct
  source 1..21: mol_type = other RNA
tgtcctaaaagaaatttttca

SEQ ID NO: 975 - RNA, 21 nt, synthetic construct
  source 1..21: mol_type = other RNA
acagattgaacaaagaactta

SEQ ID NO: 976 - RNA, 21 nt, synthetic construct
  source 1..21: mol_type = other RNA
gtttaacctgtccaaacttca

SEQ ID NO: 977 - RNA, 21 nt, synthetic construct
  source 1..21: mol_type = other RNA
caaaatgtttaactttaccaa

SEQ ID NO: 978 - RNA, 21 nt, synthetic construct
  source 1..21: mol_type = other RNA
tcccattgtgtaatatttata

SEQ ID NO: 979 - RNA, 21 nt, synthetic construct
  source 1..21: mol_type = other RNA
gttgggtaaatatgcttatta

SEQ ID NO: 980 - RNA, 21 nt, synthetic construct
  source 1..21: mol_type = other RNA
cagggttgtctttgagtctga

SEQ ID NO: 981 - RNA, 21 nt, synthetic construct
  source 1..21: mol_type = other RNA
gctaaaatccaactgcaatta

SEQ ID NO: 982 - RNA, 21 nt, synthetic construct
  source 1..21: mol_type = other RNA
caggactgaagtgtgtatgta

SEQ ID NO: 983 - RNA, 21 nt, synthetic construct
  source 1..21: mol_type = other RNA
gagtaccaattgccttattaa

SEQ ID NO: 984 - RNA, 21 nt, synthetic construct
  source 1..21: mol_type = other RNA
aagtgcctatgtgaagtgata

SEQ ID NO: 985 - RNA, 21 nt, synthetic construct
  source 1..21: mol_type = other RNA
taacaataatagaactgccaa

SEQ ID NO: 986 - RNA, 21 nt, synthetic construct
  source 1..21: mol_type = other RNA
gctgttccataccattgctta

SEQ ID NO: 987 - RNA, 21 nt, synthetic construct
  source 1..21: mol_type = other RNA
tagactggagaagattattca

SEQ ID NO: 988 - RNA, 21 nt, synthetic construct
  source 1..21: mol_type = other RNA
ttccaacagcatcaccaaata

SEQ ID NO: 989 - RNA, 21 nt, synthetic construct
  source 1..21: mol_type = other RNA
taattggtacagattctgtta

SEQ ID NO: 990 - RNA, 21 nt, synthetic construct
  source 1..21: mol_type = other RNA
gagaaacattatttgttgtca

SEQ ID NO: 991 - RNA, 21 nt, synthetic construct
  source 1..21: mol_type = other RNA
cgctctcaattgctagtggta

SEQ ID NO: 992 - RNA, 21 nt, synthetic construct
  source 1..21: mol_type = other RNA
cggtatcagaaacagcaaata

SEQ ID NO: 993 - RNA, 21 nt, synthetic construct
  source 1..21: mol_type = other RNA
cccagacataattttatatta

SEQ ID NO: 994 - RNA, 21 nt, synthetic construct
  source 1..21: mol_type = other RNA
tagtacattttgaggtattta

SEQ ID NO: 995 - RNA, 21 nt, synthetic construct
  source 1..21: mol_type = other RNA
aaatgctattgataacagtaa

SEQ ID NO: 996 - RNA, 21 nt, synthetic construct
  source 1..21: mol_type = other RNA
tagctgaatttgggactatga

SEQ ID NO: 997 - RNA, 21 nt, synthetic construct
  source 1..21: mol_type = other RNA
attgtggttttcaaagatata

SEQ ID NO: 998 - RNA, 21 nt, synthetic construct
  source 1..21: mol_type = other RNA
cctggttgcagtatctgaaaa

SEQ ID NO: 999 - RNA, 21 nt, synthetic construct
  source 1..21: mol_type = other RNA
tagaatggttgttgagctaaa

SEQ ID NO: 1000 - RNA, 21 nt, synthetic construct
  source 1..21: mol_type = other RNA
ctggccatcattattactgta

SEQ ID NO: 1001 - RNA, 21 nt, synthetic construct
  source 1..21: mol_type = other RNA
ttgacagataaaatacgaaga

SEQ ID NO: 1002 - RNA, 21 nt, synthetic construct
  source 1..21: mol_type = other RNA
tcacaaacacatcattacaaa

SEQ ID NO: 1003 - RNA, 21 nt, synthetic construct
  source 1..21: mol_type = other RNA
ccatgattgtatgaaaataga

SEQ ID NO: 1004 - RNA, 21 nt, synthetic construct
  source 1..21: mol_type = other RNA
cacagagtaatgaatatttaa

SEQ ID NO: 1005 - RNA, 21 nt, synthetic construct
  source 1..21: mol_type = other RNA
agctgcttagtggaagatgta

SEQ ID NO: 1006 - RNA, 21 nt, synthetic construct
  source 1..21: mol_type = other RNA
tagctctgtgtgctgatacca

SEQ ID NO: 1007 - RNA, 21 nt, synthetic construct
  source 1..21: mol_type = other RNA
cattcgagagaatatgagcta

SEQ ID NO: 1008 - RNA, 21 nt, synthetic construct
  source 1..21: mol_type = other RNA
atgcattttctgaaaatgtaa

SEQ ID NO: 1009 - RNA, 21 nt, synthetic construct
  source 1..21: mol_type = other RNA
gtttcgaccaagtatcccaaa

SEQ ID NO: 1010 - RNA, 21 nt, synthetic construct
  source 1..21: mol_type = other RNA
tcttgcttgccacaatatcga

SEQ ID NO: 1011 - RNA, 21 nt, synthetic construct
  source 1..21: mol_type = other RNA
gggtacaagagggaatacaaa

SEQ ID NO: 1012 - RNA, 21 nt, synthetic construct
  source 1..21: mol_type = other RNA
ggtgatcaaatcctgtgtcta

SEQ ID NO: 1013 - RNA, 21 nt, synthetic construct
  source 1..21: mol_type = other RNA
cagtgggtttctaggatagga

SEQ ID NO: 1014 - RNA, 21 nt, synthetic construct
  source 1..21: mol_type = other RNA
aactaagtatttttaaggaca

SEQ ID NO: 1015 - RNA, 21 nt, synthetic construct
  source 1..21: mol_type = other RNA
cataatgtgattgttaaatta

SEQ ID NO: 1016 - RNA, 21 nt, synthetic construct
  source 1..21: mol_type = other RNA
gagaagaattaagaaaactca

SEQ ID NO: 1017 - RNA, 21 nt, synthetic construct
  source 1..21: mol_type = other RNA
gaagagaaattgattgtttaa

SEQ ID NO: 1018 - RNA, 21 nt, synthetic construct
  source 1..21: mol_type = other RNA
agtgtgaaacttgtgccataa

SEQ ID NO: 1019 - RNA, 21 nt, synthetic construct
  source 1..21: mol_type = other RNA
ctgagacactgagaaatgtca

SEQ ID NO: 1020 - RNA, 21 nt, synthetic construct
  source 1..21: mol_type = other RNA
tggcttatatgtgtttaaaga

SEQ ID NO: 1021 - RNA, 21 nt, synthetic construct
  source 1..21: mol_type = other RNA
tgcattttgacattgcaaaaa

SEQ ID NO: 1022 - RNA, 21 nt, synthetic construct
  source 1..21: mol_type = other RNA
ttaggttagaagttccagaaa

SEQ ID NO: 1023 - RNA, 21 nt, synthetic construct
  source 1..21: mol_type = other RNA
tgcgacatgaaaacatcctta

SEQ ID NO: 1024 - RNA, 21 nt, synthetic construct
  source 1..21: mol_type = other RNA
gagaggattttttaccatcta

SEQ ID NO: 1025 - RNA, 21 nt, synthetic construct
  source 1..21: mol_type = other RNA
gaaggtgaagagaatttcaaa

SEQ ID NO: 1026 - RNA, 21 nt, synthetic construct
  source 1..21: mol_type = other RNA
tggtatctgaatatcatgaaa

SEQ ID NO: 1027 - RNA, 21 nt, synthetic construct
  source 1..21: mol_type = other RNA
tgttggtttaatttttcaaca

SEQ ID NO: 1028 - RNA, 21 nt, synthetic construct
  source 1..21: mol_type = other RNA
tagttgtaatttaaatgtgga

SEQ ID NO: 1029 - RNA, 21 nt, synthetic construct
  source 1..21: mol_type = other RNA
gtgaatgtttttgccatttta

SEQ ID NO: 1030 - RNA, 21 nt, synthetic construct
  source 1..21: mol_type = other RNA
cagagatgatttttcttttaa

SEQ ID NO: 1031 - RNA, 21 nt, synthetic construct
  source 1..21: mol_type = other RNA
agaaaattagattcagatcta

SEQ ID NO: 1032 - RNA, 21 nt, synthetic construct
  source 1..21: mol_type = other RNA
actggaaaattaagaaagtaa

SEQ ID NO: 1033 - RNA, 21 nt, synthetic construct
  source 1..21: mol_type = other RNA
taaagtgggaaagataataaa

SEQ ID NO: 1034 - RNA, 21 nt, synthetic construct
  source 1..21: mol_type = other RNA
ctaggctaagaaagagttgta

SEQ ID NO: 1035 - RNA, 21 nt, synthetic construct
  source 1..21: mol_type = other RNA
gctgataaaattaatggataa

SEQ ID NO: 1036 - RNA, 21 nt, synthetic construct
  source 1..21: mol_type = other RNA
cctgtatttctttagttgtca

SEQ ID NO: 1037 - RNA, 21 nt, synthetic construct
  source 1..21: mol_type = other RNA
tttgttttgcttttgacaaaa

SEQ ID NO: 1038 - RNA, 21 nt, synthetic construct
  source 1..21: mol_type = other RNA
tggctgtgaaaatattctcca

SEQ ID NO: 1039 - RNA, 21 nt, synthetic construct
  source 1..21: mol_type = other RNA
actattttaggcatagcacta

SEQ ID NO: 1040 - RNA, 21 nt, synthetic construct
  source 1..21: mol_type = other RNA
tttcagtactgtataaagtga

SEQ ID NO: 1041 - RNA, 21 nt, synthetic construct
  source 1..21: mol_type = other RNA
gtgatgcaatctatgtttcca

SEQ ID NO: 1042 - RNA, 21 nt, synthetic construct
  source 1..21: mol_type = other RNA
tgtttggcagatctcatcaaa

SEQ ID NO: 1043 - RNA, 21 nt, synthetic construct
  source 1..21: mol_type = other RNA
aaggttgtttgtgaccagaaa

SEQ ID NO: 1044 - RNA, 21 nt, synthetic construct
  source 1..21: mol_type = other RNA
ggaaggaaatattttgagaaa

SEQ ID NO: 1045 - RNA, 21 nt, synthetic construct
  source 1..21: mol_type = other RNA
ttttggtagcgtgactcttca

SEQ ID NO: 1046 - RNA, 21 nt, synthetic construct
  source 1..21: mol_type = other RNA
tgaacaggaaaagatgtaaaa

SEQ ID NO: 1047 - RNA, 21 nt, synthetic construct
  source 1..21: mol_type = other RNA
gggaaccaagaggtatatgga

SEQ ID NO: 1048 - RNA, 21 nt, synthetic construct
  source 1..21: mol_type = other RNA
tggcactaggtccaaatctta

SEQ ID NO: 1049 - RNA, 21 nt, synthetic construct
  source 1..21: mol_type = other RNA
cacaccttcatatggagatta

SEQ ID NO: 1050 - RNA, 21 nt, synthetic construct
  source 1..21: mol_type = other RNA
ctggtttactgggaaatagca

SEQ ID NO: 1051 - RNA, 21 nt, synthetic construct
  source 1..21: mol_type = other RNA
gcccaaaggaatgtatataaa

SEQ ID NO: 1052 - RNA, 21 nt, synthetic construct
  source 1..21: mol_type = other RNA
ttaactgcaagagtttactga

SEQ ID NO: 1053 - RNA, 21 nt, synthetic construct
  source 1..21: mol_type = other RNA
gaaccactctctgagtgcaaa

SEQ ID NO: 1054 - RNA, 21 nt, synthetic construct
  source 1..21: mol_type = other RNA
ttatcttttcatcctggcata

SEQ ID NO: 1055 - RNA, 21 nt, synthetic construct
  source 1..21: mol_type = other RNA
gtgagtgttggtatgccaaca

SEQ ID NO: 1056 - RNA, 21 nt, synthetic construct
  source 1..21: mol_type = other RNA
agaatgtatttggctaaataa

SEQ ID NO: 1057 - RNA, 21 nt, synthetic construct
  source 1..21: mol_type = other RNA
gaacccttttattaagaggaa

SEQ ID NO: 1058 - RNA, 21 nt, synthetic construct
  source 1..21: mol_type = other RNA
ctcctgtccatagctgcgata

SEQ ID NO: 1059 - RNA, 21 nt, synthetic construct
  source 1..21: mol_type = other RNA
actgagttgaaataaggaaga

SEQ ID NO: 1060 - RNA, 21 nt, synthetic construct
  source 1..21: mol_type = other RNA
ctgccaaacagaaggagcata

SEQ ID NO: 1061 - RNA, 21 nt, synthetic construct
  source 1..21: mol_type = other RNA
ggcaaagttgtgaagcactca

SEQ ID NO: 1062 - RNA, 21 nt, synthetic construct
  source 1..21: mol_type = other RNA
ataggatgatgaagtttagaa

SEQ ID NO: 1063 - RNA, 21 nt, synthetic construct
  source 1..21: mol_type = other RNA
attcgtatcttaaaatggcaa

SEQ ID NO: 1064 - RNA, 21 nt, synthetic construct
  source 1..21: mol_type = other RNA
cacagcttgggtaatagcgta

SEQ ID NO: 1065 - RNA, 21 nt, synthetic construct
  source 1..21: mol_type = other RNA
tttgcaacaacataacactga

SEQ ID NO: 1066 - RNA, 21 nt, synthetic construct
  source 1..21: mol_type = other RNA
tgccaccatgtgacttattga

SEQ ID NO: 1067 - RNA, 21 nt, synthetic construct
  source 1..21: mol_type = other RNA
tcgatagaggaaatgagaaaa

SEQ ID NO: 1068 - RNA, 21 nt, synthetic construct
  source 1..21: mol_type = other RNA
tttttaagttagcaggactta

SEQ ID NO: 1069 - RNA, 21 nt, synthetic construct
  source 1..21: mol_type = other RNA
tgtaaataattatctgcctaa

SEQ ID NO: 1070 - RNA, 21 nt, synthetic construct
  source 1..21: mol_type = other RNA
tggttgtacgtgcctcaaata

SEQ ID NO: 1071 - RNA, 23 nt, synthetic construct
  source 1..23: mol_type = other RNA
taggaatggagtttgaaaaaaga

SEQ ID NO: 1072 - RNA, 23 nt, synthetic construct
  source 1..23: mol_type = other RNA
tatctgaagacagatgaaagtta

SEQ ID NO: 1073 - RNA, 23 nt, synthetic construct
  source 1..23: mol_type = other RNA
tttactggagaagttatgaggtg

SEQ ID NO: 1074 - RNA, 23 nt, synthetic construct
  source 1..23: mol_type = other RNA
ttaatgttgaaagatagtgaggg

SEQ ID NO: 1075 - RNA, 23 nt, synthetic construct
  source 1..23: mol_type = other RNA
ttggatgagagcattaacgagta

SEQ ID NO: 1076 - RNA, 23 nt, synthetic construct
  source 1..23: mol_type = other RNA
tagtagtggattatgaagaacag

SEQ ID NO: 1077 - RNA, 23 nt, synthetic construct
  source 1..23: mol_type = other RNA
tagagattggatgaagtcaactc

SEQ ID NO: 1078 - RNA, 23 nt, synthetic construct
  source 1..23: mol_type = other RNA
tttaagaagttcattgtgtagaa

SEQ ID NO: 1079 - RNA, 23 nt, synthetic construct
  source 1..23: mol_type = other RNA
taattaagaattctagatgtgac

SEQ ID NO: 1080 - RNA, 23 nt, synthetic construct
  source 1..23: mol_type = other RNA
taagaaagctatgagagatttct

SEQ ID NO: 1081 - RNA, 23 nt, synthetic construct
  source 1..23: mol_type = other RNA
tagtaattctacaatagtaggtg

SEQ ID NO: 1082 - RNA, 23 nt, synthetic construct
  source 1..23: mol_type = other RNA
tttaatgcactaaaagaagatga

SEQ ID NO: 1083 - RNA, 23 nt, synthetic construct
  source 1..23: mol_type = other RNA
tgaatcagaagagtacatgagct

SEQ ID NO: 1084 - RNA, 23 nt, synthetic construct
  source 1..23: mol_type = other RNA
tttccaaggtacaaagagaaaga

SEQ ID NO: 1085 - RNA, 23 nt, synthetic construct
  source 1..23: mol_type = other RNA
tttctgaagatgtataagccaga

SEQ ID NO: 1086 - RNA, 23 nt, synthetic construct
  source 1..23: mol_type = other RNA
tataggagtagttttgttttgtt

SEQ ID NO: 1087 - RNA, 23 nt, synthetic construct
  source 1..23: mol_type = other RNA
tttcataagagttctgctagtaa

SEQ ID NO: 1088 - RNA, 23 nt, synthetic construct
  source 1..23: mol_type = other RNA
tggaattatagagtgacttggga

SEQ ID NO: 1089 - RNA, 23 nt, synthetic construct
  source 1..23: mol_type = other RNA
tataatgacaagaaaaatggaga

SEQ ID NO: 1090 - RNA, 23 nt, synthetic construct
  source 1..23: mol_type = other RNA
taaagatgagttgaggtgttgct

SEQ ID NO: 1091 - RNA, 23 nt, synthetic construct
  source 1..23: mol_type = other RNA
ttaaatcagatctttcagagttt

SEQ ID NO: 1092 - RNA, 23 nt, synthetic construct
  source 1..23: mol_type = other RNA
ttcattgcggaaaagaactagaa

SEQ ID NO: 1093 - RNA, 23 nt, synthetic construct
  source 1..23: mol_type = other RNA
tggatttcttcagagtgaaagtt

SEQ ID NO: 1094 - RNA, 23 nt, synthetic construct
  source 1..23: mol_type = other RNA
tagaaagagagaaaagttagata

SEQ ID NO: 1095 - RNA, 23 nt, synthetic construct
  source 1..23: mol_type = other RNA
ttctttgacacaaagttgagata

SEQ ID NO: 1096 - RNA, 23 nt, synthetic construct
  source 1..23: mol_type = other RNA
ttaaaggaatgattattgaagac

SEQ ID NO: 1097 - RNA, 23 nt, synthetic construct
  source 1..23: mol_type = other RNA
tcttaatacgaagagcagttagg

SEQ ID NO: 1098 - RNA, 23 nt, synthetic construct
  source 1..23: mol_type = other RNA
tgttggaactatgacagaagact

SEQ ID NO: 1099 - RNA, 23 nt, synthetic construct
  source 1..23: mol_type = other RNA
taacagatatggttctgagattt

SEQ ID NO: 1100 - RNA, 23 nt, synthetic construct
  source 1..23: mol_type = other RNA
tgtaaaatgaagatagattcagt

SEQ ID NO: 1101 - RNA, 23 nt, synthetic construct
  source 1..23: mol_type = other RNA
taaaggaacaagtttagtggttc

SEQ ID NO: 1102 - RNA, 23 nt, synthetic construct
  source 1..23: mol_type = other RNA
ttgtaaggagtaaagaacactga

SEQ ID NO: 1103 - RNA, 23 nt, synthetic construct
  source 1..23: mol_type = other RNA
ttaatcctgttaagagtaaagga

SEQ ID NO: 1104 - RNA, 23 nt, synthetic construct
  source 1..23: mol_type = other RNA
tgtaatatgttcttaggtataag

SEQ ID NO: 1105 - RNA, 23 nt, synthetic construct
  source 1..23: mol_type = other RNA
tttggatcatctcagtagaagaa

SEQ ID NO: 1106 - RNA, 23 nt, synthetic construct
  source 1..23: mol_type = other RNA
ttactctatgagaaaatacagaa

SEQ ID NO: 1107 - RNA, 23 nt, synthetic construct
  source 1..23: mol_type = other RNA
ttacaactgaaagagaaaagtat

SEQ ID NO: 1108 - RNA, 23 nt, synthetic construct
  source 1..23: mol_type = other RNA
tttcacagactagaaattaatga

SEQ ID NO: 1109 - RNA, 23 nt, synthetic construct
  source 1..23: mol_type = other RNA
tgtgaaacctcttatacagagaa

SEQ ID NO: 1110 - RNA, 23 nt, synthetic construct
  source 1..23: mol_type = other RNA
tgtattagtactttgaaagtcaa

SEQ ID NO: 1111 - RNA, 23 nt, synthetic construct
  source 1..23: mol_type = other RNA
taaactttgtataatggcaaaca

SEQ ID NO: 1112 - RNA, 23 nt, synthetic construct
  source 1..23: mol_type = other RNA
tgaggtatgtcgatagtgttcag

SEQ ID NO: 1113 - RNA, 23 nt, synthetic construct
  source 1..23: mol_type = other RNA
ttattagtaaatgtcattctacg

SEQ ID NO: 1114 - RNA, 23 nt, synthetic construct
  source 1..23: mol_type = other RNA
ttaaacatttctaagtagcttgt

SEQ ID NO: 1115 - RNA, 23 nt, synthetic construct
  source 1..23: mol_type = other RNA
taatctctgagagtactaaggga

SEQ ID NO: 1116 - RNA, 23 nt, synthetic construct
  source 1..23: mol_type = other RNA
tattacgttagtgtgcattcaag

SEQ ID NO: 1117 - RNA, 23 nt, synthetic construct
  source 1..23: mol_type = other RNA
ttaattatcatcattaggctttg

SEQ ID NO: 1118 - RNA, 23 nt, synthetic construct
  source 1..23: mol_type = other RNA
ttatgggatagtaaaaagtttcc

SEQ ID NO: 1119 - RNA, 23 nt, synthetic construct
  source 1..23: mol_type = other RNA
ttacttaagagtatcagctagct

SEQ ID NO: 1120 - RNA, 23 nt, synthetic construct
  source 1..23: mol_type = other RNA
ttagagttatcttttcatgctgc

SEQ ID NO: 1121 - RNA, 23 nt, synthetic construct
  source 1..23: mol_type = other RNA
tactaatagcataatggcttagt

SEQ ID NO: 1122 - RNA, 23 nt, synthetic construct
  source 1..23: mol_type = other RNA
ttatgttagctaaaagctagaat

SEQ ID NO: 1123 - RNA, 23 nt, synthetic construct
  source 1..23: mol_type = other RNA
ttgaagtttgaagaatcacacaa

SEQ ID NO: 1124 - RNA, 23 nt, synthetic construct
  source 1..23: mol_type = other RNA
taaaactgttaggtctggagaga

SEQ ID NO: 1125 - RNA, 23 nt, synthetic construct
  source 1..23: mol_type = other RNA
tcaaggctagatgaaaaaaagaa

SEQ ID NO: 1126 - RNA, 23 nt, synthetic construct
  source 1..23: mol_type = other RNA
tagatgtcaagaattattttgac

SEQ ID NO: 1127 - RNA, 23 nt, synthetic construct
  source 1..23: mol_type = other RNA
tttattttcagaaagtgatgctg

SEQ ID NO: 1128 - RNA, 23 nt, synthetic construct
  source 1..23: mol_type = other RNA
tatagtatgtttcacaaaagatg

SEQ ID NO: 1129 - RNA, 23 nt, synthetic construct
  source 1..23: mol_type = other RNA
tttagcctatggaagaaatagaa

SEQ ID NO: 1130 - RNA, 23 nt, synthetic construct
  source 1..23: mol_type = other RNA
tttgttaacacttcattgaagag

SEQ ID NO: 1131 - RNA, 23 nt, synthetic construct
  source 1..23: mol_type = other RNA
tgaaagtagaatgaaggcaaaac

SEQ ID NO: 1132 - RNA, 23 nt, synthetic construct
  source 1..23: mol_type = other RNA
ttttaggacatttaaaaacctga

SEQ ID NO: 1133 - RNA, 23 nt, synthetic construct
  source 1..23: mol_type = other RNA
ttgaaggactcaaagatattcac

SEQ ID NO: 1134 - RNA, 23 nt, synthetic construct
  source 1..23: mol_type = other RNA
tattaatctttggaagtgttcag

SEQ ID NO: 1135 - RNA, 23 nt, synthetic construct
  source 1..23: mol_type = other RNA
tatttgttagacaaaatttaggc

SEQ ID NO: 1136 - RNA, 23 nt, synthetic construct
  source 1..23: mol_type = other RNA
tagcaattttaagttgtttactc

SEQ ID NO: 1137 - RNA, 23 nt, synthetic construct
  source 1..23: mol_type = other RNA
tctgagtgagtaaattattttag

SEQ ID NO: 1138 - RNA, 23 nt, synthetic construct
  source 1..23: mol_type = other RNA
tagaccaacagaatagatgtcag

SEQ ID NO: 1139 - RNA, 23 nt, synthetic construct
  source 1..23: mol_type = other RNA
taatataagactactcagttagg

SEQ ID NO: 1140 - RNA, 23 nt, synthetic construct
  source 1..23: mol_type = other RNA
tttagaaggctaaattccagacg

SEQ ID NO: 1141 - RNA, 23 nt, synthetic construct
  source 1..23: mol_type = other RNA
tttcaagagttcaaggcatgttt

SEQ ID NO: 1142 - RNA, 23 nt, synthetic construct
  source 1..23: mol_type = other RNA
taagtgcaagaagtgcttgattt

SEQ ID NO: 1143 - RNA, 23 nt, synthetic construct
  source 1..23: mol_type = other RNA
tgtataaagatgaaaagcaagtg

SEQ ID NO: 1144 - RNA, 23 nt, synthetic construct
  source 1..23: mol_type = other RNA
tgatattacatagggagaaaagc

SEQ ID NO: 1145 - RNA, 23 nt, synthetic construct
  source 1..23: mol_type = other RNA
ttttagacatagaagaaagcata

SEQ ID NO: 1146 - RNA, 23 nt, synthetic construct
  source 1..23: mol_type = other RNA
tagacgatttgctaagcaggttc

SEQ ID NO: 1147 - RNA, 23 nt, synthetic construct
  source 1..23: mol_type = other RNA
tgtgaaagggtagaggaatatct

SEQ ID NO: 1148 - RNA, 23 nt, synthetic construct
  source 1..23: mol_type = other RNA
taaacccaaagaaaagtgggatt

SEQ ID NO: 1149 - RNA, 23 nt, synthetic construct
  source 1..23: mol_type = other RNA
ttaagtatatacaagaagcctgc

SEQ ID NO: 1150 - RNA, 23 nt, synthetic construct
  source 1..23: mol_type = other RNA
tctgaaacacagatcaagtttga

SEQ ID NO: 1151 - RNA, 23 nt, synthetic construct
  source 1..23: mol_type = other RNA
tgaatttagcattaaagcaaaag

SEQ ID NO: 1152 - RNA, 23 nt, synthetic construct
  source 1..23: mol_type = other RNA
tatacaaataacagctagtcttt

SEQ ID NO: 1153 - RNA, 23 nt, synthetic construct
  source 1..23: mol_type = other RNA
ttattcaagggaaagtaggaagc

SEQ ID NO: 1154 - RNA, 23 nt, synthetic construct
  source 1..23: mol_type = other RNA
tgacttgagcattcagttctgga

SEQ ID NO: 1155 - RNA, 23 nt, synthetic construct
  source 1..23: mol_type = other RNA
tatgagaaattagtaacaagaac

SEQ ID NO: 1156 - RNA, 23 nt, synthetic construct
  source 1..23: mol_type = other RNA
tgtataaaggctatcactgagtt

SEQ ID NO: 1157 - RNA, 23 nt, synthetic construct
  source 1..23: mol_type = other RNA
tgatgttttaggagcataaaaga

SEQ ID NO: 1158 - RNA, 23 nt, synthetic construct
  source 1..23: mol_type = other RNA
ttgaacataacctaaggagaatt

SEQ ID NO: 1159 - RNA, 23 nt, synthetic construct
  source 1..23: mol_type = other RNA
ttttatgtctcgatgagcaatag

SEQ ID NO: 1160 - RNA, 23 nt, synthetic construct
  source 1..23: mol_type = other RNA
ttaagtgtgtatgtacaaaggaa

SEQ ID NO: 1161 - RNA, 23 nt, synthetic construct
  source 1..23: mol_type = other RNA
tttcatgtgctcttggttcaagt

SEQ ID NO: 1162 - RNA, 23 nt, synthetic construct
  source 1..23: mol_type = other RNA
tttagactttaaaatccctgagg

SEQ ID NO: 1163 - RNA, 23 nt, synthetic construct
  source 1..23: mol_type = other RNA
ttatcactttataagcaagtacc

SEQ ID NO: 1164 - RNA, 23 nt, synthetic construct
  source 1..23: mol_type = other RNA
tcaaggtaggtttagatgcatgc

SEQ ID NO: 1165 - RNA, 23 nt, synthetic construct
  source 1..23: mol_type = other RNA
ttcataatagtgttttcccaagt

SEQ ID NO: 1166 - RNA, 23 nt, synthetic construct
  source 1..23: mol_type = other RNA
tttcatttctctttggagtttga

SEQ ID NO: 1167 - RNA, 23 nt, synthetic construct
  source 1..23: mol_type = other RNA
tatgttttgaaaaatgcccatat

SEQ ID NO: 1168 - RNA, 23 nt, synthetic construct
  source 1..23: mol_type = other RNA
tttgagtccaagttccattatct

SEQ ID NO: 1169 - RNA, 23 nt, synthetic construct
  source 1..23: mol_type = other RNA
tttggtttcgtcatctacacaaa

SEQ ID NO: 1170 - RNA, 23 nt, synthetic construct
  source 1..23: mol_type = other RNA
tgtcttatctttgaggtagaaca

SEQ ID NO: 1171 - RNA, 23 nt, synthetic construct
  source 1..23: mol_type = other RNA
taataactcaatatgccttctaa

SEQ ID NO: 1172 - RNA, 23 nt, synthetic construct
  source 1..23: mol_type = other RNA
taaatagcagaaaaactccatgt

SEQ ID NO: 1173 - RNA, 23 nt, synthetic construct
  source 1..23: mol_type = other RNA
tacaaactaatgagaaactgagg

SEQ ID NO: 1174 - RNA, 23 nt, synthetic construct
  source 1..23: mol_type = other RNA
ttttcgttcttatatatgcagaa

SEQ ID NO: 1175 - RNA, 23 nt, synthetic construct
  source 1..23: mol_type = other RNA
tgaatttaatattttggctcaga

SEQ ID NO: 1176 - RNA, 23 nt, synthetic construct
  source 1..23: mol_type = other RNA
taaaacaggaaatatcattcttg

SEQ ID NO: 1177 - RNA, 23 nt, synthetic construct
  source 1..23: mol_type = other RNA
tggaagatttatatagagcacaa

SEQ ID NO: 1178 - RNA, 23 nt, synthetic construct
  source 1..23: mol_type = other RNA
tataagatgcttctctgtaaaat

SEQ ID NO: 1179 - RNA, 23 nt, synthetic construct
  source 1..23: mol_type = other RNA
ttgtcatgcagaactcaagacat

SEQ ID NO: 1180 - RNA, 23 nt, synthetic construct
  source 1..23: mol_type = other RNA
tgtaaaattatagatttgaaggg

SEQ ID NO: 1181 - RNA, 23 nt, synthetic construct
  source 1..23: mol_type = other RNA
taatagagttctatatgcttcac

SEQ ID NO: 1182 - RNA, 23 nt, synthetic construct
  source 1..23: mol_type = other RNA
tttgttatttagaagcagctctc

SEQ ID NO: 1183 - RNA, 23 nt, synthetic construct
  source 1..23: mol_type = other RNA
tatgatcaggaaatacagtcaca

SEQ ID NO: 1184 - RNA, 23 nt, synthetic construct
  source 1..23: mol_type = other RNA
tagaagtatatccttcagaacgc

SEQ ID NO: 1185 - RNA, 23 nt, synthetic construct
  source 1..23: mol_type = other RNA
tagtattgaatcatgcttcacag

SEQ ID NO: 1186 - RNA, 23 nt, synthetic construct
  source 1..23: mol_type = other RNA
taaaatctgtgaagcagcattcg

SEQ ID NO: 1187 - RNA, 23 nt, synthetic construct
  source 1..23: mol_type = other RNA
ttcagattaacataacccacagt

SEQ ID NO: 1188 - RNA, 23 nt, synthetic construct
  source 1..23: mol_type = other RNA
tatgagcattcttctgtactcac

SEQ ID NO: 1189 - RNA, 23 nt, synthetic construct
  source 1..23: mol_type = other RNA
taaatctaggatgaaatacagct

SEQ ID NO: 1190 - RNA, 23 nt, synthetic construct
  source 1..23: mol_type = other RNA
ttttccagcatttaccagattgc

SEQ ID NO: 1191 - RNA, 23 nt, synthetic construct
  source 1..23: mol_type = other RNA
tacgatcaggtaatctgagcaat

SEQ ID NO: 1192 - RNA, 23 nt, synthetic construct
  source 1..23: mol_type = other RNA
tacgcaaactccatagctgtcag

SEQ ID NO: 1193 - RNA, 23 nt, synthetic construct
  source 1..23: mol_type = other RNA
tttgtaagtgagcatgttctata

SEQ ID NO: 1194 - RNA, 23 nt, synthetic construct
  source 1..23: mol_type = other RNA
tatagtgaaatgaagcataatca

SEQ ID NO: 1195 - RNA, 23 nt, synthetic construct
  source 1..23: mol_type = other RNA
tacttttatgacttgctgttggt

SEQ ID NO: 1196 - RNA, 23 nt, synthetic construct
  source 1..23: mol_type = other RNA
tttaaagacattttcagacaatg

SEQ ID NO: 1197 - RNA, 23 nt, synthetic construct
  source 1..23: mol_type = other RNA
taattgtcctttgaaccaacaga

SEQ ID NO: 1198 - RNA, 23 nt, synthetic construct
  source 1..23: mol_type = other RNA
ttcgatatattaaagtttagagc

SEQ ID NO: 1199 - RNA, 23 nt, synthetic construct
  source 1..23: mol_type = other RNA
tacgacagtcatgtttcacttaa

SEQ ID NO: 1200 - RNA, 23 nt, synthetic construct
  source 1..23: mol_type = other RNA
tatgaaaactgtatggacgatat

SEQ ID NO: 1201 - RNA, 23 nt, synthetic construct
  source 1..23: mol_type = other RNA
ttttcctactatttcctgaagca

SEQ ID NO: 1202 - RNA, 23 nt, synthetic construct
  source 1..23: mol_type = other RNA
tcagtccttacagaaagggtggg

SEQ ID NO: 1203 - RNA, 23 nt, synthetic construct
  source 1..23: mol_type = other RNA
taggatgtcaggtatctcttttg

SEQ ID NO: 1204 - RNA, 23 nt, synthetic construct
  source 1..23: mol_type = other RNA
tcagaaaacattaatgctcatta

SEQ ID NO: 1205 - RNA, 23 nt, synthetic construct
  source 1..23: mol_type = other RNA
tttctatgagaaaaaatgtcaac

SEQ ID NO: 1206 - RNA, 23 nt, synthetic construct
  source 1..23: mol_type = other RNA
ttagtagtcatttaatctctgat

SEQ ID NO: 1207 - RNA, 23 nt, synthetic construct
  source 1..23: mol_type = other RNA
tacaatataacatttgacagcat

SEQ ID NO: 1208 - RNA, 23 nt, synthetic construct
  source 1..23: mol_type = other RNA
tttttgctgtagtattatattcc

SEQ ID NO: 1209 - RNA, 23 nt, synthetic construct
  source 1..23: mol_type = other RNA
ttgaaattatatttagacaccct

SEQ ID NO: 1210 - RNA, 23 nt, synthetic construct
  source 1..23: mol_type = other RNA
tctctcattttgtataaagagaa

SEQ ID NO: 1211 - RNA, 23 nt, synthetic construct
  source 1..23: mol_type = other RNA
tttttattcatttggtactgcta

SEQ ID NO: 1212 - RNA, 23 nt, synthetic construct
  source 1..23: mol_type = other RNA
ttttaccttgtgtaccaacaatc

SEQ ID NO: 1213 - RNA, 23 nt, synthetic construct
  source 1..23: mol_type = other RNA
tacggttaagttaaataagagtt

SEQ ID NO: 1214 - RNA, 23 nt, synthetic construct
  source 1..23: mol_type = other RNA
tattcattgtatcatcaagcatt

SEQ ID NO: 1215 - RNA, 23 nt, synthetic construct
  source 1..23: mol_type = other RNA
ttcaaattgtctttcccagttac

SEQ ID NO: 1216 - RNA, 23 nt, synthetic construct
  source 1..23: mol_type = other RNA
ttcaaatagtcatataaggagcc

SEQ ID NO: 1217 - RNA, 23 nt, synthetic construct
  source 1..23: mol_type = other RNA
tttccattggttagcatgactga

SEQ ID NO: 1218 - RNA, 23 nt, synthetic construct
  source 1..23: mol_type = other RNA
tattagctgtgtgacttcaggac

SEQ ID NO: 1219 - RNA, 23 nt, synthetic construct
  source 1..23: mol_type = other RNA
tatctttgttgtcagcagcaatg

SEQ ID NO: 1220 - RNA, 23 nt, synthetic construct
  source 1..23: mol_type = other RNA
tctttacaggcaaagtcagtaat

SEQ ID NO: 1221 - RNA, 23 nt, synthetic construct
  source 1..23: mol_type = other RNA
tggaattttaaaatagggattgt

SEQ ID NO: 1222 - RNA, 23 nt, synthetic construct
  source 1..23: mol_type = other RNA
tagggtaatctcctaaggcactc

SEQ ID NO: 1223 - RNA, 23 nt, synthetic construct
  source 1..23: mol_type = other RNA
tgatgatatatttagattgtctg

SEQ ID NO: 1224 - RNA, 23 nt, synthetic construct
  source 1..23: mol_type = other RNA
tttacggtgttcattatcacaag

SEQ ID NO: 1225 - RNA, 23 nt, synthetic construct
  source 1..23: mol_type = other RNA
taaaagtctttacaacggtgatt

SEQ ID NO: 1226 - RNA, 23 nt, synthetic construct
  source 1..23: mol_type = other RNA
tatgtcaggaagcttctctaatc

SEQ ID NO: 1227 - RNA, 23 nt, synthetic construct
  source 1..23: mol_type = other RNA
tagtagcatttctttactgttat

SEQ ID NO: 1228 - RNA, 23 nt, synthetic construct
  source 1..23: mol_type = other RNA
taactctcaagtcagaacataaa

SEQ ID NO: 1229 - RNA, 23 nt, synthetic construct
  source 1..23: mol_type = other RNA
tctaaagatagcatgctctaatt

SEQ ID NO: 1230 - RNA, 23 nt, synthetic construct
  source 1..23: mol_type = other RNA
tcttatttcaatcaaagactatg

SEQ ID NO: 1231 - RNA, 23 nt, synthetic construct
  source 1..23: mol_type = other RNA
ttgttaaatctcgtttaccaaag

SEQ ID NO: 1232 - RNA, 23 nt, synthetic construct
  source 1..23: mol_type = other RNA
taatgaaagcaattttcagacct

SEQ ID NO: 1233 - RNA, 23 nt, synthetic construct
  source 1..23: mol_type = other RNA
tttacaaggcaacaagttcatgc

SEQ ID NO: 1234 - RNA, 23 nt, synthetic construct
  source 1..23: mol_type = other RNA
ttttgatacagtttattgcccaa

SEQ ID NO: 1235 - RNA, 23 nt, synthetic construct
  source 1..23: mol_type = other RNA
ttacattatatgctaacatgtac

SEQ ID NO: 1236 - RNA, 23 nt, synthetic construct
  source 1..23: mol_type = other RNA
tagaaattctatactctcacagt

SEQ ID NO: 1237 - RNA, 23 nt, synthetic construct
  source 1..23: mol_type = other RNA
ttatagtgccaaatgaaggatta

SEQ ID NO: 1238 - RNA, 23 nt, synthetic construct
  source 1..23: mol_type = other RNA
ttaaagctactttctaaatgtgt

SEQ ID NO: 1239 - RNA, 23 nt, synthetic construct
  source 1..23: mol_type = other RNA
tctttgctttatagaacagttaa

SEQ ID NO: 1240 - RNA, 23 nt, synthetic construct
  source 1..23: mol_type = other RNA
tagatctttcatctctggaggag

SEQ ID NO: 1241 - RNA, 23 nt, synthetic construct
  source 1..23: mol_type = other RNA
ttaggagtcatagttaaacaaca

SEQ ID NO: 1242 - RNA, 23 nt, synthetic construct
  source 1..23: mol_type = other RNA
taacaaagcattgtcaaacagaa

SEQ ID NO: 1243 - RNA, 23 nt, synthetic construct
  source 1..23: mol_type = other RNA
tgaaaaatttcttttaggacaac

SEQ ID NO: 1244 - RNA, 23 nt, synthetic construct
  source 1..23: mol_type = other RNA
taagttctttgttcaatctgtag

SEQ ID NO: 1245 - RNA, 23 nt, synthetic construct
  source 1..23: mol_type = other RNA
tgaagtttggacaggttaaacga

SEQ ID NO: 1246 - RNA, 23 nt, synthetic construct
  source 1..23: mol_type = other RNA
ttggtaaagttaaacattttggt

SEQ ID NO: 1247 - RNA, 23 nt, synthetic construct
  source 1..23: mol_type = other RNA
tataaatattacacaatgggact

SEQ ID NO: 1248 - RNA, 23 nt, synthetic construct
  source 1..23: mol_type = other RNA
taataagcatatttacccaacat

SEQ ID NO: 1249 - RNA, 23 nt, synthetic construct
  source 1..23: mol_type = other RNA
tcagactcaaagacaaccctgag

SEQ ID NO: 1250 - RNA, 23 nt, synthetic construct
  source 1..23: mol_type = other RNA
taattgcagttggattttagccc

SEQ ID NO: 1251 - RNA, 23 nt, synthetic construct
  source 1..23: mol_type = other RNA
tacatacacacttcagtcctggc

SEQ ID NO: 1252 - RNA, 23 nt, synthetic construct
  source 1..23: mol_type = other RNA
ttaataaggcaattggtactcct

SEQ ID NO: 1253 - RNA, 23 nt, synthetic construct
  source 1..23: mol_type = other RNA
tatcacttcacataggcactttt

SEQ ID NO: 1254 - RNA, 23 nt, synthetic construct
  source 1..23: mol_type = other RNA
ttggcagttctattattgttagg

SEQ ID NO: 1255 - RNA, 23 nt, synthetic construct
  source 1..23: mol_type = other RNA
taagcaatggtatggaacagcag

SEQ ID NO: 1256 - RNA, 23 nt, synthetic construct
  source 1..23: mol_type = other RNA
tgaataatcttctccagtctaga

SEQ ID NO: 1257 - RNA, 23 nt, synthetic construct
  source 1..23: mol_type = other RNA
tatttggtgatgctgttggaagg

SEQ ID NO: 1258 - RNA, 23 nt, synthetic construct
  source 1..23: mol_type = other RNA
taacagaatctgtaccaattaca

SEQ ID NO: 1259 - RNA, 23 nt, synthetic construct
  source 1..23: mol_type = other RNA
tgacaacaaataatgtttctctt

SEQ ID NO: 1260 - RNA, 23 nt, synthetic construct
  source 1..23: mol_type = other RNA
taccactagcaattgagagcgcc

SEQ ID NO: 1261 - RNA, 23 nt, synthetic construct
  source 1..23: mol_type = other RNA
tatttgctgtttctgataccgtc

SEQ ID NO: 1262 - RNA, 23 nt, synthetic construct
  source 1..23: mol_type = other RNA
taatataaaattatgtctgggag

SEQ ID NO: 1263 - RNA, 23 nt, synthetic construct
  source 1..23: mol_type = other RNA
taaatacctcaaaatgtactaac

SEQ ID NO: 1264 - RNA, 23 nt, synthetic construct
  source 1..23: mol_type = other RNA
ttactgttatcaatagcatttac

SEQ ID NO: 1265 - RNA, 23 nt, synthetic construct
  source 1..23: mol_type = other RNA
tcatagtcccaaattcagctatc

SEQ ID NO: 1266 - RNA, 23 nt, synthetic construct
  source 1..23: mol_type = other RNA
tatatctttgaaaaccacaatgg

SEQ ID NO: 1267 - RNA, 23 nt, synthetic construct
  source 1..23: mol_type = other RNA
ttttcagatactgcaaccaggtt

SEQ ID NO: 1268 - RNA, 23 nt, synthetic construct
  source 1..23: mol_type = other RNA
tttagctcaacaaccattctaca

SEQ ID NO: 1269 - RNA, 23 nt, synthetic construct
  source 1..23: mol_type = other RNA
tacagtaataatgatggccagct

SEQ ID NO: 1270 - RNA, 23 nt, synthetic construct
  source 1..23: mol_type = other RNA
tcttcgtattttatctgtcaatt

SEQ ID NO: 1271 - RNA, 23 nt, synthetic construct
  source 1..23: mol_type = other RNA
tttgtaatgatgtgtttgtgaat

SEQ ID NO: 1272 - RNA, 23 nt, synthetic construct
  source 1..23: mol_type = other RNA
tctattttcatacaatcatggaa

SEQ ID NO: 1273 - RNA, 23 nt, synthetic construct
  source 1..23: mol_type = other RNA
ttaaatattcattactctgtgtc

SEQ ID NO: 1274 - RNA, 23 nt, synthetic construct
  source 1..23: mol_type = other RNA
tacatcttccactaagcagctcc

SEQ ID NO: 1275 - RNA, 23 nt, synthetic construct
  source 1..23: mol_type = other RNA
tggtatcagcacacagagctaga

SEQ ID NO: 1276 - RNA, 23 nt, synthetic construct
  source 1..23: mol_type = other RNA
tagctcatattctctcgaatgta

SEQ ID NO: 1277 - RNA, 23 nt, synthetic construct
  source 1..23: mol_type = other RNA
ttacattttcagaaaatgcatac

SEQ ID NO: 1278 - RNA, 23 nt, synthetic construct
  source 1..23: mol_type = other RNA
tttgggatacttggtcgaaactt

SEQ ID NO: 1279 - RNA, 23 nt, synthetic construct
  source 1..23: mol_type = other RNA
tcgatattgtggcaagcaagata

SEQ ID NO: 1280 - RNA, 23 nt, synthetic construct
  source 1..23: mol_type = other RNA
tttgtattccctcttgtacccga

SEQ ID NO: 1281 - RNA, 23 nt, synthetic construct
  source 1..23: mol_type = other RNA
tagacacaggatttgatcacctg

SEQ ID NO: 1282 - RNA, 23 nt, synthetic construct
  source 1..23: mol_type = other RNA
tcctatcctagaaacccactgtc

SEQ ID NO: 1283 - RNA, 23 nt, synthetic construct
  source 1..23: mol_type = other RNA
tgtccttaaaaatacttagttac

SEQ ID NO: 1284 - RNA, 23 nt, synthetic construct
  source 1..23: mol_type = other RNA
taatttaacaatcacattatggg

SEQ ID NO: 1285 - RNA, 23 nt, synthetic construct
  source 1..23: mol_type = other RNA
tgagttttcttaattcttctcaa

SEQ ID NO: 1286 - RNA, 23 nt, synthetic construct
  source 1..23: mol_type = other RNA
ttaaacaatcaatttctcttctc

SEQ ID NO: 1287 - RNA, 23 nt, synthetic construct
  source 1..23: mol_type = other RNA
ttatggcacaagtttcacacttt

SEQ ID NO: 1288 - RNA, 23 nt, synthetic construct
  source 1..23: mol_type = other RNA
tgacatttctcagtgtctcagga

SEQ ID NO: 1289 - RNA, 23 nt, synthetic construct
  source 1..23: mol_type = other RNA
tctttaaacacatataagccaat

SEQ ID NO: 1290 - RNA, 23 nt, synthetic construct
  source 1..23: mol_type = other RNA
tttttgcaatgtcaaaatgcaat

SEQ ID NO: 1291 - RNA, 23 nt, synthetic construct
  source 1..23: mol_type = other RNA
tttctggaacttctaacctaatg

SEQ ID NO: 1292 - RNA, 23 nt, synthetic construct
  source 1..23: mol_type = other RNA
taaggatgttttcatgtcgcagc

SEQ ID NO: 1293 - RNA, 23 nt, synthetic construct
  source 1..23: mol_type = other RNA
tagatggtaaaaaatcctctctt

SEQ ID NO: 1294 - RNA, 23 nt, synthetic construct
  source 1..23: mol_type = other RNA
tttgaaattctcttcaccttcca

SEQ ID NO: 1295 - RNA, 23 nt, synthetic construct
  source 1..23: mol_type = other RNA
tttcatgatattcagataccagc

SEQ ID NO: 1296 - RNA, 23 nt, synthetic construct
  source 1..23: mol_type = other RNA
tgttgaaaaattaaaccaacatg

SEQ ID NO: 1297 - RNA, 23 nt, synthetic construct
  source 1..23: mol_type = other RNA
tccacatttaaattacaactact

SEQ ID NO: 1298 - RNA, 23 nt, synthetic construct
  source 1..23: mol_type = other RNA
taaaatggcaaaaacattcacat

SEQ ID NO: 1299 - RNA, 23 nt, synthetic construct
  source 1..23: mol_type = other RNA
ttaaaagaaaaatcatctctgcc

SEQ ID NO: 1300 - RNA, 23 nt, synthetic construct
  source 1..23: mol_type = other RNA
tagatctgaatctaattttctgt

SEQ ID NO: 1301 - RNA, 23 nt, synthetic construct
  source 1..23: mol_type = other RNA
ttactttcttaattttccagtgg

SEQ ID NO: 1302 - RNA, 23 nt, synthetic construct
  source 1..23: mol_type = other RNA
tttattatctttcccactttaca

SEQ ID NO: 1303 - RNA, 23 nt, synthetic construct
  source 1..23: mol_type = other RNA
tacaactctttcttagcctagtt

SEQ ID NO: 1304 - RNA, 23 nt, synthetic construct
  source 1..23: mol_type = other RNA
ttatccattaattttatcagcac

SEQ ID NO: 1305 - RNA, 23 nt, synthetic construct
  source 1..23: mol_type = other RNA
tgacaactaaagaaatacaggaa

SEQ ID NO: 1306 - RNA, 23 nt, synthetic construct
  source 1..23: mol_type = other RNA
ttttgtcaaaagcaaaacaaagc

SEQ ID NO: 1307 - RNA, 23 nt, synthetic construct
  source 1..23: mol_type = other RNA
tggagaatattttcacagccaca

SEQ ID NO: 1308 - RNA, 23 nt, synthetic construct
  source 1..23: mol_type = other RNA
tagtgctatgcctaaaatagtgc

SEQ ID NO: 1309 - RNA, 23 nt, synthetic construct
  source 1..23: mol_type = other RNA
tcactttatacagtactgaaaat

SEQ ID NO: 1310 - RNA, 23 nt, synthetic construct
  source 1..23: mol_type = other RNA
tggaaacatagattgcatcacct

SEQ ID NO: 1311 - RNA, 23 nt, synthetic construct
  source 1..23: mol_type = other RNA
tttgatgagatctgccaaacatt

SEQ ID NO: 1312 - RNA, 23 nt, synthetic construct
  source 1..23: mol_type = other RNA
tttctggtcacaaacaacctttc

SEQ ID NO: 1313 - RNA, 23 nt, synthetic construct
  source 1..23: mol_type = other RNA
tttctcaaaatatttccttcctt

SEQ ID NO: 1314 - RNA, 23 nt, synthetic construct
  source 1..23: mol_type = other RNA
tgaagagtcacgctaccaaaaga

SEQ ID NO: 1315 - RNA, 23 nt, synthetic construct
  source 1..23: mol_type = other RNA
ttttacatcttttcctgttcatt

SEQ ID NO: 1316 - RNA, 23 nt, synthetic construct
  source 1..23: mol_type = other RNA
tccatatacctcttggttcccac

SEQ ID NO: 1317 - RNA, 23 nt, synthetic construct
  source 1..23: mol_type = other RNA
taagatttggacctagtgccagt

SEQ ID NO: 1318 - RNA, 23 nt, synthetic construct
  source 1..23: mol_type = other RNA
taatctccatatgaaggtgtgcc

SEQ ID NO: 1319 - RNA, 23 nt, synthetic construct
  source 1..23: mol_type = other RNA
tgctatttcccagtaaaccagac

SEQ ID NO: 1320 - RNA, 23 nt, synthetic construct
  source 1..23: mol_type = other RNA
tttatatacattcctttgggcct

SEQ ID NO: 1321 - RNA, 23 nt, synthetic construct
  source 1..23: mol_type = other RNA
tcagtaaactcttgcagttaaaa

SEQ ID NO: 1322 - RNA, 23 nt, synthetic construct
  source 1..23: mol_type = other RNA
tttgcactcagagagtggttcct

SEQ ID NO: 1323 - RNA, 23 nt, synthetic construct
  source 1..23: mol_type = other RNA
tatgccaggatgaaaagataaag

SEQ ID NO: 1324 - RNA, 23 nt, synthetic construct
  source 1..23: mol_type = other RNA
tgttggcataccaacactcacgc

SEQ ID NO: 1325 - RNA, 23 nt, synthetic construct
  source 1..23: mol_type = other RNA
ttatttagccaaatacattctca

SEQ ID NO: 1326 - RNA, 23 nt, synthetic construct
  source 1..23: mol_type = other RNA
ttcctcttaataaaagggttcca

SEQ ID NO: 1327 - RNA, 23 nt, synthetic construct
  source 1..23: mol_type = other RNA
tatcgcagctatggacaggaggc

SEQ ID NO: 1328 - RNA, 23 nt, synthetic construct
  source 1..23: mol_type = other RNA
tcttccttatttcaactcagtaa

SEQ ID NO: 1329 - RNA, 23 nt, synthetic construct
  source 1..23: mol_type = other RNA
tatgctccttctgtttggcaggt

SEQ ID NO: 1330 - RNA, 23 nt, synthetic construct
  source 1..23: mol_type = other RNA
tgagtgcttcacaactttgccac

SEQ ID NO: 1331 - RNA, 23 nt, synthetic construct
  source 1..23: mol_type = other RNA
ttctaaacttcatcatcctattt

SEQ ID NO: 1332 - RNA, 23 nt, synthetic construct
  source 1..23: mol_type = other RNA
ttgccattttaagatacgaatac

SEQ ID NO: 1333 - RNA, 23 nt, synthetic construct
  source 1..23: mol_type = other RNA
tacgctattacccaagctgtgct

SEQ ID NO: 1334 - RNA, 23 nt, synthetic construct
  source 1..23: mol_type = other RNA
tcagtgttatgttgttgcaaaaa

SEQ ID NO: 1335 - RNA, 23 nt, synthetic construct
  source 1..23: mol_type = other RNA
tcaataagtcacatggtggcaaa

SEQ ID NO: 1336 - RNA, 23 nt, synthetic construct
  source 1..23: mol_type = other RNA
ttttctcatttcctctatcgagg

SEQ ID NO: 1337 - RNA, 23 nt, synthetic construct
  source 1..23: mol_type = other RNA
taagtcctgctaacttaaaaagg

SEQ ID NO: 1338 - RNA, 23 nt, synthetic construct
  source 1..23: mol_type = other RNA
ttaggcagataattatttacatc

SEQ ID NO: 1339 - RNA, 23 nt, synthetic construct
  source 1..23: mol_type = other RNA
tatttgaggcacgtacaaccata

SEQ ID NO: 1340 - RNA, 21 nt, synthetic construct
  source 1..21: mol_type = other RNA
  modified_base 1: mod_base = OTHER; note = 2'-O-methyluridine-3'-phosphorothioate
  modified_base 2: mod_base = OTHER; note = 2'-O-methyluridine-3'-phosphorothioate
  modified_base 3: mod_base = OTHER; note = 2'-O-methyluridine-3'-phosphate
  modified_base 4: mod_base = OTHER; note = 2'-O-methyluridine-3'-phosphate
  modified_base 5: mod_base = OTHER; note = 2'-O-methyluridine-3'-phosphate
  modified_base 6: mod_base = OTHER; note 1-((2R,3R,4R,5R)-3-(docosyloxy)-4-hydroxy-5-(hydroxymethyl) tetrahydrofuran-2-yl)pyrimidine-2,4(1H,3H)-dione
  modified_base 7: mod_base = OTHER; note = 2'-fluorocytidine-3'-phosphate
  modified_base 8: mod_base = OTHER; note = 2'-O-methyladenosine-3'-phosphate
  modified_base 9: mod_base = OTHER; note = 2'-fluoroadenosine-3'-phosphate
  modified_base 10: mod_base = OTHER; note = 2'-fluoroadenosine-3'-phosphate
  modified_base 11: mod_base = OTHER; note = 2'-fluorocytidine-3'-phosphate
  modified_base 12: mod_base = OTHER; note = 2'-O-methyluridine-3'-phosphate
  modified_base 13: mod_base = OTHER; note = 2'-O-methylcytidine-3'-phosphate
  modified_base 14: mod_base = OTHER; note = 2'-O-methylcytidine-3'-phosphate
  modified_base 15: mod_base = OTHER; note = 2'-O-methyladenosine-3'-phosphate
  modified_base 16: mod_base = OTHER; note = 2'-O-methyluridine-3'-phosphate
  modified_base 17: mod_base = OTHER; note = 2'-O-methyluridine-3'-phosphate
  modified_base 18: mod_base = OTHER; note = 2'-O-methylcytidine-3'-phosphate
  modified_base 19: mod_base = OTHER; note = 2'-O-methylcytidine-3'-phosphorothioate
  modified_base 20: mod_base = OTHER; note = 2'-O-methyluridine-3'-phosphorothioate
  modified_base 21: mod_base = OTHER; note = 2'-O-methyladenosine-3'-phosphate
ttttttcaaactccattccta

SEQ ID NO: 1341 - RNA, 21 nt, synthetic construct
  source 1..21: mol_type = other RNA
  modified_base 1: mod_base = OTHER; note = 2'-O-methyladenosine-3'-phosphorothioate
  modified_base 2: mod_base = OTHER; note = 2'-O-methylcytidine-3'-phosphorothioate
  modified_base 3: mod_base = OTHER; note = 2'-O-methyluridine-3'-phosphate
  modified_base 4: mod_base = OTHER; note = 2'-O-methyluridine-3'-phosphate
  modified_base 5: mod_base = OTHER; note = 2'-O-methyluridine-3'-phosphate
  modified_base 6: mod_base = OTHER; note 4-amino-1-((2R,3R,4R,5R)-3-(docosyloxy)-4-hydroxy-5-(hydrox ymethyl)tetrahydrofuran-2-yl)pyrimidin-2(1H)-one
  modified_base 7: mod_base = OTHER; note = 2'-fluoroadenosine-3'-phosphate
  modified_base 8: mod_base = OTHER; note = 2'-O-methyluridine-3'-phosphate
  modified_base 9: mod_base = OTHER; note = 2'-fluorocytidine-3'-phosphate
  modified_base 10: mod_base = OTHER; note = 2'-fluorouridine-3'-phosphate
  modified_base 11: mod_base = OTHER; note = 2'-fluoroguanosine-3'-phosphate
  modified_base 12: mod_base = OTHER; note = 2'-O-methyluridine-3'-phosphate
  modified_base 13: mod_base = OTHER; note = 2'-O-methylcytidine-3'-phosphate
  modified_base 14: mod_base = OTHER; note = 2'-O-methyluridine-3'-phosphate
  modified_base 15: mod_base = OTHER; note = 2'-O-methyluridine-3'-phosphate
  modified_base 16: mod_base = OTHER; note = 2'-O-methylcytidine-3'-phosphate
  modified_base 17: mod_base = OTHER; note = 2'-O-methyladenosine-3'-phosphate
  modified_base 18: mod_base = OTHER; note = 2'-O-methylguanosine-3'-phosphate
  modified_base 19: mod_base = OTHER; note = 2'-O-methyladenosine-3'-phosphorothioate
  modified_base 20: mod_base = OTHER; note = 2'-O-methyluridine-3'-phosphorothioate
  modified_base 21: mod_base = OTHER; note = 2'-O-methyladenosine-3'-phosphate
actttcatctgtcttcagata

SEQ ID NO: 1342 - RNA, 21 nt, synthetic construct
  source 1..21: mol_type = other RNA
  modified_base 1: mod_base = OTHER; note = 2'-O-methylcytidine-3'-phosphorothioate
  modified_base 2: mod_base = OTHER; note = 2'-O-methylcytidine-3'-phosphorothioate
  modified_base 3: mod_base = OTHER; note = 2'-O-methyluridine-3'-phosphate
  modified_base 4: mod_base = OTHER; note = 2'-O-methylcytidine-3'-phosphate
  modified_base 5: mod_base = OTHER; note = 2'-O-methyladenosine-3'-phosphate
  modified_base 6: mod_base = OTHER; note 1-((2R,3R,4R,5R)-3-(docosyloxy)-4-hydroxy-5-(hydroxymethyl) tetrahydrofuran-2-yl)pyrimidine-2,4(1H,3H)-dione
  modified_base 7: mod_base = OTHER; note = 2'-fluoroadenosine-3'-phosphate
  modified_base 8: mod_base = OTHER; note = 2'-O-methyladenosine-3'-phosphate
  modified_base 9: mod_base = OTHER; note = 2'-fluorocytidine-3'-phosphate
  modified_base 10: mod_base = OTHER; note = 2'-fluorouridine-3'-phosphate
  modified_base 11: mod_base = OTHER; note = 2'-fluorouridine-3'-phosphate
  modified_base 12: mod_base = OTHER; note = 2'-O-methylcytidine-3'-phosphate
  modified_base 13: mod_base = OTHER; note = 2'-O-methyluridine-3'-phosphate
  modified_base 14: mod_base = OTHER; note = 2'-O-methylcytidine-3'-phosphate
  modified_base 15: mod_base = OTHER; note = 2'-O-methylcytidine-3'-phosphate
  modified_base 16: mod_base = OTHER; note = 2'-O-methyladenosine-3'-phosphate
  modified_base 17: mod_base = OTHER; note = 2'-O-methylguanosine-3'-phosphate
  modified_base 18: mod_base = OTHER; note = 2'-O-methyluridine-3'-phosphate
  modified_base 19: mod_base = OTHER; note = 2'-O-methyladenosine-3'-phosphorothioate
  modified_base 20: mod_base = OTHER; note = 2'-O-methyladenosine-3'-phosphorothioate
  modified_base 21: mod_base = OTHER; note = 2'-O-methyladenosine-3'-phosphate
cctcataacttctccagtaaa

SEQ ID NO: 1343 - RNA, 21 nt, synthetic construct
  source 1..21: mol_type = other RNA
  modified_base 1: mod_base = OTHER; note = 2'-O-methylcytidine-3'-phosphorothioate
  modified_base 2: mod_base = OTHER; note = 2'-O-methyluridine-3'-phosphorothioate
  modified_base 3: mod_base = OTHER; note = 2'-O-methylcytidine-3'-phosphate
  modified_base 4: mod_base = OTHER; note = 2'-O-methyladenosine-3'-phosphate
  modified_base 5: mod_base = OTHER; note = 2'-O-methylcytidine-3'-phosphate
  modified_base 6: mod_base = OTHER; note 1-((2R,3R,4R,5R)-3-(docosyloxy)-4-hydroxy-5-(hydroxymethyl) tetrahydrofuran-2-yl)pyrimidine-2,4(1H,3H)-dione
  modified_base 7: mod_base = OTHER; note = 2'-fluoroadenosine-3'-phosphate
  modified_base 8: mod_base = OTHER; note = 2'-O-methyluridine-3'-phosphate
  modified_base 9: mod_base = OTHER; note = 2'-fluorocytidine-3'-phosphate
  modified_base 10: mod_base = OTHER; note = 2'-fluorouridine-3'-phosphate
  modified_base 11: mod_base = OTHER; note = 2'-fluorouridine-3'-phosphate
  modified_base 12: mod_base = OTHER; note = 2'-O-methyluridine-3'-phosphate
  modified_base 13: mod_base = OTHER; note = 2'-O-methylcytidine-3'-phosphate
  modified_base 14: mod_base = OTHER; note = 2'-O-methyladenosine-3'-phosphate
  modified_base 15: mod_base = OTHER; note = 2'-O-methyladenosine-3'-phosphate
  modified_base 16: mod_base = OTHER; note = 2'-O-methylcytidine-3'-phosphate
  modified_base 17: mod_base = OTHER; note = 2'-O-methyladenosine-3'-phosphate
  modified_base 18: mod_base = OTHER; note = 2'-O-methyluridine-3'-phosphate
  modified_base 19: mod_base = OTHER; note = 2'-O-methyluridine-3'-phosphorothioate
  modified_base 20: mod_base = OTHER; note = 2'-O-methyladenosine-3'-phosphorothioate
  modified_base 21: mod_base = OTHER; note = 2'-O-methyladenosine-3'-phosphate
ctcactatctttcaacattaa

SEQ ID NO: 1344 - RNA, 21 nt, synthetic construct
  source 1..21: mol_type = other RNA
  modified_base 1: mod_base = OTHER; note = 2'-O-methylcytidine-3'-phosphorothioate
  modified_base 2: mod_base = OTHER; note = 2'-O-methyluridine-3'-phosphorothioate
  modified_base 3: mod_base = OTHER; note = 2'-O-methylcytidine-3'-phosphate
  modified_base 4: mod_base = OTHER; note = 2'-O-methylguanosine-3'-phosphate
  modified_base 5: mod_base = OTHER; note = 2'-O-methyluridine-3'-phosphate
  modified_base 6: mod_base = OTHER; note 1-((2R,3R,4R,5R)-3-(docosyloxy)-4-hydroxy-5-(hydroxymethyl) tetrahydrofuran-2-yl)pyrimidine-2,4(1H,3H)-dione
  modified_base 7: mod_base = OTHER; note = 2'-fluoroadenosine-3'-phosphate
  modified_base 8: mod_base = OTHER; note = 2'-O-methyladenosine-3'-phosphate
  modified_base 9: mod_base = OTHER; note = 2'-fluorouridine-3'-phosphate
  modified_base 10: mod_base = OTHER; note = 2'-fluoroguanosine-3'-phosphate
  modified_base 11: mod_base = OTHER; note = 2'-fluorocytidine-3'-phosphate
  modified_base 12: mod_base = OTHER; note = 2'-O-methyluridine-3'-phosphate
  modified_base 13: mod_base = OTHER; note = 2'-O-methylcytidine-3'-phosphate
  modified_base 14: mod_base = OTHER; note = 2'-O-methyluridine-3'-phosphate
  modified_base 15: mod_base = OTHER; note = 2'-O-methylcytidine-3'-phosphate
  modified_base 16: mod_base = OTHER; note = 2'-O-methyladenosine-3'-phosphate
  modified_base 17: mod_base = OTHER; note = 2'-O-methyluridine-3'-phosphate
  modified_base 18: mod_base = OTHER; note = 2'-O-methylcytidine-3'-phosphate
  modified_base 19: mod_base = OTHER; note = 2'-O-methylcytidine-3'-phosphorothioate
  modified_base 20: mod_base = OTHER; note = 2'-O-methyladenosine-3'-phosphorothioate
  modified_base 21: mod_base = OTHER; note = 2'-O-methyladenosine-3'-phosphate
ctcgttaatgctctcatccaa

SEQ ID NO: 1345 - RNA, 21 nt, synthetic construct
  source 1..21: mol_type = other RNA
  modified_base 1: mod_base = OTHER; note = 2'-O-methylguanosine-3'-phosphorothioate
  modified_base 2: mod_base = OTHER; note = 2'-O-methyluridine-3'-phosphorothioate
  modified_base 3: mod_base = OTHER; note = 2'-O-methyluridine-3'-phosphate
  modified_base 4: mod_base = OTHER; note = 2'-O-methylcytidine-3'-phosphate
  modified_base 5: mod_base = OTHER; note = 2'-O-methyluridine-3'-phosphate
  modified_base 6: mod_base = OTHER; note 1-((2R,3R,4R,5R)-3-(docosyloxy)-4-hydroxy-5-(hydroxymethyl) tetrahydrofuran-2-yl)pyrimidine-2,4(1H,3H)-dione
  modified_base 7: mod_base = OTHER; note = 2'-fluorocytidine-3'-phosphate
  modified_base 8: mod_base = OTHER; note = 2'-O-methyladenosine-3'-phosphate
  modified_base 9: mod_base = OTHER; note = 2'-fluorouridine-3'-phosphate
  modified_base 10: mod_base = OTHER; note = 2'-fluoroadenosine-3'-phosphate
  modified_base 11: mod_base = OTHER; note = 2'-fluoroadenosine-3'-phosphate
  modified_base 12: mod_base = OTHER; note = 2'-O-methyluridine-3'-phosphate
  modified_base 13: mod_base = OTHER; note = 2'-O-methylcytidine-3'-phosphate
  modified_base 14: mod_base = OTHER; note = 2'-O-methylcytidine-3'-phosphate
  modified_base 15: mod_base = OTHER; note = 2'-O-methyladenosine-3'-phosphate
  modified_base 16: mod_base = OTHER; note = 2'-O-methylcytidine-3'-phosphate
  modified_base 17: mod_base = OTHER; note = 2'-O-methyluridine-3'-phosphate
  modified_base 18: mod_base = OTHER; note = 2'-O-methyladenosine-3'-phosphate
  modified_base 19: mod_base = OTHER; note = 2'-O-methylcytidine-3'-phosphorothioate
  modified_base 20: mod_base = OTHER; note = 2'-O-methyluridine-3'-phosphorothioate
  modified_base 21: mod_base = OTHER; note = 2'-O-methyladenosine-3'-phosphate
gttcttcataatccactacta

SEQ ID NO: 1346 - RNA, 21 nt, synthetic construct
  source 1..21: mol_type = other RNA
  modified_base 1: mod_base = OTHER; note = 2'-O-methylguanosine-3'-phosphorothioate
  modified_base 2: mod_base = OTHER; note = 2'-O-methyluridine-3'-phosphorothioate
  modified_base 3: mod_base = OTHER; note = 2'-O-methyluridine-3'-phosphate
  modified_base 4: mod_base = OTHER; note = 2'-O-methylguanosine-3'-phosphate
  modified_base 5: mod_base = OTHER; note = 2'-O-methyladenosine-3'-phosphate
  modified_base 6: mod_base = OTHER; note 4-amino-1-((2R,3R,4R,5R)-3-(docosyloxy)-4-hydroxy-5-(hydrox ymethyl)tetrahydrofuran-2-yl)pyrimidin-2(1H)-one
  modified_base 7: mod_base = OTHER; note = 2'-fluorouridine-3'-phosphate
  modified_base 8: mod_base = OTHER; note = 2'-O-methyluridine-3'-phosphate
  modified_base 9: mod_base = OTHER; note = 2'-fluorocytidine-3'-phosphate
  modified_base 10: mod_base = OTHER; note = 2'-fluoroadenosine-3'-phosphate
  modified_base 11: mod_base = OTHER; note = 2'-fluorouridine-3'-phosphate
  modified_base 12: mod_base = OTHER; note = 2'-O-methylcytidine-3'-phosphate
  modified_base 13: mod_base = OTHER; note = 2'-O-methylcytidine-3'-phosphate
  modified_base 14: mod_base = OTHER; note = 2'-O-methyladenosine-3'-phosphate
  modified_base 15: mod_base = OTHER; note = 2'-O-methyladenosine-3'-phosphate
  modified_base 16: mod_base = OTHER; note = 2'-O-methyluridine-3'-phosphate
  modified_base 17: mod_base = OTHER; note = 2'-O-methylcytidine-3'-phosphate
  modified_base 18: mod_base = OTHER; note = 2'-O-methyluridine-3'-phosphate
  modified_base 19: mod_base = OTHER; note = 2'-O-methylcytidine-3'-phosphorothioate
  modified_base 20: mod_base = OTHER; note = 2'-O-methyluridine-3'-phosphorothioate
  modified_base 21: mod_base = OTHER; note = 2'-O-methyladenosine-3'-phosphate
gttgacttcatccaatctcta

SEQ ID NO: 1347 - RNA, 21 nt, synthetic construct
  source 1..21: mol_type = other RNA
  modified_base 1: mod_base = OTHER; note = 2'-O-methylcytidine-3'-phosphorothioate
  modified_base 2: mod_base = OTHER; note = 2'-O-methyluridine-3'-phosphorothioate
  modified_base 3: mod_base = OTHER; note = 2'-O-methyladenosine-3'-phosphate
  modified_base 4: mod_base = OTHER; note = 2'-O-methylcytidine-3'-phosphate
  modified_base 5: mod_base = OTHER; note = 2'-O-methyladenosine-3'-phosphate
  modified_base 6: mod_base = OTHER; note 4-amino-1-((2R,3R,4R,5R)-3-(docosyloxy)-4-hydroxy-5-(hydrox ymethyl)tetrahydrofuran-2-yl)pyrimidin-2(1H)-one
  modified_base 7: mod_base = OTHER; note = 2'-fluoroadenosine-3'-phosphate
  modified_base 8: mod_base = OTHER; note = 2'-O-methyladenosine-3'-phosphate
  modified_base 9: mod_base = OTHER; note = 2'-fluorouridine-3'-phosphate
  modified_base 10: mod_base = OTHER; note = 2'-fluoroguanosine-3'-phosphate
  modified_base 11: mod_base = OTHER; note = 2'-fluoroadenosine-3'-phosphate
  modified_base 12: mod_base = OTHER; note = 2'-O-methyladenosine-3'-phosphate
  modified_base 13: mod_base = OTHER; note = 2'-O-methylcytidine-3'-phosphate
  modified_base 14: mod_base = OTHER; note = 2'-O-methyluridine-3'-phosphate
  modified_base 15: mod_base = OTHER; note = 2'-O-methyluridine-3'-phosphate
  modified_base 16: mod_base = OTHER; note = 2'-O-methylcytidine-3'-phosphate
  modified_base 17: mod_base = OTHER; note = 2'-O-methyluridine-3'-phosphate
  modified_base 18: mod_base = OTHER; note = 2'-O-methyluridine-3'-phosphate
  modified_base 19: mod_base = OTHER; note = 2'-O-methyladenosine-3'-phosphorothioate
  modified_base 20: mod_base = OTHER; note = 2'-O-methyladenosine-3'-phosphorothioate
  modified_base 21: mod_base = OTHER; note = 2'-O-methyladenosine-3'-phosphate
ctacacaatgaacttcttaaa

SEQ ID NO: 1348 - RNA, 21 nt, synthetic construct
  source 1..21: mol_type = other RNA
  modified_base 1: mod_base = OTHER; note = 2'-O-methylcytidine-3'-phosphorothioate
  modified_base 2: mod_base = OTHER; note = 2'-O-methyladenosine-3'-phosphorothioate
  modified_base 3: mod_base = OTHER; note = 2'-O-methylcytidine-3'-phosphate
  modified_base 4: mod_base = OTHER; note = 2'-O-methyladenosine-3'-phosphate
  modified_base 5: mod_base = OTHER; note = 2'-O-methyluridine-3'-phosphate
  modified_base 6: mod_base = OTHER; note 4-amino-1-((2R,3R,4R,5R)-3-(docosyloxy)-4-hydroxy-5-(hydrox ymethyl)tetrahydrofuran-2-yl)pyrimidin-2(1H)-one
  modified_base 7: mod_base = OTHER; note = 2'-fluorouridine-3'-phosphate
  modified_base 8: mod_base = OTHER; note = 2'-O-methyladenosine-3'-phosphate
  modified_base 9: mod_base = OTHER; note = 2'-fluoroguanosine-3'-phosphate
  modified_base 10: mod_base = OTHER; note = 2'-fluoroadenosine-3'-phosphate
  modified_base 11: mod_base = OTHER; note = 2'-fluoroadenosine-3'-phosphate
  modified_base 12: mod_base = OTHER; note = 2'-O-methyluridine-3'-phosphate
  modified_base 13: mod_base = OTHER; note = 2'-O-methyluridine-3'-phosphate
  modified_base 14: mod_base = OTHER; note = 2'-O-methylcytidine-3'-phosphate
  modified_base 15: mod_base = OTHER; note = 2'-O-methyluridine-3'-phosphate
  modified_base 16: mod_base = OTHER; note = 2'-O-methyluridine-3'-phosphate
  modified_base 17: mod_base = OTHER; note = 2'-O-methyladenosine-3'-phosphate
  modified_base 18: mod_base = OTHER; note = 2'-O-methyladenosine-3'-phosphate
  modified_base 19: mod_base = OTHER; note = 2'-O-methyluridine-3'-phosphorothioate
  modified_base 20: mod_base = OTHER; note = 2'-O-methyluridine-3'-phosphorothioate
  modified_base 21: mod_base = OTHER; note = 2'-O-methyladenosine-3'-phosphate
cacatctagaattcttaatta

SEQ ID NO: 1349 - RNA, 21 nt, synthetic construct
  source 1..21: mol_type = other RNA
  modified_base 1: mod_base = OTHER; note = 2'-O-methyladenosine-3'-phosphorothioate
  modified_base 2: mod_base = OTHER; note = 2'-O-methyladenosine-3'-phosphorothioate
  modified_base 3: mod_base = OTHER; note = 2'-O-methyladenosine-3'-phosphate
  modified_base 4: mod_base = OTHER; note = 2'-O-methyluridine-3'-phosphate
  modified_base 5: mod_base = OTHER; note = 2'-O-methylcytidine-3'-phosphate
  modified_base 6: mod_base = OTHER; note 1-((2R,3R,4R,5R)-3-(docosyloxy)-4-hydroxy-5-(hydroxymethyl) tetrahydrofuran-2-yl)pyrimidine-2,4(1H,3H)-dione
  modified_base 7: mod_base = OTHER; note = 2'-fluorocytidine-3'-phosphate
  modified_base 8: mod_base = OTHER; note = 2'-O-methyluridine-3'-phosphate
  modified_base 9: mod_base = OTHER; note = 2'-fluorocytidine-3'-phosphate
  modified_base 10: mod_base = OTHER; note = 2'-fluoroadenosine-3'-phosphate
  modified_base 11: mod_base = OTHER; note = 2'-fluorouridine-3'-phosphate
  modified_base 12: mod_base = OTHER; note = 2'-O-methyladenosine-3'-phosphate
  modified_base 13: mod_base = OTHER; note = 2'-O-methylguanosine-3'-phosphate
  modified_base 14: mod_base = OTHER; note = 2'-O-methylcytidine-3'-phosphate
  modified_base 15: mod_base = OTHER; note = 2'-O-methyluridine-3'-phosphate
  modified_base 16: mod_base = OTHER; note = 2'-O-methyluridine-3'-phosphate
  modified_base 17: mod_base = OTHER; note = 2'-O-methyluridine-3'-phosphate
  modified_base 18: mod_base = OTHER; note = 2'-O-methylcytidine-3'-phosphate
  modified_base 19: mod_base = OTHER; note = 2'-O-methyluridine-3'-phosphorothioate
  modified_base 20: mod_base = OTHER; note = 2'-O-methyluridine-3'-phosphorothioate
  modified_base 21: mod_base = OTHER; note = 2'-O-methyladenosine-3'-phosphate
aaatctctcatagctttctta

SEQ ID NO: 1350 - RNA, 21 nt, synthetic construct
  source 1..21: mol_type = other RNA
  modified_base 1: mod_base = OTHER; note = 2'-O-methylcytidine-3'-phosphorothioate
  modified_base 2: mod_base = OTHER; note = 2'-O-methylcytidine-3'-phosphorothioate
  modified_base 3: mod_base = OTHER; note = 2'-O-methyluridine-3'-phosphate
  modified_base 4: mod_base = OTHER; note = 2'-O-methyladenosine-3'-phosphate
  modified_base 5: mod_base = OTHER; note = 2'-O-methylcytidine-3'-phosphate
  modified_base 6: mod_base = OTHER; note 1-((2R,3R,4R,5R)-3-(docosyloxy)-4-hydroxy-5-(hydroxymethyl) tetrahydrofuran-2-yl)pyrimidine-2,4(1H,3H)-dione
  modified_base 7: mod_base = OTHER; note = 2'-fluoroadenosine-3'-phosphate
  modified_base 8: mod_base = OTHER; note = 2'-O-methyluridine-3'-phosphate
  modified_base 9: mod_base = OTHER; note = 2'-fluorouridine-3'-phosphate
  modified_base 10: mod_base = OTHER; note = 2'-fluoroguanosine-3'-phosphate
  modified_base 11: mod_base = OTHER; note = 2'-fluorouridine-3'-phosphate
  modified_base 12: mod_base = OTHER; note = 2'-O-methyladenosine-3'-phosphate
  modified_base 13: mod_base = OTHER; note = 2'-O-methylguanosine-3'-phosphate
  modified_base 14: mod_base = OTHER; note = 2'-O-methyladenosine-3'-phosphate
  modified_base 15: mod_base = OTHER; note = 2'-O-methyladenosine-3'-phosphate
  modified_base 16: mod_base = OTHER; note = 2'-O-methyluridine-3'-phosphate
  modified_base 17: mod_base = OTHER; note = 2'-O-methyluridine-3'-phosphate
  modified_base 18: mod_base = OTHER; note = 2'-O-methyladenosine-3'-phosphate
  modified_base 19: mod_base = OTHER; note = 2'-O-methylcytidine-3'-phosphorothioate
  modified_base 20: mod_base = OTHER; note = 2'-O-methyluridine-3'-phosphorothioate
  modified_base 21: mod_base = OTHER; note = 2'-O-methyladenosine-3'-phosphate
cctactattgtagaattacta

SEQ ID NO: 1351 - RNA, 21 nt, synthetic construct
  source 1..21: mol_type = other RNA
  modified_base 1: mod_base = OTHER; note = 2'-O-methyladenosine-3'-phosphorothioate
  modified_base 2: mod_base = OTHER; note = 2'-O-methyluridine-3'-phosphorothioate
  modified_base 3: mod_base = OTHER; note = 2'-O-methylcytidine-3'-phosphate
  modified_base 4: mod_base = OTHER; note = 2'-O-methyluridine-3'-phosphate
  modified_base 5: mod_base = OTHER; note = 2'-O-methyluridine-3'-phosphate
  modified_base 6: mod_base = OTHER; note 4-amino-1-((2R,3R,4R,5R)-3-(docosyloxy)-4-hydroxy-5-(hydrox ymethyl)tetrahydrofuran-2-yl)pyrimidin-2(1H)-one
  modified_base 7: mod_base = OTHER; note = 2'-fluorouridine-3'-phosphate
  modified_base 8: mod_base = OTHER; note = 2'-O-methyluridine-3'-phosphate
  modified_base 9: mod_base = OTHER; note = 2'-fluorouridine-3'-phosphate
  modified_base 10: mod_base = OTHER; note = 2'-fluorouridine-3'-phosphate
  modified_base 11: mod_base = OTHER; note = 2'-fluoroadenosine-3'-phosphate
  modified_base 12: mod_base = OTHER; note = 2'-O-methylguanosine-3'-phosphate
  modified_base 13: mod_base = OTHER; note = 2'-O-methyluridine-3'-phosphate
  modified_base 14: mod_base = OTHER; note = 2'-O-methylguanosine-3'-phosphate
  modified_base 15: mod_base = OTHER; note = 2'-O-methylcytidine-3'-phosphate
  modified_base 16: mod_base = OTHER; note = 2'-O-methyladenosine-3'-phosphate
  modified_base 17: mod_base = OTHER; note = 2'-O-methyluridine-3'-phosphate
  modified_base 18: mod_base = OTHER; note = 2'-O-methyluridine-3'-phosphate
  modified_base 19: mod_base = OTHER; note = 2'-O-methyladenosine-3'-phosphorothioate
  modified_base 20: mod_base = OTHER; note = 2'-O-methyladenosine-3'-phosphorothioate
  modified_base 21: mod_base = OTHER; note = 2'-O-methyladenosine-3'-phosphate
atcttcttttagtgcattaaa

SEQ ID NO: 1352 - RNA, 21 nt, synthetic construct
  source 1..21: mol_type = other RNA
  modified_base 1: mod_base = OTHER; note = 2'-O-methylcytidine-3'-phosphorothioate
  modified_base 2: mod_base = OTHER; note = 2'-O-methyluridine-3'-phosphorothioate
  modified_base 3: mod_base = OTHER; note = 2'-O-methylcytidine-3'-phosphate
  modified_base 4: mod_base = OTHER; note = 2'-O-methyladenosine-3'-phosphate
  modified_base 5: mod_base = OTHER; note = 2'-O-methyluridine-3'-phosphate
  modified_base 6: mod_base = OTHER; note 2-amino-9-((2R,3S,4S,5R)-3-(docosyloxy)-4-hydroxy-5-(hydrox ymethyl)tetrahydrofuran-2-yl)-1,9-dihydro-6H-purin-6-one
  modified_base 7: mod_base = OTHER; note = 2'-fluorouridine-3'-phosphate
  modified_base 8: mod_base = OTHER; note = 2'-O-methyladenosine-3'-phosphate
  modified_base 9: mod_base = OTHER; note = 2'-fluorocytidine-3'-phosphate
  modified_base 10: mod_base = OTHER; note = 2'-fluorouridine-3'-phosphate
  modified_base 11: mod_base = OTHER; note = 2'-fluorocytidine-3'-phosphate
  modified_base 12: mod_base = OTHER; note = 2'-O-methyluridine-3'-phosphate
  modified_base 13: mod_base = OTHER; note = 2'-O-methyluridine-3'-phosphate
  modified_base 14: mod_base = OTHER; note = 2'-O-methylcytidine-3'-phosphate
  modified_base 15: mod_base = OTHER; note = 2'-O-methyluridine-3'-phosphate
  modified_base 16: mod_base = OTHER; note = 2'-O-methylguanosine-3'-phosphate
  modified_base 17: mod_base = OTHER; note = 2'-O-methyladenosine-3'-phosphate
  modified_base 18: mod_base = OTHER; note = 2'-O-methyluridine-3'-phosphate
  modified_base 19: mod_base = OTHER; note = 2'-O-methyluridine-3'-phosphorothioate
  modified_base 20: mod_base = OTHER; note = 2'-O-methylcytidine-3'-phosphorothioate
  modified_base 21: mod_base = OTHER; note = 2'-O-methyladenosine-3'-phosphate
ctcatgtactcttctgattca

SEQ ID NO: 1353 - RNA, 21 nt, synthetic construct
  source 1..21: mol_type = other RNA
  modified_base 1: mod_base = OTHER; note = 2'-O-methyluridine-3'-phosphorothioate
  modified_base 2: mod_base = OTHER; note = 2'-O-methyluridine-3'-phosphorothioate
  modified_base 3: mod_base = OTHER; note = 2'-O-methyluridine-3'-phosphate
  modified_base 4: mod_base = OTHER; note = 2'-O-methylcytidine-3'-phosphate
  modified_base 5: mod_base = OTHER; note = 2'-O-methyluridine-3'-phosphate
  modified_base 6: mod_base = OTHER; note 4-amino-1-((2R,3R,4R,5R)-3-(docosyloxy)-4-hydroxy-5-(hydrox ymethyl)tetrahydrofuran-2-yl)pyrimidin-2(1H)-one
  modified_base 7: mod_base = OTHER; note = 2'-fluorouridine-3'-phosphate
  modified_base 8: mod_base = OTHER; note = 2'-O-methyluridine-3'-phosphate
  modified_base 9: mod_base = OTHER; note = 2'-fluorouridine-3'-phosphate
  modified_base 10: mod_base = OTHER; note = 2'-fluoroguanosine-3'-phosphate
  modified_base 11: mod_base = OTHER; note = 2'-fluorouridine-3'-phosphate
  modified_base 12: mod_base = OTHER; note = 2'-O-methyladenosine-3'-phosphate
  modified_base 13: mod_base = OTHER; note = 2'-O-methylcytidine-3'-phosphate
  modified_base 14: mod_base = OTHER; note = 2'-O-methylcytidine-3'-phosphate
  modified_base 15: mod_base = OTHER; note = 2'-O-methyluridine-3'-phosphate
  modified_base 16: mod_base = OTHER; note = 2'-O-methyluridine-3'-phosphate
  modified_base 17: mod_base = OTHER; note = 2'-O-methylguanosine-3'-phosphate
  modified_base 18: mod_base = OTHER; note = 2'-O-methylguanosine-3'-phosphate
  modified_base 19: mod_base = OTHER; note = 2'-O-methyladenosine-3'-phosphorothioate
  modified_base 20: mod_base = OTHER; note = 2'-O-methyladenosine-3'-phosphorothioate
  modified_base 21: mod_base = OTHER; note = 2'-O-methyladenosine-3'-phosphate
tttctctttgtaccttggaaa

SEQ ID NO: 1354 - RNA, 21 nt, synthetic construct
  source 1..21: mol_type = other RNA
  modified_base 1: mod_base = OTHER; note = 2'-O-methyluridine-3'-phosphorothioate
  modified_base 2: mod_base = OTHER; note = 2'-O-methylguanosine-3'-phosphorothioate
  modified_base 3: mod_base = OTHER; note = 2'-O-methylguanosine-3'-phosphate
  modified_base 4: mod_base = OTHER; note = 2'-O-methylcytidine-3'-phosphate
  modified_base 5: mod_base = OTHER; note = 2'-O-methyluridine-3'-phosphate
  modified_base 6: mod_base = OTHER; note 1-((2R,3R,4R,5R)-3-(docosyloxy)-4-hydroxy-5-(hydroxymethyl) tetrahydrofuran-2-yl)pyrimidine-2,4(1H,3H)-dione
  modified_base 7: mod_base = OTHER; note = 2'-fluoroadenosine-3'-phosphate
  modified_base 8: mod_base = OTHER; note = 2'-O-methyluridine-3'-phosphate
  modified_base 9: mod_base = OTHER; note = 2'-fluoroadenosine-3'-phosphate
  modified_base 10: mod_base = OTHER; note = 2'-fluorocytidine-3'-phosphate
  modified_base 11: mod_base = OTHER; note = 2'-fluoroadenosine-3'-phosphate
  modified_base 12: mod_base = OTHER; note = 2'-O-methyluridine-3'-phosphate
  modified_base 13: mod_base = OTHER; note = 2'-O-methylcytidine-3'-phosphate
  modified_base 14: mod_base = OTHER; note = 2'-O-methyluridine-3'-phosphate
  modified_base 15: mod_base = OTHER; note = 2'-O-methyluridine-3'-phosphate
  modified_base 16: mod_base = OTHER; note = 2'-O-methylcytidine-3'-phosphate
  modified_base 17: mod_base = OTHER; note = 2'-O-methyladenosine-3'-phosphate
  modified_base 18: mod_base = OTHER; note = 2'-O-methylguanosine-3'-phosphate
  modified_base 19: mod_base = OTHER; note = 2'-O-methyladenosine-3'-phosphorothioate
  modified_base 20: mod_base = OTHER; note = 2'-O-methyladenosine-3'-phosphorothioate
  modified_base 21: mod_base = OTHER; note = 2'-O-methyladenosine-3'-phosphate
tggcttatacatcttcagaaa

SEQ ID NO: 1355 - RNA, 21 nt, synthetic construct
  source 1..21: mol_type = other RNA
  modified_base 1: mod_base = OTHER; note = 2'-O-methylcytidine-3'-phosphorothioate
  modified_base 2: mod_base = OTHER; note = 2'-O-methyladenosine-3'-phosphorothioate
  modified_base 3: mod_base = OTHER; note = 2'-O-methyladenosine-3'-phosphate
  modified_base 4: mod_base = OTHER; note = 2'-O-methyladenosine-3'-phosphate
  modified_base 5: mod_base = OTHER; note = 2'-O-methyladenosine-3'-phosphate
  modified_base 6: mod_base = OTHER; note 4-amino-1-((2R,3R,4R,5R)-3-(docosyloxy)-4-hydroxy-5-(hydrox ymethyl)tetrahydrofuran-2-yl)pyrimidin-2(1H)-one
  modified_base 7: mod_base = OTHER; note = 2'-fluoroadenosine-3'-phosphate
  modified_base 8: mod_base = OTHER; note = 2'-O-methyladenosine-3'-phosphate
  modified_base 9: mod_base = OTHER; note = 2'-fluoroadenosine-3'-phosphate
  modified_base 10: mod_base = OTHER; note = 2'-fluoroadenosine-3'-phosphate
  modified_base 11: mod_base = OTHER; note = 2'-fluorocytidine-3'-phosphate
  modified_base 12: mod_base = OTHER; note = 2'-O-methyluridine-3'-phosphate
  modified_base 13: mod_base = OTHER; note = 2'-O-methyladenosine-3'-phosphate
  modified_base 14: mod_base = OTHER; note = 2'-O-methylcytidine-3'-phosphate
  modified_base 15: mod_base = OTHER; note = 2'-O-methyluridine-3'-phosphate
  modified_base 16: mod_base = OTHER; note = 2'-O-methylcytidine-3'-phosphate
  modified_base 17: mod_base = OTHER; note = 2'-O-methylcytidine-3'-phosphate
  modified_base 18: mod_base = OTHER; note = 2'-O-methyluridine-3'-phosphate
  modified_base 19: mod_base = OTHER; note = 2'-O-methyladenosine-3'-phosphorothioate
  modified_base 20: mod_base = OTHER; note = 2'-O-methyluridine-3'-phosphorothioate
  modified_base 21: mod_base = OTHER; note = 2'-O-methyladenosine-3'-phosphate
caaaacaaaactactcctata

SEQ ID NO: 1356 - RNA, 21 nt, synthetic construct
  source 1..21: mol_type = other RNA
  modified_base 1: mod_base = OTHER; note = 2'-O-methyladenosine-3'-phosphorothioate
  modified_base 2: mod_base = OTHER; note = 2'-O-methylcytidine-3'-phosphorothioate
  modified_base 3: mod_base = OTHER; note = 2'-O-methyluridine-3'-phosphate
  modified_base 4: mod_base = OTHER; note = 2'-O-methyladenosine-3'-phosphate
  modified_base 5: mod_base = OTHER; note = 2'-O-methylguanosine-3'-phosphate
  modified_base 6: mod_base = OTHER; note 4-amino-1-((2R,3R,4R,5R)-3-(docosyloxy)-4-hydroxy-5-(hydrox ymethyl)tetrahydrofuran-2-yl)pyrimidin-2(1H)-one
  modified_base 7: mod_base = OTHER; note = 2'-fluoroadenosine-3'-phosphate
  modified_base 8: mod_base = OTHER; note = 2'-O-methylguanosine-3'-phosphate
  modified_base 9: mod_base = OTHER; note = 2'-fluoroadenosine-3'-phosphate
  modified_base 10: mod_base = OTHER; note = 2'-fluoroadenosine-3'-phosphate
  modified_base 11: mod_base = OTHER; note = 2'-fluorocytidine-3'-phosphate
  modified_base 12: mod_base = OTHER; note = 2'-O-methyluridine-3'-phosphate
  modified_base 13: mod_base = OTHER; note = 2'-O-methylcytidine-3'-phosphate
  modified_base 14: mod_base = OTHER; note = 2'-O-methyluridine-3'-phosphate
  modified_base 15: mod_base = OTHER; note = 2'-O-methyluridine-3'-phosphate
  modified_base 16: mod_base = OTHER; note = 2'-O-methyladenosine-3'-phosphate
  modified_base 17: mod_base = OTHER; note = 2'-O-methyluridine-3'-phosphate
  modified_base 18: mod_base = OTHER; note = 2'-O-methylguanosine-3'-phosphate
  modified_base 19: mod_base = OTHER; note = 2'-O-methyladenosine-3'-phosphorothioate
  modified_base 20: mod_base = OTHER; note = 2'-O-methyladenosine-3'-phosphorothioate
  modified_base 21: mod_base = OTHER; note = 2'-O-methyladenosine-3'-phosphate
actagcagaactcttatgaaa

SEQ ID NO: 1357 - RNA, 21 nt, synthetic construct
  source 1..21: mol_type = other RNA
  modified_base 1: mod_base = OTHER; note = 2'-O-methylcytidine-3'-phosphorothioate
  modified_base 2: mod_base = OTHER; note = 2'-O-methylcytidine-3'-phosphorothioate
  modified_base 3: mod_base = OTHER; note = 2'-O-methyladenosine-3'-phosphate
  modified_base 4: mod_base = OTHER; note = 2'-O-methyladenosine-3'-phosphate
  modified_base 5: mod_base = OTHER; note = 2'-O-methylguanosine-3'-phosphate
  modified_base 6: mod_base = OTHER; note 1-((2R,3R,4R,5R)-3-(docosyloxy)-4-hydroxy-5-(hydroxymethyl) tetrahydrofuran-2-yl)pyrimidine-2,4(1H,3H)-dione
  modified_base 7: mod_base = OTHER; note = 2'-fluorocytidine-3'-phosphate
  modified_base 8: mod_base = OTHER; note = 2'-O-methyladenosine-3'-phosphate
  modified_base 9: mod_base = OTHER; note = 2'-fluorocytidine-3'-phosphate
  modified_base 10: mod_base = OTHER; note = 2'-fluorouridine-3'-phosphate
  modified_base 11: mod_base = OTHER; note = 2'-fluorocytidine-3'-phosphate
  modified_base 12: mod_base = OTHER; note = 2'-O-methyluridine-3'-phosphate
  modified_base 13: mod_base = OTHER; note = 2'-O-methyladenosine-3'-phosphate
  modified_base 14: mod_base = OTHER; note = 2'-O-methyluridine-3'-phosphate
  modified_base 15: mod_base = OTHER; note = 2'-O-methyladenosine-3'-phosphate
  modified_base 16: mod_base = OTHER; note = 2'-O-methyladenosine-3'-phosphate
  modified_base 17: mod_base = OTHER; note = 2'-O-methyluridine-3'-phosphate
  modified_base 18: mod_base = OTHER; note = 2'-O-methyluridine-3'-phosphate
  modified_base 19: mod_base = OTHER; note = 2'-O-methylcytidine-3'-phosphorothioate
  modified_base 20: mod_base = OTHER; note = 2'-O-methylcytidine-3'-phosphorothioate
  modified_base 21: mod_base = OTHER; note = 2'-O-methyladenosine-3'-phosphate
ccaagtcactctataattcca

SEQ ID NO: 1358 - RNA, 21 nt, synthetic construct
  source 1..21: mol_type = other RNA
  modified_base 1: mod_base = OTHER; note = 2'-O-methyluridine-3'-phosphorothioate
  modified_base 2: mod_base = OTHER; note = 2'-O-methylcytidine-3'-phosphorothioate
  modified_base 3: mod_base = OTHER; note = 2'-O-methylcytidine-3'-phosphate
  modified_base 4: mod_base = OTHER; note = 2'-O-methyladenosine-3'-phosphate
  modified_base 5: mod_base = OTHER; note = 2'-O-methyluridine-3'-phosphate
  modified_base 6: mod_base = OTHER; note 1-((2R,3R,4R,5R)-3-(docosyloxy)-4-hydroxy-5-(hydroxymethyl) tetrahydrofuran-2-yl)pyrimidine-2,4(1H,3H)-dione
  modified_base 7: mod_base = OTHER; note = 2'-fluorouridine-3'-phosphate
  modified_base 8: mod_base = OTHER; note = 2'-O-methyluridine-3'-phosphate
  modified_base 9: mod_base = OTHER; note = 2'-fluorouridine-3'-phosphate
  modified_base 10: mod_base = OTHER; note = 2'-fluorocytidine-3'-phosphate
  modified_base 11: mod_base = OTHER; note = 2'-fluorouridine-3'-phosphate
  modified_base 12: mod_base = OTHER; note = 2'-O-methyluridine-3'-phosphate
  modified_base 13: mod_base = OTHER; note = 2'-O-methylguanosine-3'-phosphate
  modified_base 14: mod_base = OTHER; note = 2'-O-methyluridine-3'-phosphate
  modified_base 15: mod_base = OTHER; note = 2'-O-methylcytidine-3'-phosphate
  modified_base 16: mod_base = OTHER; note = 2'-O-methyladenosine-3'-phosphate
  modified_base 17: mod_base = OTHER; note = 2'-O-methyluridine-3'-phosphate
  modified_base 18: mod_base = OTHER; note = 2'-O-methyluridine-3'-phosphate
  modified_base 19: mod_base = OTHER; note = 2'-O-methyladenosine-3'-phosphorothioate
  modified_base 20: mod_base = OTHER; note = 2'-O-methyluridine-3'-phosphorothioate
  modified_base 21: mod_base = OTHER; note = 2'-O-methyladenosine-3'-phosphate
tccatttttcttgtcattata

SEQ ID NO: 1359 - RNA, 21 nt, synthetic construct
  source 1..21: mol_type = other RNA
  modified_base 1: mod_base = OTHER; note = 2'-O-methylcytidine-3'-phosphorothioate
  modified_base 2: mod_base = OTHER; note = 2'-O-methyladenosine-3'-phosphorothioate
  modified_base 3: mod_base = OTHER; note = 2'-O-methyladenosine-3'-phosphate
  modified_base 4: mod_base = OTHER; note = 2'-O-methylcytidine-3'-phosphate
  modified_base 5: mod_base = OTHER; note = 2'-O-methyladenosine-3'-phosphate
  modified_base 6: mod_base = OTHER; note 4-amino-1-((2R,3R,4R,5R)-3-(docosyloxy)-4-hydroxy-5-(hydrox ymethyl)tetrahydrofuran-2-yl)pyrimidin-2(1H)-one
  modified_base 7: mod_base = OTHER; note = 2'-fluorocytidine-3'-phosphate
  modified_base 8: mod_base = OTHER; note = 2'-O-methyluridine-3'-phosphate
  modified_base 9: mod_base = OTHER; note = 2'-fluorocytidine-3'-phosphate
  modified_base 10: mod_base = OTHER; note = 2'-fluoroadenosine-3'-phosphate
  modified_base 11: mod_base = OTHER; note = 2'-fluoroadenosine-3'-phosphate
  modified_base 12: mod_base = OTHER; note = 2'-O-methylcytidine-3'-phosphate
  modified_base 13: mod_base = OTHER; note = 2'-O-methyluridine-3'-phosphate
  modified_base 14: mod_base = OTHER; note = 2'-O-methylcytidine-3'-phosphate
  modified_base 15: mod_base = OTHER; note = 2'-O-methyladenosine-3'-phosphate
  modified_base 16: mod_base = OTHER; note = 2'-O-methyluridine-3'-phosphate
  modified_base 17: mod_base = OTHER; note = 2'-O-methylcytidine-3'-phosphate
  modified_base 18: mod_base = OTHER; note = 2'-O-methyluridine-3'-phosphate
  modified_base 19: mod_base = OTHER; note = 2'-O-methyluridine-3'-phosphorothioate
  modified_base 20: mod_base = OTHER; note = 2'-O-methyluridine-3'-phosphorothioate
  modified_base 21: mod_base = OTHER; note = 2'-O-methyladenosine-3'-phosphate
caacacctcaactcatcttta

SEQ ID NO: 1360 - RNA, 21 nt, synthetic construct
  source 1..21: mol_type = other RNA
  modified_base 1: mod_base = OTHER; note = 2'-O-methyladenosine-3'-phosphorothioate
  modified_base 2: mod_base = OTHER; note = 2'-O-methylcytidine-3'-phosphorothioate
  modified_base 3: mod_base = OTHER; note = 2'-O-methyluridine-3'-phosphate
  modified_base 4: mod_base = OTHER; note = 2'-O-methylcytidine-3'-phosphate
  modified_base 5: mod_base = OTHER; note = 2'-O-methyluridine-3'-phosphate
  modified_base 6: mod_base = OTHER; note 2-amino-9-((2R,3S,4S,5R)-3-(docosyloxy)-4-hydroxy-5-(hydrox ymethyl)tetrahydrofuran-2-yl)-1,9-dihydro-6H-purin-6-one
  modified_base 7: mod_base = OTHER; note = 2'-fluoroadenosine-3'-phosphate
  modified_base 8: mod_base = OTHER; note = 2'-O-methyladenosine-3'-phosphate
  modified_base 9: mod_base = OTHER; note = 2'-fluoroadenosine-3'-phosphate
  modified_base 10: mod_base = OTHER; note = 2'-fluoroguanosine-3'-phosphate
  modified_base 11: mod_base = OTHER; note = 2'-fluoroadenosine-3'-phosphate
  modified_base 12: mod_base = OTHER; note = 2'-O-methyluridine-3'-phosphate
  modified_base 13: mod_base = OTHER; note = 2'-O-methylcytidine-3'-phosphate
  modified_base 14: mod_base = OTHER; note = 2'-O-methyluridine-3'-phosphate
  modified_base 15: mod_base = OTHER; note = 2'-O-methylguanosine-3'-phosphate
  modified_base 16: mod_base = OTHER; note = 2'-O-methyladenosine-3'-phosphate
  modified_base 17: mod_base = OTHER; note = 2'-O-methyluridine-3'-phosphate
  modified_base 18: mod_base = OTHER; note = 2'-O-methyluridine-3'-phosphate
  modified_base 19: mod_base = OTHER; note = 2'-O-methyluridine-3'-phosphorothioate
  modified_base 20: mod_base = OTHER; note = 2'-O-methyladenosine-3'-phosphorothioate
  modified_base 21: mod_base = OTHER; note = 2'-O-methyladenosine-3'-phosphate
actctgaaagatctgatttaa

SEQ ID NO: 1361 - RNA, 21 nt, synthetic construct
  source 1..21: mol_type = other RNA
  modified_base 1: mod_base = OTHER; note = 2'-O-methylcytidine-3'-phosphorothioate
  modified_base 2: mod_base = OTHER; note = 2'-O-methyluridine-3'-phosphorothioate
  modified_base 3: mod_base = OTHER; note = 2'-O-methyladenosine-3'-phosphate
  modified_base 4: mod_base = OTHER; note = 2'-O-methylguanosine-3'-phosphate
  modified_base 5: mod_base = OTHER; note = 2'-O-methyluridine-3'-phosphate
  modified_base 6: mod_base = OTHER; note 1-((2R,3R,4R,5R)-3-(docosyloxy)-4-hydroxy-5-(hydroxymethyl) tetrahydrofuran-2-yl)pyrimidine-2,4(1H,3H)-dione
  modified_base 7: mod_base = OTHER; note = 2'-fluorocytidine-3'-phosphate
  modified_base 8: mod_base = OTHER; note = 2'-O-methyluridine-3'-phosphate
  modified_base 9: mod_base = OTHER; note = 2'-fluorouridine-3'-phosphate
  modified_base 10: mod_base = OTHER; note = 2'-fluorouridine-3'-phosphate
  modified_base 11: mod_base = OTHER; note = 2'-fluorouridine-3'-phosphate
  modified_base 12: mod_base = OTHER; note = 2'-O-methylcytidine-3'-phosphate
  modified_base 13: mod_base = OTHER; note = 2'-O-methylcytidine-3'-phosphate
  modified_base 14: mod_base = OTHER; note = 2'-O-methylguanosine-3'-phosphate
  modified_base 15: mod_base = OTHER; note = 2'-O-methylcytidine-3'-phosphate
  modified_base 16: mod_base = OTHER; note = 2'-O-methyladenosine-3'-phosphate
  modified_base 17: mod_base = OTHER; note = 2'-O-methyladenosine-3'-phosphate
  modified_base 18: mod_base = OTHER; note = 2'-O-methyluridine-3'-phosphate
  modified_base 19: mod_base = OTHER; note = 2'-O-methylguanosine-3'-phosphorothioate
  modified_base 20: mod_base = OTHER; note = 2'-O-methyladenosine-3'-phosphorothioate
  modified_base 21: mod_base = OTHER; note = 2'-O-methyladenosine-3'-phosphate
ctagttcttttccgcaatgaa

SEQ ID NO: 1362 - RNA, 21 nt, synthetic construct
  source 1..21: mol_type = other RNA
  modified_base 1: mod_base = OTHER; note = 2'-O-methylcytidine-3'-phosphorothioate
  modified_base 2: mod_base = OTHER; note = 2'-O-methyluridine-3'-phosphorothioate
  modified_base 3: mod_base = OTHER; note = 2'-O-methyluridine-3'-phosphate
  modified_base 4: mod_base = OTHER; note = 2'-O-methyluridine-3'-phosphate
  modified_base 5: mod_base = OTHER; note = 2'-O-methylcytidine-3'-phosphate
  modified_base 6: mod_base = OTHER; note (2R,3S,4S,5R)-5-(6-amino-9H-purin-9-yl)-4-(docosyloxy)-2-(h ydroxymethyl)tetrahydrofuran-3-ol
  modified_base 7: mod_base = OTHER; note = 2'-fluorocytidine-3'-phosphate
  modified_base 8: mod_base = OTHER; note = 2'-O-methyluridine-3'-phosphate
  modified_base 9: mod_base = OTHER; note = 2'-fluorocytidine-3'-phosphate
  modified_base 10: mod_base = OTHER; note = 2'-fluorouridine-3'-phosphate
  modified_base 11: mod_base = OTHER; note = 2'-fluoroguanosine-3'-phosphate
  modified_base 12: mod_base = OTHER; note = 2'-O-methyladenosine-3'-phosphate
  modified_base 13: mod_base = OTHER; note = 2'-O-methyladenosine-3'-phosphate
  modified_base 14: mod_base = OTHER; note = 2'-O-methylguanosine-3'-phosphate
  modified_base 15: mod_base = OTHER; note = 2'-O-methyladenosine-3'-phosphate
  modified_base 16: mod_base = OTHER; note = 2'-O-methyladenosine-3'-phosphate
  modified_base 17: mod_base = OTHER; note = 2'-O-methyladenosine-3'-phosphate
  modified_base 18: mod_base = OTHER; note = 2'-O-methyluridine-3'-phosphate
  modified_base 19: mod_base = OTHER; note = 2'-O-methylcytidine-3'-phosphorothioate
  modified_base 20: mod_base = OTHER; note = 2'-O-methylcytidine-3'-phosphorothioate
  modified_base 21: mod_base = OTHER; note = 2'-O-methyladenosine-3'-phosphate
ctttcactctgaagaaatcca

SEQ ID NO: 1363 - RNA, 21 nt, synthetic construct
  source 1..21: mol_type = other RNA
  modified_base 1: mod_base = OTHER; note = 2'-O-methyluridine-3'-phosphorothioate
  modified_base 2: mod_base = OTHER; note = 2'-O-methylcytidine-3'-phosphorothioate
  modified_base 3: mod_base = OTHER; note = 2'-O-methyluridine-3'-phosphate
  modified_base 4: mod_base = OTHER; note = 2'-O-methyladenosine-3'-phosphate
  modified_base 5: mod_base = OTHER; note = 2'-O-methyladenosine-3'-phosphate
  modified_base 6: mod_base = OTHER; note 4-amino-1-((2R,3R,4R,5R)-3-(docosyloxy)-4-hydroxy-5-(hydrox ymethyl)tetrahydrofuran-2-yl)pyrimidin-2(1H)-one
  modified_base 7: mod_base = OTHER; note = 2'-fluorouridine-3'-phosphate
  modified_base 8: mod_base = OTHER; note = 2'-O-methyluridine-3'-phosphate
  modified_base 9: mod_base = OTHER; note = 2'-fluorouridine-3'-phosphate
  modified_base 10: mod_base = OTHER; note = 2'-fluorouridine-3'-phosphate
  modified_base 11: mod_base = OTHER; note = 2'-fluorocytidine-3'-phosphate
  modified_base 12: mod_base = OTHER; note = 2'-O-methyluridine-3'-phosphate
  modified_base 13: mod_base = OTHER; note = 2'-O-methylcytidine-3'-phosphate
  modified_base 14: mod_base = OTHER; note = 2'-O-methyluridine-3'-phosphate
  modified_base 15: mod_base = OTHER; note = 2'-O-methylcytidine-3'-phosphate
  modified_base 16: mod_base = OTHER; note = 2'-O-methyluridine-3'-phosphate
  modified_base 17: mod_base = OTHER; note = 2'-O-methyluridine-3'-phosphate
  modified_base 18: mod_base = OTHER; note = 2'-O-methyluridine-3'-phosphate
  modified_base 19: mod_base = OTHER; note = 2'-O-methylcytidine-3'-phosphorothioate
  modified_base 20: mod_base = OTHER; note = 2'-O-methyluridine-3'-phosphorothioate
  modified_base 21: mod_base = OTHER; note = 2'-O-methyladenosine-3'-phosphate
tctaacttttctctctttcta

SEQ ID NO: 1364 - RNA, 21 nt, synthetic construct
  source 1..21: mol_type = other RNA
  modified_base 1: mod_base = OTHER; note = 2'-O-methyluridine-3'-phosphorothioate
  modified_base 2: mod_base = OTHER; note = 2'-O-methylcytidine-3'-phosphorothioate
  modified_base 3: mod_base = OTHER; note = 2'-O-methyluridine-3'-phosphate
  modified_base 4: mod_base = OTHER; note = 2'-O-methylcytidine-3'-phosphate
  modified_base 5: mod_base = OTHER; note = 2'-O-methyladenosine-3'-phosphate
  modified_base 6: mod_base = OTHER; note (2R,3S,4S,5R)-5-(6-amino-9H-purin-9-yl)-4-(docosyloxy)-2-(h ydroxymethyl)tetrahydrofuran-3-ol
  modified_base 7: mod_base = OTHER; note = 2'-fluorocytidine-3'-phosphate
  modified_base 8: mod_base = OTHER; note = 2'-O-methyluridine-3'-phosphate
  modified_base 9: mod_base = OTHER; note = 2'-fluorouridine-3'-phosphate
  modified_base 10: mod_base = OTHER; note = 2'-fluorouridine-3'-phosphate
  modified_base 11: mod_base = OTHER; note = 2'-fluoroguanosine-3'-phosphate
  modified_base 12: mod_base = OTHER; note = 2'-O-methyluridine-3'-phosphate
  modified_base 13: mod_base = OTHER; note = 2'-O-methylguanosine-3'-phosphate
  modified_base 14: mod_base = OTHER; note = 2'-O-methyluridine-3'-phosphate
  modified_base 15: mod_base = OTHER; note = 2'-O-methylcytidine-3'-phosphate
  modified_base 16: mod_base = OTHER; note = 2'-O-methyladenosine-3'-phosphate
  modified_base 17: mod_base = OTHER; note = 2'-O-methyladenosine-3'-phosphate
  modified_base 18: mod_base = OTHER; note = 2'-O-methyladenosine-3'-phosphate
  modified_base 19: mod_base = OTHER; note = 2'-O-methylguanosine-3'-phosphorothioate
  modified_base 20: mod_base = OTHER; note = 2'-O-methyladenosine-3'-phosphorothioate
  modified_base 21: mod_base = OTHER; note = 2'-O-methyladenosine-3'-phosphate
tctcaactttgtgtcaaagaa

SEQ ID NO: 1365 - RNA, 21 nt, synthetic construct
  source 1..21: mol_type = other RNA
  modified_base 1: mod_base = OTHER; note = 2'-O-methylcytidine-3'-phosphorothioate
  modified_base 2: mod_base = OTHER; note = 2'-O-methyluridine-3'-phosphorothioate
  modified_base 3: mod_base = OTHER; note = 2'-O-methyluridine-3'-phosphate
  modified_base 4: mod_base = OTHER; note = 2'-O-methylcytidine-3'-phosphate
  modified_base 5: mod_base = OTHER; note = 2'-O-methyladenosine-3'-phosphate
  modified_base 6: mod_base = OTHER; note (2R,3S,4S,5R)-5-(6-amino-9H-purin-9-yl)-4-(docosyloxy)-2-(h ydroxymethyl)tetrahydrofuran-3-ol
  modified_base 7: mod_base = OTHER; note = 2'-fluorouridine-3'-phosphate
  modified_base 8: mod_base = OTHER; note = 2'-O-methyladenosine-3'-phosphate
  modified_base 9: mod_base = OTHER; note = 2'-fluoroadenosine-3'-phosphate
  modified_base 10: mod_base = OTHER; note = 2'-fluorouridine-3'-phosphate
  modified_base 11: mod_base = OTHER; note = 2'-fluorocytidine-3'-phosphate
  modified_base 12: mod_base = OTHER; note = 2'-O-methyladenosine-3'-phosphate
  modified_base 13: mod_base = OTHER; note = 2'-O-methyluridine-3'-phosphate
  modified_base 14: mod_base = OTHER; note = 2'-O-methyluridine-3'-phosphate
  modified_base 15: mod_base = OTHER; note = 2'-O-methylcytidine-3'-phosphate
  modified_base 16: mod_base = OTHER; note = 2'-O-methylcytidine-3'-phosphate
  modified_base 17: mod_base = OTHER; note = 2'-O-methyluridine-3'-phosphate
  modified_base 18: mod_base = OTHER; note = 2'-O-methyluridine-3'-phosphate
  modified_base 19: mod_base = OTHER; note = 2'-O-methyluridine-3'-phosphorothioate
  modified_base 20: mod_base = OTHER; note = 2'-O-methyladenosine-3'-phosphorothioate
  modified_base 21: mod_base = OTHER; note = 2'-O-methyladenosine-3'-phosphate
cttcaataatcattcctttaa

SEQ ID NO: 1366 - RNA, 21 nt, synthetic construct
  source 1..21: mol_type = other RNA
  modified_base 1: mod_base = OTHER; note = 2'-O-methyluridine-3'-phosphorothioate
  modified_base 2: mod_base = OTHER; note = 2'-O-methyladenosine-3'-phosphorothioate
  modified_base 3: mod_base = OTHER; note = 2'-O-methyladenosine-3'-phosphate
  modified_base 4: mod_base = OTHER; note = 2'-O-methylcytidine-3'-phosphate
  modified_base 5: mod_base = OTHER; note = 2'-O-methyluridine-3'-phosphate
  modified_base 6: mod_base = OTHER; note 2-amino-9-((2R,3S,4S,5R)-3-(docosyloxy)-4-hydroxy-5-(hydrox ymethyl)tetrahydrofuran-2-yl)-1,9-dihydro-6H-purin-6-one
  modified_base 7: mod_base = OTHER; note = 2'-fluorocytidine-3'-phosphate
  modified_base 8: mod_base = OTHER; note = 2'-O-methyluridine-3'-phosphate
  modified_base 9: mod_base = OTHER; note = 2'-fluorocytidine-3'-phosphate
  modified_base 10: mod_base = OTHER; note = 2'-fluorouridine-3'-phosphate
  modified_base 11: mod_base = OTHER; note = 2'-fluorouridine-3'-phosphate
  modified_base 12: mod_base = OTHER; note = 2'-O-methylcytidine-3'-phosphate
  modified_base 13: mod_base = OTHER; note = 2'-O-methylguanosine-3'-phosphate
  modified_base 14: mod_base = OTHER; note = 2'-O-methyluridine-3'-phosphate
  modified_base 15: mod_base = OTHER; note = 2'-O-methyladenosine-3'-phosphate
  modified_base 16: mod_base = OTHER; note = 2'-O-methyluridine-3'-phosphate
  modified_base 17: mod_base = OTHER; note = 2'-O-methyluridine-3'-phosphate
  modified_base 18: mod_base = OTHER; note = 2'-O-methyladenosine-3'-phosphate
  modified_base 19: mod_base = OTHER; note = 2'-O-methyladenosine-3'-phosphorothioate
  modified_base 20: mod_base = OTHER; note = 2'-O-methylguanosine-3'-phosphorothioate
  modified_base 21: mod_base = OTHER; note = 2'-O-methyladenosine-3'-phosphate
taactgctcttcgtattaaga

SEQ ID NO: 1367 - RNA, 21 nt, synthetic construct
  source 1..21: mol_type = other RNA
  modified_base 1: mod_base = OTHER; note = 2'-O-methyluridine-3'-phosphorothioate
  modified_base 2: mod_base = OTHER; note = 2'-O-methylcytidine-3'-phosphorothioate
  modified_base 3: mod_base = OTHER; note = 2'-O-methyluridine-3'-phosphate
  modified_base 4: mod_base = OTHER; note = 2'-O-methyluridine-3'-phosphate
  modified_base 5: mod_base = OTHER; note = 2'-O-methylcytidine-3'-phosphate
  modified_base 6: mod_base = OTHER; note 1-((2R,3R,4R,5R)-3-(docosyloxy)-4-hydroxy-5-(hydroxymethyl) tetrahydrofuran-2-yl)pyrimidine-2,4(1H,3H)-dione
  modified_base 7: mod_base = OTHER; note = 2'-fluoroguanosine-3'-phosphate
  modified_base 8: mod_base = OTHER; note = 2'-O-methyluridine-3'-phosphate
  modified_base 9: mod_base = OTHER; note = 2'-fluorocytidine-3'-phosphate
  modified_base 10: mod_base = OTHER; note = 2'-fluoroadenosine-3'-phosphate
  modified_base 11: mod_base = OTHER; note = 2'-fluorouridine-3'-phosphate
  modified_base 12: mod_base = OTHER; note = 2'-O-methyladenosine-3'-phosphate
  modified_base 13: mod_base = OTHER; note = 2'-O-methylguanosine-3'-phosphate
  modified_base 14: mod_base = OTHER; note = 2'-O-methyluridine-3'-phosphate
  modified_base 15: mod_base = OTHER; note = 2'-O-methyluridine-3'-phosphate
  modified_base 16: mod_base = OTHER; note = 2'-O-methylcytidine-3'-phosphate
  modified_base 17: mod_base = OTHER; note = 2'-O-methylcytidine-3'-phosphate
  modified_base 18: mod_base = OTHER; note = 2'-O-methyladenosine-3'-phosphate
  modified_base 19: mod_base = OTHER; note = 2'-O-methyladenosine-3'-phosphorothioate
  modified_base 20: mod_base = OTHER; note = 2'-O-methylcytidine-3'-phosphorothioate
  modified_base 21: mod_base = OTHER; note = 2'-O-methyladenosine-3'-phosphate
tcttctgtcatagttccaaca

SEQ ID NO: 1368 - RNA, 21 nt, synthetic construct
  source 1..21: mol_type = other RNA
  modified_base 1: mod_base = OTHER; note = 2'-O-methyladenosine-3'-phosphorothioate
  modified_base 2: mod_base = OTHER; note = 2'-O-methyluridine-3'-phosphorothioate
  modified_base 3: mod_base = OTHER; note = 2'-O-methylcytidine-3'-phosphate
  modified_base 4: mod_base = OTHER; note = 2'-O-methyluridine-3'-phosphate
  modified_base 5: mod_base = OTHER; note = 2'-O-methylcytidine-3'-phosphate
  modified_base 6: mod_base = OTHER; note (2R,3S,4S,5R)-5-(6-amino-9H-purin-9-yl)-4-(docosyloxy)-2-(h ydroxymethyl)tetrahydrofuran-3-ol
  modified_base 7: mod_base = OTHER; note = 2'-fluoroguanosine-3'-phosphate
  modified_base 8: mod_base = OTHER; note = 2'-O-methyladenosine-3'-phosphate
  modified_base 9: mod_base = OTHER; note = 2'-fluoroadenosine-3'-phosphate
  modified_base 10: mod_base = OTHER; note = 2'-fluorocytidine-3'-phosphate
  modified_base 11: mod_base = OTHER; note = 2'-fluorocytidine-3'-phosphate
  modified_base 12: mod_base = OTHER; note = 2'-O-methyladenosine-3'-phosphate
  modified_base 13: mod_base = OTHER; note = 2'-O-methyluridine-3'-phosphate
  modified_base 14: mod_base = OTHER; note = 2'-O-methyladenosine-3'-phosphate
  modified_base 15: mod_base = OTHER; note = 2'-O-methyluridine-3'-phosphate
  modified_base 16: mod_base = OTHER; note = 2'-O-methylcytidine-3'-phosphate
  modified_base 17: mod_base = OTHER; note = 2'-O-methyluridine-3'-phosphate
  modified_base 18: mod_base = OTHER; note = 2'-O-methylguanosine-3'-phosphate
  modified_base 19: mod_base = OTHER; note = 2'-O-methyluridine-3'-phosphorothioate
  modified_base 20: mod_base = OTHER; note = 2'-O-methyluridine-3'-phosphorothioate
  modified_base 21: mod_base = OTHER; note = 2'-O-methyladenosine-3'-phosphate
atctcagaaccatatctgtta

SEQ ID NO: 1369 - RNA, 21 nt, synthetic construct
  source 1..21: mol_type = other RNA
  modified_base 1: mod_base = OTHER; note = 2'-O-methyluridine-3'-phosphorothioate
  modified_base 2: mod_base = OTHER; note = 2'-O-methylguanosine-3'-phosphorothioate
  modified_base 3: mod_base = OTHER; note = 2'-O-methyladenosine-3'-phosphate
  modified_base 4: mod_base = OTHER; note = 2'-O-methyladenosine-3'-phosphate
  modified_base 5: mod_base = OTHER; note = 2'-O-methyluridine-3'-phosphate
  modified_base 6: mod_base = OTHER; note 4-amino-1-((2R,3R,4R,5R)-3-(docosyloxy)-4-hydroxy-5-(hydrox ymethyl)tetrahydrofuran-2-yl)pyrimidin-2(1H)-one
  modified_base 7: mod_base = OTHER; note = 2'-fluorouridine-3'-phosphate
  modified_base 8: mod_base = OTHER; note = 2'-O-methyladenosine-3'-phosphate
  modified_base 9: mod_base = OTHER; note = 2'-fluorouridine-3'-phosphate
  modified_base 10: mod_base = OTHER; note = 2'-fluorocytidine-3'-phosphate
  modified_base 11: mod_base = OTHER; note = 2'-fluorouridine-3'-phosphate
  modified_base 12: mod_base = OTHER; note = 2'-O-methyluridine-3'-phosphate
  modified_base 13: mod_base = OTHER; note = 2'-O-methylcytidine-3'-phosphate
  modified_base 14: mod_base = OTHER; note = 2'-O-methyladenosine-3'-phosphate
  modified_base 15: mod_base = OTHER; note = 2'-O-methyluridine-3'-phosphate
  modified_base 16: mod_base = OTHER; note = 2'-O-methyluridine-3'-phosphate
  modified_base 17: mod_base = OTHER; note = 2'-O-methyluridine-3'-phosphate
  modified_base 18: mod_base = OTHER; note = 2'-O-methyluridine-3'-phosphate
  modified_base 19: mod_base = OTHER; note = 2'-O-methyladenosine-3'-phosphorothioate
  modified_base 20: mod_base = OTHER; note = 2'-O-methylcytidine-3'-phosphorothioate
  modified_base 21: mod_base = OTHER; note = 2'-O-methyladenosine-3'-phosphate
tgaatctatcttcattttaca

SEQ ID NO: 1370 - RNA, 21 nt, synthetic construct
  source 1..21: mol_type = other RNA
  modified_base 1: mod_base = OTHER; note = 2'-O-methyladenosine-3'-phosphorothioate
  modified_base 2: mod_base = OTHER; note = 2'-O-methylcytidine-3'-phosphorothioate
  modified_base 3: mod_base = OTHER; note = 2'-O-methylcytidine-3'-phosphate
  modified_base 4: mod_base = OTHER; note = 2'-O-methyladenosine-3'-phosphate
  modified_base 5: mod_base = OTHER; note = 2'-O-methylcytidine-3'-phosphate
  modified_base 6: mod_base = OTHER; note 1-((2R,3R,4R,5R)-3-(docosyloxy)-4-hydroxy-5-(hydroxymethyl) tetrahydrofuran-2-yl)pyrimidine-2,4(1H,3H)-dione
  modified_base 7: mod_base = OTHER; note = 2'-fluoroadenosine-3'-phosphate
  modified_base 8: mod_base = OTHER; note = 2'-O-methyladenosine-3'-phosphate
  modified_base 9: mod_base = OTHER; note = 2'-fluoroadenosine-3'-phosphate
  modified_base 10: mod_base = OTHER; note = 2'-fluorocytidine-3'-phosphate
  modified_base 11: mod_base = OTHER; note = 2'-fluorouridine-3'-phosphate
  modified_base 12: mod_base = OTHER; note = 2'-O-methyluridine-3'-phosphate
  modified_base 13: mod_base = OTHER; note = 2'-O-methylguanosine-3'-phosphate
  modified_base 14: mod_base = OTHER; note = 2'-O-methyluridine-3'-phosphate
  modified_base 15: mod_base = OTHER; note = 2'-O-methyluridine-3'-phosphate
  modified_base 16: mod_base = OTHER; note = 2'-O-methylcytidine-3'-phosphate
  modified_base 17: mod_base = OTHER; note = 2'-O-methylcytidine-3'-phosphate
  modified_base 18: mod_base = OTHER; note = 2'-O-methyluridine-3'-phosphate
  modified_base 19: mod_base = OTHER; note = 2'-O-methyluridine-3'-phosphorothioate
  modified_base 20: mod_base = OTHER; note = 2'-O-methyluridine-3'-phosphorothioate
  modified_base 21: mod_base = OTHER; note = 2'-O-methyladenosine-3'-phosphate
accactaaacttgttccttta

SEQ ID NO: 1371 - RNA, 21 nt, synthetic construct
  source 1..21: mol_type = other RNA
  modified_base 1: mod_base = OTHER; note = 2'-O-methyladenosine-3'-phosphorothioate
  modified_base 2: mod_base = OTHER; note = 2'-O-methylguanosine-3'-phosphorothioate
  modified_base 3: mod_base = OTHER; note = 2'-O-methyluridine-3'-phosphate
  modified_base 4: mod_base = OTHER; note = 2'-O-methylguanosine-3'-phosphate
  modified_base 5: mod_base = OTHER; note = 2'-O-methyluridine-3'-phosphate
  modified_base 6: mod_base = OTHER; note 1-((2R,3R,4R,5R)-3-(docosyloxy)-4-hydroxy-5-(hydroxymethyl) tetrahydrofuran-2-yl)pyrimidine-2,4(1H,3H)-dione
  modified_base 7: mod_base = OTHER; note = 2'-fluorocytidine-3'-phosphate
  modified_base 8: mod_base = OTHER; note = 2'-O-methyluridine-3'-phosphate
  modified_base 9: mod_base = OTHER; note = 2'-fluorouridine-3'-phosphate
  modified_base 10: mod_base = OTHER; note = 2'-fluorouridine-3'-phosphate
  modified_base 11: mod_base = OTHER; note = 2'-fluoroadenosine-3'-phosphate
  modified_base 12: mod_base = OTHER; note = 2'-O-methylcytidine-3'-phosphate
  modified_base 13: mod_base = OTHER; note = 2'-O-methyluridine-3'-phosphate
  modified_base 14: mod_base = OTHER; note = 2'-O-methylcytidine-3'-phosphate
  modified_base 15: mod_base = OTHER; note = 2'-O-methylcytidine-3'-phosphate
  modified_base 16: mod_base = OTHER; note = 2'-O-methyluridine-3'-phosphate
  modified_base 17: mod_base = OTHER; note = 2'-O-methyluridine-3'-phosphate
  modified_base 18: mod_base = OTHER; note = 2'-O-methyladenosine-3'-phosphate
  modified_base 19: mod_base = OTHER; note = 2'-O-methylcytidine-3'-phosphorothioate
  modified_base 20: mod_base = OTHER; note = 2'-O-methyladenosine-3'-phosphorothioate
  modified_base 21: mod_base = OTHER; note = 2'-O-methyladenosine-3'-phosphate
agtgttctttactccttacaa

SEQ ID NO: 1372 - RNA, 21 nt, synthetic construct
  source 1..21: mol_type = other RNA
  modified_base 1: mod_base = OTHER; note = 2'-O-methylcytidine-3'-phosphorothioate
  modified_base 2: mod_base = OTHER; note = 2'-O-methyluridine-3'-phosphorothioate
  modified_base 3: mod_base = OTHER; note = 2'-O-methyluridine-3'-phosphate
  modified_base 4: mod_base = OTHER; note = 2'-O-methyluridine-3'-phosphate
  modified_base 5: mod_base = OTHER; note = 2'-O-methyladenosine-3'-phosphate
  modified_base 6: mod_base = OTHER; note 4-amino-1-((2R,3R,4R,5R)-3-(docosyloxy)-4-hydroxy-5-(hydrox ymethyl)tetrahydrofuran-2-yl)pyrimidin-2(1H)-one
  modified_base 7: mod_base = OTHER; note = 2'-fluorouridine-3'-phosphate
  modified_base 8: mod_base = OTHER; note = 2'-O-methylcytidine-3'-phosphate
  modified_base 9: mod_base = OTHER; note = 2'-fluorouridine-3'-phosphate
  modified_base 10: mod_base = OTHER; note = 2'-fluorouridine-3'-phosphate
  modified_base 11: mod_base = OTHER; note = 2'-fluoroadenosine-3'-phosphate
  modified_base 12: mod_base = OTHER; note = 2'-O-methyladenosine-3'-phosphate
  modified_base 13: mod_base = OTHER; note = 2'-O-methylcytidine-3'-phosphate
  modified_base 14: mod_base = OTHER; note = 2'-O-methyladenosine-3'-phosphate
  modified_base 15: mod_base = OTHER; note = 2'-O-methylguanosine-3'-phosphate
  modified_base 16: mod_base = OTHER; note = 2'-O-methylguanosine-3'-phosphate
  modified_base 17: mod_base = OTHER; note = 2'-O-methyladenosine-3'-phosphate
  modified_base 18: mod_base = OTHER; note = 2'-O-methyluridine-3'-phosphate
  modified_base 19: mod_base = OTHER; note = 2'-O-methyluridine-3'-phosphorothioate
  modified_base 20: mod_base = OTHER; note = 2'-O-methyladenosine-3'-phosphorothioate
  modified_base 21: mod_base = OTHER; note = 2'-O-methyladenosine-3'-phosphate
ctttactcttaacaggattaa

SEQ ID NO: 1373 - RNA, 21 nt, synthetic construct
  source 1..21: mol_type = other RNA
  modified_base 1: mod_base = OTHER; note = 2'-O-methyluridine-3'-phosphorothioate
  modified_base 2: mod_base = OTHER; note = 2'-O-methyladenosine-3'-phosphorothioate
  modified_base 3: mod_base = OTHER; note = 2'-O-methyluridine-3'-phosphate
  modified_base 4: mod_base = OTHER; note = 2'-O-methyladenosine-3'-phosphate
  modified_base 5: mod_base = OTHER; note = 2'-O-methylcytidine-3'-phosphate
  modified_base 6: mod_base = OTHER; note 4-amino-1-((2R,3R,4R,5R)-3-(docosyloxy)-4-hydroxy-5-(hydrox ymethyl)tetrahydrofuran-2-yl)pyrimidin-2(1H)-one
  modified_base 7: mod_base = OTHER; note = 2'-fluorouridine-3'-phosphate
  modified_base 8: mod_base = OTHER; note = 2'-O-methyladenosine-3'-phosphate
  modified_base 9: mod_base = OTHER; note = 2'-fluoroadenosine-3'-phosphate
  modified_base 10: mod_base = OTHER; note = 2'-fluoroguanosine-3'-phosphate
  modified_base 11: mod_base = OTHER; note = 2'-fluoroadenosine-3'-phosphate
  modified_base 12: mod_base = OTHER; note = 2'-O-methyladenosine-3'-phosphate
  modified_base 13: mod_base = OTHER; note = 2'-O-methylcytidine-3'-phosphate
  modified_base 14: mod_base = OTHER; note = 2'-O-methyladenosine-3'-phosphate
  modified_base 15: mod_base = OTHER; note = 2'-O-methyluridine-3'-phosphate
  modified_base 16: mod_base = OTHER; note = 2'-O-methyladenosine-3'-phosphate
  modified_base 17: mod_base = OTHER; note = 2'-O-methyluridine-3'-phosphate
  modified_base 18: mod_base = OTHER; note = 2'-O-methyluridine-3'-phosphate
  modified_base 19: mod_base = OTHER; note = 2'-O-methyladenosine-3'-phosphorothioate
  modified_base 20: mod_base = OTHER; note = 2'-O-methylcytidine-3'-phosphorothioate
  modified_base 21: mod_base = OTHER; note = 2'-O-methyladenosine-3'-phosphate
tatacctaagaacatattaca

SEQ ID NO: 1374 - RNA, 21 nt, synthetic construct
  source 1..21: mol_type = other RNA
  modified_base 1: mod_base = OTHER; note = 2'-O-methylcytidine-3'-phosphorothioate
  modified_base 2: mod_base = OTHER; note = 2'-O-methyluridine-3'-phosphorothioate
  modified_base 3: mod_base = OTHER; note = 2'-O-methyluridine-3'-phosphate
  modified_base 4: mod_base = OTHER; note = 2'-O-methylcytidine-3'-phosphate
  modified_base 5: mod_base = OTHER; note = 2'-O-methyluridine-3'-phosphate
  modified_base 6: mod_base = OTHER; note (2R,3S,4S,5R)-5-(6-amino-9H-purin-9-yl)-4-(docosyloxy)-2-(h ydroxymethyl)tetrahydrofuran-3-ol
  modified_base 7: mod_base = OTHER; note = 2'-fluorocytidine-3'-phosphate
  modified_base 8: mod_base = OTHER; note = 2'-O-methyluridine-3'-phosphate
  modified_base 9: mod_base = OTHER; note = 2'-fluoroguanosine-3'-phosphate
  modified_base 10: mod_base = OTHER; note = 2'-fluoroadenosine-3'-phosphate
  modified_base 11: mod_base = OTHER; note = 2'-fluoroguanosine-3'-phosphate
  modified_base 12: mod_base = OTHER; note = 2'-O-methyladenosine-3'-phosphate
  modified_base 13: mod_base = OTHER; note = 2'-O-methyluridine-3'-phosphate
  modified_base 14: mod_base = OTHER; note = 2'-O-methylguanosine-3'-phosphate
  modified_base 15: mod_base = OTHER; note = 2'-O-methyladenosine-3'-phosphate
  modified_base 16: mod_base = OTHER; note = 2'-O-methyluridine-3'-phosphate
  modified_base 17: mod_base = OTHER; note = 2'-O-methylcytidine-3'-phosphate
  modified_base 18: mod_base = OTHER; note = 2'-O-methylcytidine-3'-phosphate
  modified_base 19: mod_base = OTHER; note = 2'-O-methyladenosine-3'-phosphorothioate
  modified_base 20: mod_base = OTHER; note = 2'-O-methyladenosine-3'-phosphorothioate
  modified_base 21: mod_base = OTHER; note = 2'-O-methyladenosine-3'-phosphate
cttctactgagatgatccaaa

SEQ ID NO: 1375 - RNA, 21 nt, synthetic construct
  source 1..21: mol_type = other RNA
  modified_base 1: mod_base = OTHER; note = 2'-O-methylcytidine-3'-phosphorothioate
  modified_base 2: mod_base = OTHER; note = 2'-O-methyluridine-3'-phosphorothioate
  modified_base 3: mod_base = OTHER; note = 2'-O-methylguanosine-3'-phosphate
  modified_base 4: mod_base = OTHER; note = 2'-O-methyluridine-3'-phosphate
  modified_base 5: mod_base = OTHER; note = 2'-O-methyladenosine-3'-phosphate
  modified_base 6: mod_base = OTHER; note 1-((2R,3R,4R,5R)-3-(docosyloxy)-4-hydroxy-5-(hydroxymethyl) tetrahydrofuran-2-yl)pyrimidine-2,4(1H,3H)-dione
  modified_base 7: mod_base = OTHER; note = 2'-fluorouridine-3'-phosphate
  modified_base 8: mod_base = OTHER; note = 2'-O-methyluridine-3'-phosphate
  modified_base 9: mod_base = OTHER; note = 2'-fluorouridine-3'-phosphate
  modified_base 10: mod_base = OTHER; note = 2'-fluorocytidine-3'-phosphate
  modified_base 11: mod_base = OTHER; note = 2'-fluorouridine-3'-phosphate
  modified_base 12: mod_base = OTHER; note = 2'-O-methylcytidine-3'-phosphate
  modified_base 13: mod_base = OTHER; note = 2'-O-methyladenosine-3'-phosphate
  modified_base 14: mod_base = OTHER; note = 2'-O-methyluridine-3'-phosphate
  modified_base 15: mod_base = OTHER; note = 2'-O-methyladenosine-3'-phosphate
  modified_base 16: mod_base = OTHER; note = 2'-O-methylguanosine-3'-phosphate
  modified_base 17: mod_base = OTHER; note = 2'-O-methyladenosine-3'-phosphate
  modified_base 18: mod_base = OTHER; note = 2'-O-methylguanosine-3'-phosphate
  modified_base 19: mod_base = OTHER; note = 2'-O-methyluridine-3'-phosphorothioate
  modified_base 20: mod_base = OTHER; note = 2'-O-methyladenosine-3'-phosphorothioate
  modified_base 21: mod_base = OTHER; note = 2'-O-methyladenosine-3'-phosphate
ctgtattttctcatagagtaa

SEQ ID NO: 1376 - RNA, 21 nt, synthetic construct
  source 1..21: mol_type = other RNA
  modified_base 1: mod_base = OTHER; note = 2'-O-methyladenosine-3'-phosphorothioate
  modified_base 2: mod_base = OTHER; note = 2'-O-methylcytidine-3'-phosphorothioate
  modified_base 3: mod_base = OTHER; note = 2'-O-methyluridine-3'-phosphate
  modified_base 4: mod_base = OTHER; note = 2'-O-methyluridine-3'-phosphate
  modified_base 5: mod_base = OTHER; note = 2'-O-methyluridine-3'-phosphate
  modified_base 6: mod_base = OTHER; note 1-((2R,3R,4R,5R)-3-(docosyloxy)-4-hydroxy-5-(hydroxymethyl) tetrahydrofuran-2-yl)pyrimidine-2,4(1H,3H)-dione
  modified_base 7: mod_base = OTHER; note = 2'-fluorocytidine-3'-phosphate
  modified_base 8: mod_base = OTHER; note = 2'-O-methyluridine-3'-phosphate
  modified_base 9: mod_base = OTHER; note = 2'-fluorocytidine-3'-phosphate
  modified_base 10: mod_base = OTHER; note = 2'-fluorouridine-3'-phosphate
  modified_base 11: mod_base = OTHER; note = 2'-fluorouridine-3'-phosphate
  modified_base 12: mod_base = OTHER; note = 2'-O-methyluridine-3'-phosphate
  modified_base 13: mod_base = OTHER; note = 2'-O-methylcytidine-3'-phosphate
  modified_base 14: mod_base = OTHER; note = 2'-O-methyladenosine-3'-phosphate
  modified_base 15: mod_base = OTHER; note = 2'-O-methylguanosine-3'-phosphate
  modified_base 16: mod_base = OTHER; note = 2'-O-methyluridine-3'-phosphate
  modified_base 17: mod_base = OTHER; note = 2'-O-methyluridine-3'-phosphate
  modified_base 18: mod_base = OTHER; note = 2'-O-methylguanosine-3'-phosphate
  modified_base 19: mod_base = OTHER; note = 2'-O-methyluridine-3'-phosphorothioate
  modified_base 20: mod_base = OTHER; note = 2'-O-methyladenosine-3'-phosphorothioate
  modified_base 21: mod_base = OTHER; note = 2'-O-methyladenosine-3'-phosphate
acttttctctttcagttgtaa

SEQ ID NO: 1377 - RNA, 21 nt, synthetic construct
  source 1..21: mol_type = other RNA
  modified_base 1: mod_base = OTHER; note = 2'-O-methyladenosine-3'-phosphorothioate
  modified_base 2: mod_base = OTHER; note = 2'-O-methyluridine-3'-phosphorothioate
  modified_base 3: mod_base = OTHER; note = 2'-O-methyluridine-3'-phosphate
  modified_base 4: mod_base = OTHER; note = 2'-O-methyladenosine-3'-phosphate
  modified_base 5: mod_base = OTHER; note = 2'-O-methyladenosine-3'-phosphate
  modified_base 6: mod_base = OTHER; note 1-((2R,3R,4R,5R)-3-(docosyloxy)-4-hydroxy-5-(hydroxymethyl) tetrahydrofuran-2-yl)pyrimidine-2,4(1H,3H)-dione
  modified_base 7: mod_base = OTHER; note = 2'-fluorouridine-3'-phosphate
  modified_base 8: mod_base = OTHER; note = 2'-O-methyluridine-3'-phosphate
  modified_base 9: mod_base = OTHER; note = 2'-fluorocytidine-3'-phosphate
  modified_base 10: mod_base = OTHER; note = 2'-fluorouridine-3'-phosphate
  modified_base 11: mod_base = OTHER; note = 2'-fluoroadenosine-3'-phosphate
  modified_base 12: mod_base = OTHER; note = 2'-O-methylguanosine-3'-phosphate
  modified_base 13: mod_base = OTHER; note = 2'-O-methyluridine-3'-phosphate
  modified_base 14: mod_base = OTHER; note = 2'-O-methylcytidine-3'-phosphate
  modified_base 15: mod_base = OTHER; note = 2'-O-methyluridine-3'-phosphate
  modified_base 16: mod_base = OTHER; note = 2'-O-methylguanosine-3'-phosphate
  modified_base 17: mod_base = OTHER; note = 2'-O-methyluridine-3'-phosphate
  modified_base 18: mod_base = OTHER; note = 2'-O-methylguanosine-3'-phosphate
  modified_base 19: mod_base = OTHER; note = 2'-O-methyladenosine-3'-phosphorothioate
  modified_base 20: mod_base = OTHER; note = 2'-O-methyladenosine-3'-phosphorothioate
  modified_base 21: mod_base = OTHER; note = 2'-O-methyladenosine-3'-phosphate
attaatttctagtctgtgaaa

SEQ ID NO: 1378 - RNA, 21 nt, synthetic construct
  source 1..21: mol_type = other RNA
  modified_base 1: mod_base = OTHER; note = 2'-O-methylcytidine-3'-phosphorothioate
  modified_base 2: mod_base = OTHER; note = 2'-O-methyluridine-3'-phosphorothioate
  modified_base 3: mod_base = OTHER; note = 2'-O-methylcytidine-3'-phosphate
  modified_base 4: mod_base = OTHER; note = 2'-O-methyluridine-3'-phosphate
  modified_base 5: mod_base = OTHER; note = 2'-O-methylguanosine-3'-phosphate
  modified_base 6: mod_base = OTHER; note 1-((2R,3R,4R,5R)-3-(docosyloxy)-4-hydroxy-5-(hydroxymethyl) tetrahydrofuran-2-yl)pyrimidine-2,4(1H,3H)-dione
  modified_base 7: mod_base = OTHER; note = 2'-fluoroadenosine-3'-phosphate
  modified_base 8: mod_base = OTHER; note = 2'-O-methyluridine-3'-phosphate
  modified_base 9: mod_base = OTHER; note = 2'-fluoroadenosine-3'-phosphate
  modified_base 10: mod_base = OTHER; note = 2'-fluoroadenosine-3'-phosphate
  modified_base 11: mod_base = OTHER; note = 2'-fluoroguanosine-3'-phosphate
  modified_base 12: mod_base = OTHER; note = 2'-O-methyladenosine-3'-phosphate
  modified_base 13: mod_base = OTHER; note = 2'-O-methylguanosine-3'-phosphate
  modified_base 14: mod_base = OTHER; note = 2'-O-methylguanosine-3'-phosphate
  modified_base 15: mod_base = OTHER; note = 2'-O-methyluridine-3'-phosphate
  modified_base 16: mod_base = OTHER; note = 2'-O-methyluridine-3'-phosphate
  modified_base 17: mod_base = OTHER; note = 2'-O-methyluridine-3'-phosphate
  modified_base 18: mod_base = OTHER; note = 2'-O-methylcytidine-3'-phosphate
  modified_base 19: mod_base = OTHER; note = 2'-O-methyladenosine-3'-phosphorothioate
  modified_base 20: mod_base = OTHER; note = 2'-O-methylcytidine-3'-phosphorothioate
  modified_base 21: mod_base = OTHER; note = 2'-O-methyladenosine-3'-phosphate
ctctgtataagaggtttcaca

SEQ ID NO: 1379 - RNA, 21 nt, synthetic construct
  source 1..21: mol_type = other RNA
  modified_base 1: mod_base = OTHER; note = 2'-O-methylguanosine-3'-phosphorothioate
  modified_base 2: mod_base = OTHER; note = 2'-O-methyladenosine-3'-phosphorothioate
  modified_base 3: mod_base = OTHER; note = 2'-O-methylcytidine-3'-phosphate
  modified_base 4: mod_base = OTHER; note = 2'-O-methyluridine-3'-phosphate
  modified_base 5: mod_base = OTHER; note = 2'-O-methyluridine-3'-phosphate
  modified_base 6: mod_base = OTHER; note 1-((2R,3R,4R,5R)-3-(docosyloxy)-4-hydroxy-5-(hydroxymethyl) tetrahydrofuran-2-yl)pyrimidine-2,4(1H,3H)-dione
  modified_base 7: mod_base = OTHER; note = 2'-fluorocytidine-3'-phosphate
  modified_base 8: mod_base = OTHER; note = 2'-O-methyladenosine-3'-phosphate
  modified_base 9: mod_base = OTHER; note = 2'-fluoroadenosine-3'-phosphate
  modified_base 10: mod_base = OTHER; note = 2'-fluoroadenosine-3'-phosphate
  modified_base 11: mod_base = OTHER; note = 2'-fluoroguanosine-3'-phosphate
  modified_base 12: mod_base = OTHER; note = 2'-O-methyluridine-3'-phosphate
  modified_base 13: mod_base = OTHER; note = 2'-O-methyladenosine-3'-phosphate
  modified_base 14: mod_base = OTHER; note = 2'-O-methylcytidine-3'-phosphate
  modified_base 15: mod_base = OTHER; note = 2'-O-methyluridine-3'-phosphate
  modified_base 16: mod_base = OTHER; note = 2'-O-methyladenosine-3'-phosphate
  modified_base 17: mod_base = OTHER; note = 2'-O-methyladenosine-3'-phosphate
  modified_base 18: mod_base = OTHER; note = 2'-O-methyluridine-3'-phosphate
  modified_base 19: mod_base = OTHER; note = 2'-O-methyladenosine-3'-phosphorothioate
  modified_base 20: mod_base = OTHER; note = 2'-O-methylcytidine-3'-phosphorothioate
  modified_base 21: mod_base = OTHER; note = 2'-O-methyladenosine-3'-phosphate
gactttcaaagtactaataca

SEQ ID NO: 1380 - RNA, 21 nt, synthetic construct
  source 1..21: mol_type = other RNA
  modified_base 1: mod_base = OTHER; note = 2'-O-methyluridine-3'-phosphorothioate
  modified_base 2: mod_base = OTHER; note = 2'-O-methyluridine-3'-phosphorothioate
  modified_base 3: mod_base = OTHER; note = 2'-O-methyluridine-3'-phosphate
  modified_base 4: mod_base = OTHER; note = 2'-O-methylguanosine-3'-phosphate
  modified_base 5: mod_base = OTHER; note = 2'-O-methylcytidine-3'-phosphate
  modified_base 6: mod_base = OTHER; note 4-amino-1-((2R,3R,4R,5R)-3-(docosyloxy)-4-hydroxy-5-(hydrox ymethyl)tetrahydrofuran-2-yl)pyrimidin-2(1H)-one
  modified_base 7: mod_base = OTHER; note = 2'-fluoroadenosine-3'-phosphate
  modified_base 8: mod_base = OTHER; note = 2'-O-methyluridine-3'-phosphate
  modified_base 9: mod_base = OTHER; note = 2'-fluorouridine-3'-phosphate
  modified_base 10: mod_base = OTHER; note = 2'-fluoroadenosine-3'-phosphate
  modified_base 11: mod_base = OTHER; note = 2'-fluorouridine-3'-phosphate
  modified_base 12: mod_base = OTHER; note = 2'-O-methyladenosine-3'-phosphate
  modified_base 13: mod_base = OTHER; note = 2'-O-methylcytidine-3'-phosphate
  modified_base 14: mod_base = OTHER; note = 2'-O-methyladenosine-3'-phosphate
  modified_base 15: mod_base = OTHER; note = 2'-O-methyladenosine-3'-phosphate
  modified_base 16: mod_base = OTHER; note = 2'-O-methyladenosine-3'-phosphate
  modified_base 17: mod_base = OTHER; note = 2'-O-methylguanosine-3'-phosphate
  modified_base 18: mod_base = OTHER; note = 2'-O-methyluridine-3'-phosphate
  modified_base 19: mod_base = OTHER; note = 2'-O-methyluridine-3'-phosphorothioate
  modified_base 20: mod_base = OTHER; note = 2'-O-methyluridine-3'-phosphorothioate
  modified_base 21: mod_base = OTHER; note = 2'-O-methyladenosine-3'-phosphate
tttgccattatacaaagttta

SEQ ID NO: 1381 - RNA, 21 nt, synthetic construct
  source 1..21: mol_type = other RNA
  modified_base 1: mod_base = OTHER; note = 2'-O-methylguanosine-3'-phosphorothioate
  modified_base 2: mod_base = OTHER; note = 2'-O-methyladenosine-3'-phosphorothioate
  modified_base 3: mod_base = OTHER; note = 2'-O-methyladenosine-3'-phosphate
  modified_base 4: mod_base = OTHER; note = 2'-O-methylcytidine-3'-phosphate
  modified_base 5: mod_base = OTHER; note = 2'-O-methyladenosine-3'-phosphate
  modified_base 6: mod_base = OTHER; note 4-amino-1-((2R,3R,4R,5R)-3-(docosyloxy)-4-hydroxy-5-(hydrox ymethyl)tetrahydrofuran-2-yl)pyrimidin-2(1H)-one
  modified_base 7: mod_base = OTHER; note = 2'-fluorouridine-3'-phosphate
  modified_base 8: mod_base = OTHER; note = 2'-O-methyladenosine-3'-phosphate
  modified_base 9: mod_base = OTHER; note = 2'-fluorouridine-3'-phosphate
  modified_base 10: mod_base = OTHER; note = 2'-fluorocytidine-3'-phosphate
  modified_base 11: mod_base = OTHER; note = 2'-fluoroguanosine-3'-phosphate
  modified_base 12: mod_base = OTHER; note = 2'-O-methyladenosine-3'-phosphate
  modified_base 13: mod_base = OTHER; note = 2'-O-methylcytidine-3'-phosphate
  modified_base 14: mod_base = OTHER; note = 2'-O-methyladenosine-3'-phosphate
  modified_base 15: mod_base = OTHER; note = 2'-O-methyluridine-3'-phosphate
  modified_base 16: mod_base = OTHER; note = 2'-O-methyladenosine-3'-phosphate
  modified_base 17: mod_base = OTHER; note = 2'-O-methylcytidine-3'-phosphate
  modified_base 18: mod_base = OTHER; note = 2'-O-methylcytidine-3'-phosphate
  modified_base 19: mod_base = OTHER; note = 2'-O-methyluridine-3'-phosphorothioate
  modified_base 20: mod_base = OTHER; note = 2'-O-methylcytidine-3'-phosphorothioate
  modified_base 21: mod_base = OTHER; note = 2'-O-methyladenosine-3'-phosphate
gaacactatcgacatacctca

SEQ ID NO: 1382 - RNA, 21 nt, synthetic construct
  source 1..21: mol_type = other RNA
  modified_base 1: mod_base = OTHER; note = 2'-O-methyluridine-3'-phosphorothioate
  modified_base 2: mod_base = OTHER; note = 2'-O-methyladenosine-3'-phosphorothioate
  modified_base 3: mod_base = OTHER; note = 2'-O-methylguanosine-3'-phosphate
  modified_base 4: mod_base = OTHER; note = 2'-O-methyladenosine-3'-phosphate
  modified_base 5: mod_base = OTHER; note = 2'-O-methyladenosine-3'-phosphate
  modified_base 6: mod_base = OTHER; note 1-((2R,3R,4R,5R)-3-(docosyloxy)-4-hydroxy-5-(hydroxymethyl) tetrahydrofuran-2-yl)pyrimidine-2,4(1H,3H)-dione
  modified_base 7: mod_base = OTHER; note = 2'-fluoroguanosine-3'-phosphate
  modified_base 8: mod_base = OTHER; note = 2'-O-methyladenosine-3'-phosphate
  modified_base 9: mod_base = OTHER; note = 2'-fluorocytidine-3'-phosphate
  modified_base 10: mod_base = OTHER; note = 2'-fluoroadenosine-3'-phosphate
  modified_base 11: mod_base = OTHER; note = 2'-fluorouridine-3'-phosphate
  modified_base 12: mod_base = OTHER; note = 2'-O-methyluridine-3'-phosphate
  modified_base 13: mod_base = OTHER; note = 2'-O-methyluridine-3'-phosphate
  modified_base 14: mod_base = OTHER; note = 2'-O-methyladenosine-3'-phosphate
  modified_base 15: mod_base = OTHER; note = 2'-O-methylcytidine-3'-phosphate
  modified_base 16: mod_base = OTHER; note = 2'-O-methyluridine-3'-phosphate
  modified_base 17: mod_base = OTHER; note = 2'-O-methyladenosine-3'-phosphate
  modified_base 18: mod_base = OTHER; note = 2'-O-methyladenosine-3'-phosphate
  modified_base 19: mod_base = OTHER; note = 2'-O-methyluridine-3'-phosphorothioate
  modified_base 20: mod_base = OTHER; note = 2'-O-methyladenosine-3'-phosphorothioate
  modified_base 21: mod_base = OTHER; note = 2'-O-methyladenosine-3'-phosphate
tagaatgacatttactaataa

SEQ ID NO: 1383 - RNA, 21 nt, synthetic construct
  source 1..21: mol_type = other RNA
  modified_base 1: mod_base = OTHER; note = 2'-O-methyladenosine-3'-phosphorothioate
  modified_base 2: mod_base = OTHER; note = 2'-O-methyladenosine-3'-phosphorothioate
  modified_base 3: mod_base = OTHER; note = 2'-O-methylguanosine-3'-phosphate
  modified_base 4: mod_base = OTHER; note = 2'-O-methylcytidine-3'-phosphate
  modified_base 5: mod_base = OTHER; note = 2'-O-methyluridine-3'-phosphate
  modified_base 6: mod_base = OTHER; note (2R,3S,4S,5R)-5-(6-amino-9H-purin-9-yl)-4-(docosyloxy)-2-(h ydroxymethyl)tetrahydrofuran-3-ol
  modified_base 7: mod_base = OTHER; note = 2'-fluorocytidine-3'-phosphate
  modified_base 8: mod_base = OTHER; note = 2'-O-methyluridine-3'-phosphate
  modified_base 9: mod_base = OTHER; note = 2'-fluorouridine-3'-phosphate
  modified_base 10: mod_base = OTHER; note = 2'-fluoroadenosine-3'-phosphate
  modified_base 11: mod_base = OTHER; note = 2'-fluoroguanosine-3'-phosphate
  modified_base 12: mod_base = OTHER; note = 2'-O-methyladenosine-3'-phosphate
  modified_base 13: mod_base = OTHER; note = 2'-O-methyladenosine-3'-phosphate
  modified_base 14: mod_base = OTHER; note = 2'-O-methyladenosine-3'-phosphate
  modified_base 15: mod_base = OTHER; note = 2'-O-methyluridine-3'-phosphate
  modified_base 16: mod_base = OTHER; note = 2'-O-methylguanosine-3'-phosphate
  modified_base 17: mod_base = OTHER; note = 2'-O-methyluridine-3'-phosphate
  modified_base 18: mod_base = OTHER; note = 2'-O-methyluridine-3'-phosphate
  modified_base 19: mod_base = OTHER; note = 2'-O-methyluridine-3'-phosphorothioate
  modified_base 20: mod_base = OTHER; note = 2'-O-methyladenosine-3'-phosphorothioate
  modified_base 21: mod_base = OTHER; note = 2'-O-methyladenosine-3'-phosphate
aagctacttagaaatgtttaa

SEQ ID NO: 1384 - RNA, 21 nt, synthetic construct
  source 1..21: mol_type = other RNA
  modified_base 1: mod_base = OTHER; note = 2'-O-methylcytidine-3'-phosphorothioate
  modified_base 2: mod_base = OTHER; note = 2'-O-methylcytidine-3'-phosphorothioate
  modified_base 3: mod_base = OTHER; note = 2'-O-methyluridine-3'-phosphate
  modified_base 4: mod_base = OTHER; note = 2'-O-methyluridine-3'-phosphate
  modified_base 5: mod_base = OTHER; note = 2'-O-methyladenosine-3'-phosphate
  modified_base 6: mod_base = OTHER; note 2-amino-9-((2R,3S,4S,5R)-3-(docosyloxy)-4-hydroxy-5-(hydrox ymethyl)tetrahydrofuran-2-yl)-1,9-dihydro-6H-purin-6-one
  modified_base 7: mod_base = OTHER; note = 2'-fluorouridine-3'-phosphate
  modified_base 8: mod_base = OTHER; note = 2'-O-methyladenosine-3'-phosphate
  modified_base 9: mod_base = OTHER; note = 2'-fluorocytidine-3'-phosphate
  modified_base 10: mod_base = OTHER; note = 2'-fluorouridine-3'-phosphate
  modified_base 11: mod_base = OTHER; note = 2'-fluorocytidine-3'-phosphate
  modified_base 12: mod_base = OTHER; note = 2'-O-methyluridine-3'-phosphate
  modified_base 13: mod_base = OTHER; note = 2'-O-methylcytidine-3'-phosphate
  modified_base 14: mod_base = OTHER; note = 2'-O-methyladenosine-3'-phosphate
  modified_base 15: mod_base = OTHER; note = 2'-O-methylguanosine-3'-phosphate
  modified_base 16: mod_base = OTHER; note = 2'-O-methyladenosine-3'-phosphate
  modified_base 17: mod_base = OTHER; note = 2'-O-methylguanosine-3'-phosphate
  modified_base 18: mod_base = OTHER; note = 2'-O-methyladenosine-3'-phosphate
  modified_base 19: mod_base = OTHER; note = 2'-O-methyluridine-3'-phosphorothioate
  modified_base 20: mod_base = OTHER; note = 2'-O-methyluridine-3'-phosphorothioate
  modified_base 21: mod_base = OTHER; note = 2'-O-methyladenosine-3'-phosphate
ccttagtactctcagagatta

SEQ ID NO: 1385 - RNA, 21 nt, synthetic construct
  source 1..21: mol_type = other RNA
  modified_base 1: mod_base = OTHER; note = 2'-O-methyluridine-3'-phosphorothioate
  modified_base 2: mod_base = OTHER; note = 2'-O-methylguanosine-3'-phosphorothioate
  modified_base 3: mod_base = OTHER; note = 2'-O-methyladenosine-3'-phosphate
  modified_base 4: mod_base = OTHER; note = 2'-O-methyladenosine-3'-phosphate
  modified_base 5: mod_base = OTHER; note = 2'-O-methyluridine-3'-phosphate
  modified_base 6: mod_base = OTHER; note 2-amino-9-((2R,3S,4S,5R)-3-(docosyloxy)-4-hydroxy-5-(hydrox ymethyl)tetrahydrofuran-2-yl)-1,9-dihydro-6H-purin-6-one
  modified_base 7: mod_base = OTHER; note = 2'-fluorocytidine-3'-phosphate
  modified_base 8: mod_base = OTHER; note = 2'-O-methyladenosine-3'-phosphate
  modified_base 9: mod_base = OTHER; note = 2'-fluorocytidine-3'-phosphate
  modified_base 10: mod_base = OTHER; note = 2'-fluoroadenosine-3'-phosphate
  modified_base 11: mod_base = OTHER; note = 2'-fluorocytidine-3'-phosphate
  modified_base 12: mod_base = OTHER; note = 2'-O-methyluridine-3'-phosphate
  modified_base 13: mod_base = OTHER; note = 2'-O-methyladenosine-3'-phosphate
  modified_base 14: mod_base = OTHER; note = 2'-O-methyladenosine-3'-phosphate
  modified_base 15: mod_base = OTHER; note = 2'-O-methylcytidine-3'-phosphate
  modified_base 16: mod_base = OTHER; note = 2'-O-methylguanosine-3'-phosphate
  modified_base 17: mod_base = OTHER; note = 2'-O-methyluridine-3'-phosphate
  modified_base 18: mod_base = OTHER; note = 2'-O-methyladenosine-3'-phosphate
  modified_base 19: mod_base = OTHER; note = 2'-O-methyladenosine-3'-phosphorothioate
  modified_base 20: mod_base = OTHER; note = 2'-O-methyluridine-3'-phosphorothioate
  modified_base 21: mod_base = OTHER; note = 2'-O-methyladenosine-3'-phosphate
tgaatgcacactaacgtaata

SEQ ID NO: 1386 - RNA, 21 nt, synthetic construct
  source 1..21: mol_type = other RNA
  modified_base 1: mod_base = OTHER; note = 2'-O-methyladenosine-3'-phosphorothioate
  modified_base 2: mod_base = OTHER; note = 2'-O-methyladenosine-3'-phosphorothioate
  modified_base 3: mod_base = OTHER; note = 2'-O-methylguanosine-3'-phosphate
  modified_base 4: mod_base = OTHER; note = 2'-O-methylcytidine-3'-phosphate
  modified_base 5: mod_base = OTHER; note = 2'-O-methylcytidine-3'-phosphate
  modified_base 6: mod_base = OTHER; note 1-((2R,3R,4R,5R)-3-(docosyloxy)-4-hydroxy-5-(hydroxymethyl) tetrahydrofuran-2-yl)pyrimidine-2,4(1H,3H)-dione
  modified_base 7: mod_base = OTHER; note = 2'-fluoroadenosine-3'-phosphate
  modified_base 8: mod_base = OTHER; note = 2'-O-methyladenosine-3'-phosphate
  modified_base 9: mod_base = OTHER; note = 2'-fluorouridine-3'-phosphate
  modified_base 10: mod_base = OTHER; note = 2'-fluoroguanosine-3'-phosphate
  modified_base 11: mod_base = OTHER; note = 2'-fluoroadenosine-3'-phosphate
  modified_base 12: mod_base = OTHER; note = 2'-O-methyluridine-3'-phosphate
  modified_base 13: mod_base = OTHER; note = 2'-O-methylguanosine-3'-phosphate
  modified_base 14: mod_base = OTHER; note = 2'-O-methyladenosine-3'-phosphate
  modified_base 15: mod_base = OTHER; note = 2'-O-methyluridine-3'-phosphate
  modified_base 16: mod_base = OTHER; note = 2'-O-methyladenosine-3'-phosphate
  modified_base 17: mod_base = OTHER; note = 2'-O-methyladenosine-3'-phosphate
  modified_base 18: mod_base = OTHER; note = 2'-O-methyluridine-3'-phosphate
  modified_base 19: mod_base = OTHER; note = 2'-O-methyluridine-3'-phosphorothioate
  modified_base 20: mod_base = OTHER; note = 2'-O-methyladenosine-3'-phosphorothioate
  modified_base 21: mod_base = OTHER; note = 2'-O-methyladenosine-3'-phosphate
aagcctaatgatgataattaa

SEQ ID NO: 1387 - RNA, 21 nt, synthetic construct
  source 1..21: mol_type = other RNA
  modified_base 1: mod_base = OTHER; note = 2'-O-methyladenosine-3'-phosphorothioate
  modified_base 2: mod_base = OTHER; note = 2'-O-methyladenosine-3'-phosphorothioate
  modified_base 3: mod_base = OTHER; note = 2'-O-methyladenosine-3'-phosphate
  modified_base 4: mod_base = OTHER; note = 2'-O-methylcytidine-3'-phosphate
  modified_base 5: mod_base = OTHER; note = 2'-O-methyluridine-3'-phosphate
  modified_base 6: mod_base = OTHER; note 1-((2R,3R,4R,5R)-3-(docosyloxy)-4-hydroxy-5-(hydroxymethyl) tetrahydrofuran-2-yl)pyrimidine-2,4(1H,3H)-dione
  modified_base 7: mod_base = OTHER; note = 2'-fluorouridine-3'-phosphate
  modified_base 8: mod_base = OTHER; note = 2'-O-methyluridine-3'-phosphate
  modified_base 9: mod_base = OTHER; note = 2'-fluorouridine-3'-phosphate
  modified_base 10: mod_base = OTHER; note = 2'-fluoroadenosine-3'-phosphate
  modified_base 11: mod_base = OTHER; note = 2'-fluorocytidine-3'-phosphate
  modified_base 12: mod_base = OTHER; note = 2'-O-methyluridine-3'-phosphate
  modified_base 13: mod_base = OTHER; note = 2'-O-methyladenosine-3'-phosphate
  modified_base 14: mod_base = OTHER; note = 2'-O-methyluridine-3'-phosphate
  modified_base 15: mod_base = OTHER; note = 2'-O-methylcytidine-3'-phosphate
  modified_base 16: mod_base = OTHER; note = 2'-O-methylcytidine-3'-phosphate
  modified_base 17: mod_base = OTHER; note = 2'-O-methylcytidine-3'-phosphate
  modified_base 18: mod_base = OTHER; note = 2'-O-methyladenosine-3'-phosphate
  modified_base 19: mod_base = OTHER; note = 2'-O-methyluridine-3'-phosphorothioate
  modified_base 20: mod_base = OTHER; note = 2'-O-methyladenosine-3'-phosphorothioate
  modified_base 21: mod_base = OTHER; note = 2'-O-methyladenosine-3'-phosphate
aaactttttactatcccataa

SEQ ID NO: 1388 - RNA, 21 nt, synthetic construct
  source 1..21: mol_type = other RNA
  modified_base 1: mod_base = OTHER; note = 2'-O-methylcytidine-3'-phosphorothioate
  modified_base 2: mod_base = OTHER; note = 2'-O-methyluridine-3'-phosphorothioate
  modified_base 3: mod_base = OTHER; note = 2'-O-methyladenosine-3'-phosphate
  modified_base 4: mod_base = OTHER; note = 2'-O-methylguanosine-3'-phosphate
  modified_base 5: mod_base = OTHER; note = 2'-O-methylcytidine-3'-phosphate
  modified_base 6: mod_base = OTHER; note 1-((2R,3R,4R,5R)-3-(docosyloxy)-4-hydroxy-5-(hydroxymethyl) tetrahydrofuran-2-yl)pyrimidine-2,4(1H,3H)-dione
  modified_base 7: mod_base = OTHER; note = 2'-fluoroguanosine-3'-phosphate
  modified_base 8: mod_base = OTHER; note = 2'-O-methyladenosine-3'-phosphate
  modified_base 9: mod_base = OTHER; note = 2'-fluorouridine-3'-phosphate
  modified_base 10: mod_base = OTHER; note = 2'-fluoroadenosine-3'-phosphate
  modified_base 11: mod_base = OTHER; note = 2'-fluorocytidine-3'-phosphate
  modified_base 12: mod_base = OTHER; note = 2'-O-methyluridine-3'-phosphate
  modified_base 13: mod_base = OTHER; note = 2'-O-methylcytidine-3'-phosphate
  modified_base 14: mod_base = OTHER; note = 2'-O-methyluridine-3'-phosphate
  modified_base 15: mod_base = OTHER; note = 2'-O-methyluridine-3'-phosphate
  modified_base 16: mod_base = OTHER; note = 2'-O-methyladenosine-3'-phosphate
  modified_base 17: mod_base = OTHER; note = 2'-O-methyladenosine-3'-phosphate
  modified_base 18: mod_base = OTHER; note = 2'-O-methylguanosine-3'-phosphate
  modified_base 19: mod_base = OTHER; note = 2'-O-methyluridine-3'-phosphorothioate
  modified_base 20: mod_base = OTHER; note = 2'-O-methyladenosine-3'-phosphorothioate
  modified_base 21: mod_base = OTHER; note = 2'-O-methyladenosine-3'-phosphate
ctagctgatactcttaagtaa

SEQ ID NO: 1389 - RNA, 21 nt, synthetic construct
  source 1..21: mol_type = other RNA
  modified_base 1: mod_base = OTHER; note = 2'-O-methyladenosine-3'-phosphorothioate
  modified_base 2: mod_base = OTHER; note = 2'-O-methylguanosine-3'-phosphorothioate
  modified_base 3: mod_base = OTHER; note = 2'-O-methylcytidine-3'-phosphate
  modified_base 4: mod_base = OTHER; note = 2'-O-methyladenosine-3'-phosphate
  modified_base 5: mod_base = OTHER; note = 2'-O-methyluridine-3'-phosphate
  modified_base 6: mod_base = OTHER; note 2-amino-9-((2R,3S,4S,5R)-3-(docosyloxy)-4-hydroxy-5-(hydrox ymethyl)tetrahydrofuran-2-yl)-1,9-dihydro-6H-purin-6-one
  modified_base 7: mod_base = OTHER; note = 2'-fluoroadenosine-3'-phosphate
  modified_base 8: mod_base = OTHER; note = 2'-O-methyladenosine-3'-phosphate
  modified_base 9: mod_base = OTHER; note = 2'-fluoroadenosine-3'-phosphate
  modified_base 10: mod_base = OTHER; note = 2'-fluoroadenosine-3'-phosphate
  modified_base 11: mod_base = OTHER; note = 2'-fluoroguanosine-3'-phosphate
  modified_base 12: mod_base = OTHER; note = 2'-O-methyladenosine-3'-phosphate
  modified_base 13: mod_base = OTHER; note = 2'-O-methyluridine-3'-phosphate
  modified_base 14: mod_base = OTHER; note = 2'-O-methyladenosine-3'-phosphate
  modified_base 15: mod_base = OTHER; note = 2'-O-methyladenosine-3'-phosphate
  modified_base 16: mod_base = OTHER; note = 2'-O-methylcytidine-3'-phosphate
  modified_base 17: mod_base = OTHER; note = 2'-O-methyluridine-3'-phosphate
  modified_base 18: mod_base = OTHER; note = 2'-O-methylcytidine-3'-phosphate
  modified_base 19: mod_base = OTHER; note = 2'-O-methyluridine-3'-phosphorothioate
  modified_base 20: mod_base = OTHER; note = 2'-O-methyladenosine-3'-phosphorothioate
  modified_base 21: mod_base = OTHER; note = 2'-O-methyladenosine-3'-phosphate
agcatgaaaagataactctaa

SEQ ID NO: 1390 - RNA, 21 nt, synthetic construct
  source 1..21: mol_type = other RNA
  modified_base 1: mod_base = OTHER; note = 2'-O-methyluridine-3'-phosphorothioate
  modified_base 2: mod_base = OTHER; note = 2'-O-methyladenosine-3'-phosphorothioate
  modified_base 3: mod_base = OTHER; note = 2'-O-methyladenosine-3'-phosphate
  modified_base 4: mod_base = OTHER; note = 2'-O-methylguanosine-3'-phosphate
  modified_base 5: mod_base = OTHER; note = 2'-O-methylcytidine-3'-phosphate
  modified_base 6: mod_base = OTHER; note 4-amino-1-((2R,3R,4R,5R)-3-(docosyloxy)-4-hydroxy-5-(hydrox ymethyl)tetrahydrofuran-2-yl)pyrimidin-2(1H)-one
  modified_base 7: mod_base = OTHER; note = 2'-fluoroadenosine-3'-phosphate
  modified_base 8: mod_base = OTHER; note = 2'-O-methyluridine-3'-phosphate
  modified_base 9: mod_base = OTHER; note = 2'-fluorouridine-3'-phosphate
  modified_base 10: mod_base = OTHER; note = 2'-fluoroadenosine-3'-phosphate
  modified_base 11: mod_base = OTHER; note = 2'-fluorouridine-3'-phosphate
  modified_base 12: mod_base = OTHER; note = 2'-O-methylguanosine-3'-phosphate
  modified_base 13: mod_base = OTHER; note = 2'-O-methylcytidine-3'-phosphate
  modified_base 14: mod_base = OTHER; note = 2'-O-methyluridine-3'-phosphate
  modified_base 15: mod_base = OTHER; note = 2'-O-methyladenosine-3'-phosphate
  modified_base 16: mod_base = OTHER; note = 2'-O-methyluridine-3'-phosphate
  modified_base 17: mod_base = OTHER; note = 2'-O-methyluridine-3'-phosphate
  modified_base 18: mod_base = OTHER; note = 2'-O-methyladenosine-3'-phosphate
  modified_base 19: mod_base = OTHER; note = 2'-O-methylguanosine-3'-phosphorothioate
  modified_base 20: mod_base = OTHER; note = 2'-O-methyluridine-3'-phosphorothioate
  modified_base 21: mod_base = OTHER; note = 2'-O-methyladenosine-3'-phosphate
taagccattatgctattagta

SEQ ID NO: 1391 - RNA, 21 nt, synthetic construct
  source 1..21: mol_type = other RNA
  modified_base 1: mod_base = OTHER; note = 2'-O-methyluridine-3'-phosphorothioate
  modified_base 2: mod_base = OTHER; note = 2'-O-methylcytidine-3'-phosphorothioate
  modified_base 3: mod_base = OTHER; note = 2'-O-methyluridine-3'-phosphate
  modified_base 4: mod_base = OTHER; note = 2'-O-methyladenosine-3'-phosphate
  modified_base 5: mod_base = OTHER; note = 2'-O-methylguanosine-3'-phosphate
  modified_base 6: mod_base = OTHER; note 4-amino-1-((2R,3R,4R,5R)-3-(docosyloxy)-4-hydroxy-5-(hydrox ymethyl)tetrahydrofuran-2-yl)pyrimidin-2(1H)-one
  modified_base 7: mod_base = OTHER; note = 2'-fluorouridine-3'-phosphate
  modified_base 8: mod_base = OTHER; note = 2'-O-methyluridine-3'-phosphate
  modified_base 9: mod_base = OTHER; note = 2'-fluorouridine-3'-phosphate
  modified_base 10: mod_base = OTHER; note = 2'-fluorouridine-3'-phosphate
  modified_base 11: mod_base = OTHER; note = 2'-fluoroadenosine-3'-phosphate
  modified_base 12: mod_base = OTHER; note = 2'-O-methylguanosine-3'-phosphate
  modified_base 13: mod_base = OTHER; note = 2'-O-methylcytidine-3'-phosphate
  modified_base 14: mod_base = OTHER; note = 2'-O-methyluridine-3'-phosphate
  modified_base 15: mod_base = OTHER; note = 2'-O-methyladenosine-3'-phosphate
  modified_base 16: mod_base = OTHER; note = 2'-O-methyladenosine-3'-phosphate
  modified_base 17: mod_base = OTHER; note = 2'-O-methylcytidine-3'-phosphate
  modified_base 18: mod_base = OTHER; note = 2'-O-methyladenosine-3'-phosphate
  modified_base 19: mod_base = OTHER; note = 2'-O-methyluridine-3'-phosphorothioate
  modified_base 20: mod_base = OTHER; note = 2'-O-methyladenosine-3'-phosphorothioate
  modified_base 21: mod_base = OTHER; note = 2'-O-methyladenosine-3'-phosphate
tctagcttttagctaacataa

SEQ ID NO: 1392 - RNA, 21 nt, synthetic construct
  source 1..21: mol_type = other RNA
  modified_base 1: mod_base = OTHER; note = 2'-O-methylguanosine-3'-phosphorothioate
  modified_base 2: mod_base = OTHER; note = 2'-O-methyluridine-3'-phosphorothioate
  modified_base 3: mod_base = OTHER; note = 2'-O-methylguanosine-3'-phosphate
  modified_base 4: mod_base = OTHER; note = 2'-O-methyluridine-3'-phosphate
  modified_base 5: mod_base = OTHER; note = 2'-O-methylguanosine-3'-phosphate
  modified_base 6: mod_base = OTHER; note (2R,3S,4S,5R)-5-(6-amino-9H-purin-9-yl)-4-(docosyloxy)-2-(h ydroxymethyl)tetrahydrofuran-3-ol
  modified_base 7: mod_base = OTHER; note = 2'-fluorouridine-3'-phosphate
  modified_base 8: mod_base = OTHER; note = 2'-O-methyluridine-3'-phosphate
  modified_base 9: mod_base = OTHER; note = 2'-fluorocytidine-3'-phosphate
  modified_base 10: mod_base = OTHER; note = 2'-fluorouridine-3'-phosphate
  modified_base 11: mod_base = OTHER; note = 2'-fluorouridine-3'-phosphate
  modified_base 12: mod_base = OTHER; note = 2'-O-methylcytidine-3'-phosphate
  modified_base 13: mod_base = OTHER; note = 2'-O-methyladenosine-3'-phosphate
  modified_base 14: mod_base = OTHER; note = 2'-O-methyladenosine-3'-phosphate
  modified_base 15: mod_base = OTHER; note = 2'-O-methyladenosine-3'-phosphate
  modified_base 16: mod_base = OTHER; note = 2'-O-methylcytidine-3'-phosphate
  modified_base 17: mod_base = OTHER; note = 2'-O-methyluridine-3'-phosphate
  modified_base 18: mod_base = OTHER; note = 2'-O-methyluridine-3'-phosphate
  modified_base 19: mod_base = OTHER; note = 2'-O-methylcytidine-3'-phosphorothioate
  modified_base 20: mod_base = OTHER; note = 2'-O-methyladenosine-3'-phosphorothioate
  modified_base 21: mod_base = OTHER; note = 2'-O-methyladenosine-3'-phosphate
gtgtgattcttcaaacttcaa

SEQ ID NO: 1393 - RNA, 21 nt, synthetic construct
  source 1..21: mol_type = other RNA
  modified_base 1: mod_base = OTHER; note = 2'-O-methyluridine-3'-phosphorothioate
  modified_base 2: mod_base = OTHER; note = 2'-O-methylcytidine-3'-phosphorothioate
  modified_base 3: mod_base = OTHER; note = 2'-O-methyluridine-3'-phosphate
  modified_base 4: mod_base = OTHER; note = 2'-O-methylcytidine-3'-phosphate
  modified_base 5: mod_base = OTHER; note = 2'-O-methylcytidine-3'-phosphate
  modified_base 6: mod_base = OTHER; note (2R,3S,4S,5R)-5-(6-amino-9H-purin-9-yl)-4-(docosyloxy)-2-(h ydroxymethyl)tetrahydrofuran-3-ol
  modified_base 7: mod_base = OTHER; note = 2'-fluoroguanosine-3'-phosphate
  modified_base 8: mod_base = OTHER; note = 2'-O-methyladenosine-3'-phosphate
  modified_base 9: mod_base = OTHER; note = 2'-fluorocytidine-3'-phosphate
  modified_base 10: mod_base = OTHER; note = 2'-fluorocytidine-3'-phosphate
  modified_base 11: mod_base = OTHER; note = 2'-fluorouridine-3'-phosphate
  modified_base 12: mod_base = OTHER; note = 2'-O-methyladenosine-3'-phosphate
  modified_base 13: mod_base = OTHER; note = 2'-O-methyladenosine-3'-phosphate
  modified_base 14: mod_base = OTHER; note = 2'-O-methylcytidine-3'-phosphate
  modified_base 15: mod_base = OTHER; note = 2'-O-methyladenosine-3'-phosphate
  modified_base 16: mod_base = OTHER; note = 2'-O-methylguanosine-3'-phosphate
  modified_base 17: mod_base = OTHER; note = 2'-O-methyluridine-3'-phosphate
  modified_base 18: mod_base = OTHER; note = 2'-O-methyluridine-3'-phosphate
  modified_base 19: mod_base = OTHER; note = 2'-O-methyluridine-3'-phosphorothioate
  modified_base 20: mod_base = OTHER; note = 2'-O-methyluridine-3'-phosphorothioate
  modified_base 21: mod_base = OTHER; note = 2'-O-methyladenosine-3'-phosphate
tctccagacctaacagtttta

SEQ ID NO: 1394 - RNA, 21 nt, synthetic construct
  source 1..21: mol_type = other RNA
  modified_base 1: mod_base = OTHER; note = 2'-O-methylcytidine-3'-phosphorothioate
  modified_base 2: mod_base = OTHER; note = 2'-O-methyluridine-3'-phosphorothioate
  modified_base 3: mod_base = OTHER; note = 2'-O-methyluridine-3'-phosphate
  modified_base 4: mod_base = OTHER; note = 2'-O-methyluridine-3'-phosphate
  modified_base 5: mod_base = OTHER; note = 2'-O-methyluridine-3'-phosphate
  modified_base 6: mod_base = OTHER; note 1-((2R,3R,4R,5R)-3-(docosyloxy)-4-hydroxy-5-(hydroxymethyl) tetrahydrofuran-2-yl)pyrimidine-2,4(1H,3H)-dione
  modified_base 7: mod_base = OTHER; note = 2'-fluorouridine-3'-phosphate
  modified_base 8: mod_base = OTHER; note = 2'-O-methyluridine-3'-phosphate
  modified_base 9: mod_base = OTHER; note = 2'-fluorocytidine-3'-phosphate
  modified_base 10: mod_base = OTHER; note = 2'-fluoroadenosine-3'-phosphate
  modified_base 11: mod_base = OTHER; note = 2'-fluorouridine-3'-phosphate
  modified_base 12: mod_base = OTHER; note = 2'-O-methylcytidine-3'-phosphate
  modified_base 13: mod_base = OTHER; note = 2'-O-methyluridine-3'-phosphate
  modified_base 14: mod_base = OTHER; note = 2'-O-methyladenosine-3'-phosphate
  modified_base 15: mod_base = OTHER; note = 2'-O-methylguanosine-3'-phosphate
  modified_base 16: mod_base = OTHER; note = 2'-O-methylcytidine-3'-phosphate
  modified_base 17: mod_base = OTHER; note = 2'-O-methylcytidine-3'-phosphate
  modified_base 18: mod_base = OTHER; note = 2'-O-methyluridine-3'-phosphate
  modified_base 19: mod_base = OTHER; note = 2'-O-methyluridine-3'-phosphorothioate
  modified_base 20: mod_base = OTHER; note = 2'-O-methylguanosine-3'-phosphorothioate
  modified_base 21: mod_base = OTHER; note = 2'-O-methyladenosine-3'-phosphate
ctttttttcatctagccttga

SEQ ID NO: 1395 - RNA, 21 nt, synthetic construct
  source 1..21: mol_type = other RNA
  modified_base 1: mod_base = OTHER; note = 2'-O-methylcytidine-3'-phosphorothioate
  modified_base 2: mod_base = OTHER; note = 2'-O-methyladenosine-3'-phosphorothioate
  modified_base 3: mod_base = OTHER; note = 2'-O-methyladenosine-3'-phosphate
  modified_base 4: mod_base = OTHER; note = 2'-O-methyladenosine-3'-phosphate
  modified_base 5: mod_base = OTHER; note = 2'-O-methyladenosine-3'-phosphate
  modified_base 6: mod_base = OTHER; note 1-((2R,3R,4R,5R)-3-(docosyloxy)-4-hydroxy-5-(hydroxymethyl) tetrahydrofuran-2-yl)pyrimidine-2,4(1H,3H)-dione
  modified_base 7: mod_base = OTHER; note = 2'-fluoroadenosine-3'-phosphate
  modified_base 8: mod_base = OTHER; note = 2'-O-methyladenosine-3'-phosphate
  modified_base 9: mod_base = OTHER; note = 2'-fluorouridine-3'-phosphate
  modified_base 10: mod_base = OTHER; note = 2'-fluorouridine-3'-phosphate
  modified_base 11: mod_base = OTHER; note = 2'-fluorocytidine-3'-phosphate
  modified_base 12: mod_base = OTHER; note = 2'-O-methyluridine-3'-phosphate
  modified_base 13: mod_base = OTHER; note = 2'-O-methyluridine-3'-phosphate
  modified_base 14: mod_base = OTHER; note = 2'-O-methylguanosine-3'-phosphate
  modified_base 15: mod_base = OTHER; note = 2'-O-methyladenosine-3'-phosphate
  modified_base 16: mod_base = OTHER; note = 2'-O-methylcytidine-3'-phosphate
  modified_base 17: mod_base = OTHER; note = 2'-O-methyladenosine-3'-phosphate
  modified_base 18: mod_base = OTHER; note = 2'-O-methyluridine-3'-phosphate
  modified_base 19: mod_base = OTHER; note = 2'-O-methylcytidine-3'-phosphorothioate
  modified_base 20: mod_base = OTHER; note = 2'-O-methyluridine-3'-phosphorothioate
  modified_base 21: mod_base = OTHER; note = 2'-O-methyladenosine-3'-phosphate
caaaataattcttgacatcta

SEQ ID NO: 1396 - RNA, 21 nt, synthetic construct
  source 1..21: mol_type = other RNA
  modified_base 1: mod_base = OTHER; note = 2'-O-methylguanosine-3'-phosphorothioate
  modified_base 2: mod_base = OTHER; note = 2'-O-methylcytidine-3'-phosphorothioate
  modified_base 3: mod_base = OTHER; note = 2'-O-methyladenosine-3'-phosphate
  modified_base 4: mod_base = OTHER; note = 2'-O-methyluridine-3'-phosphate
  modified_base 5: mod_base = OTHER; note = 2'-O-methylcytidine-3'-phosphate
  modified_base 6: mod_base = OTHER; note (2R,3S,4S,5R)-5-(6-amino-9H-purin-9-yl)-4-(docosyloxy)-2-(h ydroxymethyl)tetrahydrofuran-3-ol
  modified_base 7: mod_base = OTHER; note = 2'-fluorocytidine-3'-phosphate
  modified_base 8: mod_base = OTHER; note = 2'-O-methyluridine-3'-phosphate
  modified_base 9: mod_base = OTHER; note = 2'-fluorouridine-3'-phosphate
  modified_base 10: mod_base = OTHER; note = 2'-fluorouridine-3'-phosphate
  modified_base 11: mod_base = OTHER; note = 2'-fluorocytidine-3'-phosphate
  modified_base 12: mod_base = OTHER; note = 2'-O-methyluridine-3'-phosphate
  modified_base 13: mod_base = OTHER; note = 2'-O-methylguanosine-3'-phosphate
  modified_base 14: mod_base = OTHER; note = 2'-O-methyladenosine-3'-phosphate
  modified_base 15: mod_base = OTHER; note = 2'-O-methyladenosine-3'-phosphate
  modified_base 16: mod_base = OTHER; note = 2'-O-methyladenosine-3'-phosphate
  modified_base 17: mod_base = OTHER; note = 2'-O-methyladenosine-3'-phosphate
  modified_base 18: mod_base = OTHER; note = 2'-O-methyluridine-3'-phosphate
  modified_base 19: mod_base = OTHER; note = 2'-O-methyladenosine-3'-phosphorothioate
  modified_base 20: mod_base = OTHER; note = 2'-O-methyladenosine-3'-phosphorothioate
  modified_base 21: mod_base = OTHER; note = 2'-O-methyladenosine-3'-phosphate
gcatcactttctgaaaataaa

SEQ ID NO: 1397 - RNA, 21 nt, synthetic construct
  source 1..21: mol_type = other RNA
  modified_base 1: mod_base = OTHER; note = 2'-O-methyluridine-3'-phosphorothioate
  modified_base 2: mod_base = OTHER; note = 2'-O-methylcytidine-3'-phosphorothioate
  modified_base 3: mod_base = OTHER; note = 2'-O-methyluridine-3'-phosphate
  modified_base 4: mod_base = OTHER; note = 2'-O-methyluridine-3'-phosphate
  modified_base 5: mod_base = OTHER; note = 2'-O-methyluridine-3'-phosphate
  modified_base 6: mod_base = OTHER; note 1-((2R,3R,4R,5R)-3-(docosyloxy)-4-hydroxy-5-(hydroxymethyl) tetrahydrofuran-2-yl)pyrimidine-2,4(1H,3H)-dione
  modified_base 7: mod_base = OTHER; note = 2'-fluoroguanosine-3'-phosphate
  modified_base 8: mod_base = OTHER; note = 2'-O-methyluridine-3'-phosphate
  modified_base 9: mod_base = OTHER; note = 2'-fluoroguanosine-3'-phosphate
  modified_base 10: mod_base = OTHER; note = 2'-fluoroadenosine-3'-phosphate
  modified_base 11: mod_base = OTHER; note = 2'-fluoroadenosine-3'-phosphate
  modified_base 12: mod_base = OTHER; note = 2'-O-methyladenosine-3'-phosphate
  modified_base 13: mod_base = OTHER; note = 2'-O-methylcytidine-3'-phosphate
  modified_base 14: mod_base = OTHER; note = 2'-O-methyladenosine-3'-phosphate
  modified_base 15: mod_base = OTHER; note = 2'-O-methyluridine-3'-phosphate
  modified_base 16: mod_base = OTHER; note = 2'-O-methyladenosine-3'-phosphate
  modified_base 17: mod_base = OTHER; note = 2'-O-methylcytidine-3'-phosphate
  modified_base 18: mod_base = OTHER; note = 2'-O-methyluridine-3'-phosphate
  modified_base 19: mod_base = OTHER; note = 2'-O-methyladenosine-3'-phosphorothioate
  modified_base 20: mod_base = OTHER; note = 2'-O-methyluridine-3'-phosphorothioate
  modified_base 21: mod_base = OTHER; note = 2'-O-methyladenosine-3'-phosphate
tcttttgtgaaacatactata

SEQ ID NO: 1398 - RNA, 21 nt, synthetic construct
  source 1..21: mol_type = other RNA
  modified_base 1: mod_base = OTHER; note = 2'-O-methylcytidine-3'-phosphorothioate
  modified_base 2: mod_base = OTHER; note = 2'-O-methyluridine-3'-phosphorothioate
  modified_base 3: mod_base = OTHER; note = 2'-O-methyladenosine-3'-phosphate
  modified_base 4: mod_base = OTHER; note = 2'-O-methyluridine-3'-phosphate
  modified_base 5: mod_base = OTHER; note = 2'-O-methyluridine-3'-phosphate
  modified_base 6: mod_base = OTHER; note 1-((2R,3R,4R,5R)-3-(docosyloxy)-4-hydroxy-5-(hydroxymethyl) tetrahydrofuran-2-yl)pyrimidine-2,4(1H,3H)-dione
  modified_base 7: mod_base = OTHER; note = 2'-fluorocytidine-3'-phosphate
  modified_base 8: mod_base = OTHER; note = 2'-O-methyluridine-3'-phosphate
  modified_base 9: mod_base = OTHER; note = 2'-fluorouridine-3'-phosphate
  modified_base 10: mod_base = OTHER; note = 2'-fluorocytidine-3'-phosphate
  modified_base 11: mod_base = OTHER; note = 2'-fluorocytidine-3'-phosphate
  modified_base 12: mod_base = OTHER; note = 2'-O-methyladenosine-3'-phosphate
  modified_base 13: mod_base = OTHER; note = 2'-O-methyluridine-3'-phosphate
  modified_base 14: mod_base = OTHER; note = 2'-O-methyladenosine-3'-phosphate
  modified_base 15: mod_base = OTHER; note = 2'-O-methylguanosine-3'-phosphate
  modified_base 16: mod_base = OTHER; note = 2'-O-methylguanosine-3'-phosphate
  modified_base 17: mod_base = OTHER; note = 2'-O-methylcytidine-3'-phosphate
  modified_base 18: mod_base = OTHER; note = 2'-O-methyluridine-3'-phosphate
  modified_base 19: mod_base = OTHER; note = 2'-O-methyladenosine-3'-phosphorothioate
  modified_base 20: mod_base = OTHER; note = 2'-O-methyladenosine-3'-phosphorothioate
  modified_base 21: mod_base = OTHER; note = 2'-O-methyladenosine-3'-phosphate
ctatttcttccataggctaaa

SEQ ID NO: 1399 - RNA, 21 nt, synthetic construct
  source 1..21: mol_type = other RNA
  modified_base 1: mod_base = OTHER; note = 2'-O-methylcytidine-3'-phosphorothioate
  modified_base 2: mod_base = OTHER; note = 2'-O-methyluridine-3'-phosphorothioate
  modified_base 3: mod_base = OTHER; note = 2'-O-methyluridine-3'-phosphate
  modified_base 4: mod_base = OTHER; note = 2'-O-methylcytidine-3'-phosphate
  modified_base 5: mod_base = OTHER; note = 2'-O-methyladenosine-3'-phosphate
  modified_base 6: mod_base = OTHER; note (2R,3S,4S,5R)-5-(6-amino-9H-purin-9-yl)-4-(docosyloxy)-2-(h ydroxymethyl)tetrahydrofuran-3-ol
  modified_base 7: mod_base = OTHER; note = 2'-fluorouridine-3'-phosphate
  modified_base 8: mod_base = OTHER; note = 2'-O-methylguanosine-3'-phosphate
  modified_base 9: mod_base = OTHER; note = 2'-fluoroadenosine-3'-phosphate
  modified_base 10: mod_base = OTHER; note = 2'-fluoroadenosine-3'-phosphate
  modified_base 11: mod_base = OTHER; note = 2'-fluoroguanosine-3'-phosphate
  modified_base 12: mod_base = OTHER; note = 2'-O-methyluridine-3'-phosphate
  modified_base 13: mod_base = OTHER; note = 2'-O-methylguanosine-3'-phosphate
  modified_base 14: mod_base = OTHER; note = 2'-O-methyluridine-3'-phosphate
  modified_base 15: mod_base = OTHER; note = 2'-O-methyluridine-3'-phosphate
  modified_base 16: mod_base = OTHER; note = 2'-O-methyladenosine-3'-phosphate
  modified_base 17: mod_base = OTHER; note = 2'-O-methyladenosine-3'-phosphate
  modified_base 18: mod_base = OTHER; note = 2'-O-methylcytidine-3'-phosphate
  modified_base 19: mod_base = OTHER; note = 2'-O-methyladenosine-3'-phosphorothioate
  modified_base 20: mod_base = OTHER; note = 2'-O-methyladenosine-3'-phosphorothioate
  modified_base 21: mod_base = OTHER; note = 2'-O-methyladenosine-3'-phosphate
cttcaatgaagtgttaacaaa

SEQ ID NO: 1400 - RNA, 21 nt, synthetic construct
  source 1..21: mol_type = other RNA
  modified_base 1: mod_base = OTHER; note = 2'-O-methyluridine-3'-phosphorothioate
  modified_base 2: mod_base = OTHER; note = 2'-O-methyluridine-3'-phosphorothioate
  modified_base 3: mod_base = OTHER; note = 2'-O-methyluridine-3'-phosphate
  modified_base 4: mod_base = OTHER; note = 2'-O-methylguanosine-3'-phosphate
  modified_base 5: mod_base = OTHER; note = 2'-O-methylcytidine-3'-phosphate
  modified_base 6: mod_base = OTHER; note 4-amino-1-((2R,3R,4R,5R)-3-(docosyloxy)-4-hydroxy-5-(hydrox ymethyl)tetrahydrofuran-2-yl)pyrimidin-2(1H)-one
  modified_base 7: mod_base = OTHER; note = 2'-fluorouridine-3'-phosphate
  modified_base 8: mod_base = OTHER; note = 2'-O-methyluridine-3'-phosphate
  modified_base 9: mod_base = OTHER; note = 2'-fluorocytidine-3'-phosphate
  modified_base 10: mod_base = OTHER; note = 2'-fluoroadenosine-3'-phosphate
  modified_base 11: mod_base = OTHER; note = 2'-fluorouridine-3'-phosphate
  modified_base 12: mod_base = OTHER; note = 2'-O-methyluridine-3'-phosphate
  modified_base 13: mod_base = OTHER; note = 2'-O-methylcytidine-3'-phosphate
  modified_base 14: mod_base = OTHER; note = 2'-O-methyluridine-3'-phosphate
  modified_base 15: mod_base = OTHER; note = 2'-O-methyladenosine-3'-phosphate
  modified_base 16: mod_base = OTHER; note = 2'-O-methylcytidine-3'-phosphate
  modified_base 17: mod_base = OTHER; note = 2'-O-methyluridine-3'-phosphate
  modified_base 18: mod_base = OTHER; note = 2'-O-methyluridine-3'-phosphate
  modified_base 19: mod_base = OTHER; note = 2'-O-methyluridine-3'-phosphorothioate
  modified_base 20: mod_base = OTHER; note = 2'-O-methylcytidine-3'-phosphorothioate
  modified_base 21: mod_base = OTHER; note = 2'-O-methyladenosine-3'-phosphate
tttgccttcattctactttca

SEQ ID NO: 1401 - RNA, 21 nt, synthetic construct
  source 1..21: mol_type = other RNA
  modified_base 1: mod_base = OTHER; note = 2'-O-methyladenosine-3'-phosphorothioate
  modified_base 2: mod_base = OTHER; note = 2'-O-methylguanosine-3'-phosphorothioate
  modified_base 3: mod_base = OTHER; note = 2'-O-methylguanosine-3'-phosphate
  modified_base 4: mod_base = OTHER; note = 2'-O-methyluridine-3'-phosphate
  modified_base 5: mod_base = OTHER; note = 2'-O-methyluridine-3'-phosphate
  modified_base 6: mod_base = OTHER; note 1-((2R,3R,4R,5R)-3-(docosyloxy)-4-hydroxy-5-(hydroxymethyl) tetrahydrofuran-2-yl)pyrimidine-2,4(1H,3H)-dione
  modified_base 7: mod_base = OTHER; note = 2'-fluorouridine-3'-phosphate
  modified_base 8: mod_base = OTHER; note = 2'-O-methyluridine-3'-phosphate
  modified_base 9: mod_base = OTHER; note = 2'-fluoroadenosine-3'-phosphate
  modified_base 10: mod_base = OTHER; note = 2'-fluoroadenosine-3'-phosphate
  modified_base 11: mod_base = OTHER; note = 2'-fluoroadenosine-3'-phosphate
  modified_base 12: mod_base = OTHER; note = 2'-O-methyluridine-3'-phosphate
  modified_base 13: mod_base = OTHER; note = 2'-O-methylguanosine-3'-phosphate
  modified_base 14: mod_base = OTHER; note = 2'-O-methyluridine-3'-phosphate
  modified_base 15: mod_base = OTHER; note = 2'-O-methylcytidine-3'-phosphate
  modified_base 16: mod_base = OTHER; note = 2'-O-methylcytidine-3'-phosphate
  modified_base 17: mod_base = OTHER; note = 2'-O-methyluridine-3'-phosphate
  modified_base 18: mod_base = OTHER; note = 2'-O-methyladenosine-3'-phosphate
  modified_base 19: mod_base = OTHER; note = 2'-O-methyladenosine-3'-phosphorothioate
  modified_base 20: mod_base = OTHER; note = 2'-O-methyladenosine-3'-phosphorothioate
  modified_base 21: mod_base = OTHER; note = 2'-O-methyladenosine-3'-phosphate
aggtttttaaatgtcctaaaa

SEQ ID NO: 1402 - RNA, 21 nt, synthetic construct
  source 1..21: mol_type = other RNA
  modified_base 1: mod_base = OTHER; note = 2'-O-methylguanosine-3'-phosphorothioate
  modified_base 2: mod_base = OTHER; note = 2'-O-methyladenosine-3'-phosphorothioate
  modified_base 3: mod_base = OTHER; note = 2'-O-methyladenosine-3'-phosphate
  modified_base 4: mod_base = OTHER; note = 2'-O-methyluridine-3'-phosphate
  modified_base 5: mod_base = OTHER; note = 2'-O-methyladenosine-3'-phosphate
  modified_base 6: mod_base = OTHER; note 1-((2R,3R,4R,5R)-3-(docosyloxy)-4-hydroxy-5-(hydroxymethyl) tetrahydrofuran-2-yl)pyrimidine-2,4(1H,3H)-dione
  modified_base 7: mod_base = OTHER; note = 2'-fluorocytidine-3'-phosphate
  modified_base 8: mod_base = OTHER; note = 2'-O-methyluridine-3'-phosphate
  modified_base 9: mod_base = OTHER; note = 2'-fluorouridine-3'-phosphate
  modified_base 10: mod_base = OTHER; note = 2'-fluorouridine-3'-phosphate
  modified_base 11: mod_base = OTHER; note = 2'-fluoroguanosine-3'-phosphate
  modified_base 12: mod_base = OTHER; note = 2'-O-methyladenosine-3'-phosphate
  modified_base 13: mod_base = OTHER; note = 2'-O-methylguanosine-3'-phosphate
  modified_base 14: mod_base = OTHER; note = 2'-O-methyluridine-3'-phosphate
  modified_base 15: mod_base = OTHER; note = 2'-O-methylcytidine-3'-phosphate
  modified_base 16: mod_base = OTHER; note = 2'-O-methylcytidine-3'-phosphate
  modified_base 17: mod_base = OTHER; note = 2'-O-methyluridine-3'-phosphate
  modified_base 18: mod_base = OTHER; note = 2'-O-methyluridine-3'-phosphate
  modified_base 19: mod_base = OTHER; note = 2'-O-methylcytidine-3'-phosphorothioate
  modified_base 20: mod_base = OTHER; note = 2'-O-methyladenosine-3'-phosphorothioate
  modified_base 21: mod_base = OTHER; note = 2'-O-methyladenosine-3'-phosphate
gaatatctttgagtccttcaa

SEQ ID NO: 1403 - RNA, 21 nt, synthetic construct
  source 1..21: mol_type = other RNA
  modified_base 1: mod_base = OTHER; note = 2'-O-methylguanosine-3'-phosphorothioate
  modified_base 2: mod_base = OTHER; note = 2'-O-methyladenosine-3'-phosphorothioate
  modified_base 3: mod_base = OTHER; note = 2'-O-methyladenosine-3'-phosphate
  modified_base 4: mod_base = OTHER; note = 2'-O-methylcytidine-3'-phosphate
  modified_base 5: mod_base = OTHER; note = 2'-O-methyladenosine-3'-phosphate
  modified_base 6: mod_base = OTHER; note 4-amino-1-((2R,3R,4R,5R)-3-(docosyloxy)-4-hydroxy-5-(hydrox ymethyl)tetrahydrofuran-2-yl)pyrimidin-2(1H)-one
  modified_base 7: mod_base = OTHER; note = 2'-fluorouridine-3'-phosphate
  modified_base 8: mod_base = OTHER; note = 2'-O-methyluridine-3'-phosphate
  modified_base 9: mod_base = OTHER; note = 2'-fluorocytidine-3'-phosphate
  modified_base 10: mod_base = OTHER; note = 2'-fluorocytidine-3'-phosphate
  modified_base 11: mod_base = OTHER; note = 2'-fluoroadenosine-3'-phosphate
  modified_base 12: mod_base = OTHER; note = 2'-O-methyladenosine-3'-phosphate
  modified_base 13: mod_base = OTHER; note = 2'-O-methyladenosine-3'-phosphate
  modified_base 14: mod_base = OTHER; note = 2'-O-methylguanosine-3'-phosphate
  modified_base 15: mod_base = OTHER; note = 2'-O-methyladenosine-3'-phosphate
  modified_base 16: mod_base = OTHER; note = 2'-O-methyluridine-3'-phosphate
  modified_base 17: mod_base = OTHER; note = 2'-O-methyluridine-3'-phosphate
  modified_base 18: mod_base = OTHER; note = 2'-O-methyladenosine-3'-phosphate
  modified_base 19: mod_base = OTHER; note = 2'-O-methyladenosine-3'-phosphorothioate
  modified_base 20: mod_base = OTHER; note = 2'-O-methyluridine-3'-phosphorothioate
  modified_base 21: mod_base = OTHER; note = 2'-O-methyladenosine-3'-phosphate
gaacacttccaaagattaata

SEQ ID NO: 1404 - RNA, 21 nt, synthetic construct
  source 1..21: mol_type = other RNA
  modified_base 1: mod_base = OTHER; note = 2'-O-methylcytidine-3'-phosphorothioate
  modified_base 2: mod_base = OTHER; note = 2'-O-methyluridine-3'-phosphorothioate
  modified_base 3: mod_base = OTHER; note = 2'-O-methyladenosine-3'-phosphate
  modified_base 4: mod_base = OTHER; note = 2'-O-methyladenosine-3'-phosphate
  modified_base 5: mod_base = OTHER; note = 2'-O-methyladenosine-3'-phosphate
  modified_base 6: mod_base = OTHER; note 1-((2R,3R,4R,5R)-3-(docosyloxy)-4-hydroxy-5-(hydroxymethyl) tetrahydrofuran-2-yl)pyrimidine-2,4(1H,3H)-dione
  modified_base 7: mod_base = OTHER; note = 2'-fluorouridine-3'-phosphate
  modified_base 8: mod_base = OTHER; note = 2'-O-methyluridine-3'-phosphate
  modified_base 9: mod_base = OTHER; note = 2'-fluorouridine-3'-phosphate
  modified_base 10: mod_base = OTHER; note = 2'-fluoroguanosine-3'-phosphate
  modified_base 11: mod_base = OTHER; note = 2'-fluorouridine-3'-phosphate
  modified_base 12: mod_base = OTHER; note = 2'-O-methylcytidine-3'-phosphate
  modified_base 13: mod_base = OTHER; note = 2'-O-methyluridine-3'-phosphate
  modified_base 14: mod_base = OTHER; note = 2'-O-methyladenosine-3'-phosphate
  modified_base 15: mod_base = OTHER; note = 2'-O-methyladenosine-3'-phosphate
  modified_base 16: mod_base = OTHER; note = 2'-O-methylcytidine-3'-phosphate
  modified_base 17: mod_base = OTHER; note = 2'-O-methyladenosine-3'-phosphate
  modified_base 18: mod_base = OTHER; note = 2'-O-methyladenosine-3'-phosphate
  modified_base 19: mod_base = OTHER; note = 2'-O-methyladenosine-3'-phosphorothioate
  modified_base 20: mod_base = OTHER; note = 2'-O-methyluridine-3'-phosphorothioate
  modified_base 21: mod_base = OTHER; note = 2'-O-methyladenosine-3'-phosphate
ctaaattttgtctaacaaata

SEQ ID NO: 1405 - RNA, 21 nt, synthetic construct
  source 1..21: mol_type = other RNA
  modified_base 1: mod_base = OTHER; note = 2'-O-methylguanosine-3'-phosphorothioate
  modified_base 2: mod_base = OTHER; note = 2'-O-methyluridine-3'-phosphorothioate
  modified_base 3: mod_base = OTHER; note = 2'-O-methyladenosine-3'-phosphate
  modified_base 4: mod_base = OTHER; note = 2'-O-methyladenosine-3'-phosphate
  modified_base 5: mod_base = OTHER; note = 2'-O-methyladenosine-3'-phosphate
  modified_base 6: mod_base = OTHER; note 4-amino-1-((2R,3R,4R,5R)-3-(docosyloxy)-4-hydroxy-5-(hydrox ymethyl)tetrahydrofuran-2-yl)pyrimidin-2(1H)-one
  modified_base 7: mod_base = OTHER; note = 2'-fluoroadenosine-3'-phosphate
  modified_base 8: mod_base = OTHER; note = 2'-O-methyladenosine-3'-phosphate
  modified_base 9: mod_base = OTHER; note = 2'-fluorocytidine-3'-phosphate
  modified_base 10: mod_base = OTHER; note = 2'-fluorouridine-3'-phosphate
  modified_base 11: mod_base = OTHER; note = 2'-fluorouridine-3'-phosphate
  modified_base 12: mod_base = OTHER; note = 2'-O-methyladenosine-3'-phosphate
  modified_base 13: mod_base = OTHER; note = 2'-O-methyladenosine-3'-phosphate
  modified_base 14: mod_base = OTHER; note = 2'-O-methyladenosine-3'-phosphate
  modified_base 15: mod_base = OTHER; note = 2'-O-methyladenosine-3'-phosphate
  modified_base 16: mod_base = OTHER; note = 2'-O-methyluridine-3'-phosphate
  modified_base 17: mod_base = OTHER; note = 2'-O-methyluridine-3'-phosphate
  modified_base 18: mod_base = OTHER; note = 2'-O-methylguanosine-3'-phosphate
  modified_base 19: mod_base = OTHER; note = 2'-O-methylcytidine-3'-phosphorothioate
  modified_base 20: mod_base = OTHER; note = 2'-O-methyluridine-3'-phosphorothioate
  modified_base 21: mod_base = OTHER; note = 2'-O-methyladenosine-3'-phosphate
gtaaacaacttaaaattgcta

SEQ ID NO: 1406 - RNA, 21 nt, synthetic construct
  source 1..21: mol_type = other RNA
  modified_base 1: mod_base = OTHER; note = 2'-O-methyladenosine-3'-phosphorothioate
  modified_base 2: mod_base = OTHER; note = 2'-O-methyladenosine-3'-phosphorothioate
  modified_base 3: mod_base = OTHER; note = 2'-O-methyladenosine-3'-phosphate
  modified_base 4: mod_base = OTHER; note = 2'-O-methyladenosine-3'-phosphate
  modified_base 5: mod_base = OTHER; note = 2'-O-methyluridine-3'-phosphate
  modified_base 6: mod_base = OTHER; note (2R,3S,4S,5R)-5-(6-amino-9H-purin-9-yl)-4-(docosyloxy)-2-(h ydroxymethyl)tetrahydrofuran-3-ol
  modified_base 7: mod_base = OTHER; note = 2'-fluoroadenosine-3'-phosphate
  modified_base 8: mod_base = OTHER; note = 2'-O-methyluridine-3'-phosphate
  modified_base 9: mod_base = OTHER; note = 2'-fluorouridine-3'-phosphate
  modified_base 10: mod_base = OTHER; note = 2'-fluorouridine-3'-phosphate
  modified_base 11: mod_base = OTHER; note = 2'-fluoroadenosine-3'-phosphate
  modified_base 12: mod_base = OTHER; note = 2'-O-methylcytidine-3'-phosphate
  modified_base 13: mod_base = OTHER; note = 2'-O-methyluridine-3'-phosphate
  modified_base 14: mod_base = OTHER; note = 2'-O-methylcytidine-3'-phosphate
  modified_base 15: mod_base = OTHER; note = 2'-O-methyladenosine-3'-phosphate
  modified_base 16: mod_base = OTHER; note = 2'-O-methylcytidine-3'-phosphate
  modified_base 17: mod_base = OTHER; note = 2'-O-methyluridine-3'-phosphate
  modified_base 18: mod_base = OTHER; note = 2'-O-methylcytidine-3'-phosphate
  modified_base 19: mod_base = OTHER; note = 2'-O-methyladenosine-3'-phosphorothioate
  modified_base 20: mod_base = OTHER; note = 2'-O-methylguanosine-3'-phosphorothioate
  modified_base 21: mod_base = OTHER; note = 2'-O-methyladenosine-3'-phosphate
aaaataatttactcactcaga

SEQ ID NO: 1407 - RNA, 21 nt, synthetic construct
  source 1..21: mol_type = other RNA
  modified_base 1: mod_base = OTHER; note = 2'-O-methylguanosine-3'-phosphorothioate
  modified_base 2: mod_base = OTHER; note = 2'-O-methyladenosine-3'-phosphorothioate
  modified_base 3: mod_base = OTHER; note = 2'-O-methylcytidine-3'-phosphate
  modified_base 4: mod_base = OTHER; note = 2'-O-methyladenosine-3'-phosphate
  modified_base 5: mod_base = OTHER; note = 2'-O-methyluridine-3'-phosphate
  modified_base 6: mod_base = OTHER; note 4-amino-1-((2R,3R,4R,5R)-3-(docosyloxy)-4-hydroxy-5-(hydrox ymethyl)tetrahydrofuran-2-yl)pyrimidin-2(1H)-one
  modified_base 7: mod_base = OTHER; note = 2'-fluorouridine-3'-phosphate
  modified_base 8: mod_base = OTHER; note = 2'-O-methyladenosine-3'-phosphate
  modified_base 9: mod_base = OTHER; note = 2'-fluorouridine-3'-phosphate
  modified_base 10: mod_base = OTHER; note = 2'-fluorouridine-3'-phosphate
  modified_base 11: mod_base = OTHER; note = 2'-fluorocytidine-3'-phosphate
  modified_base 12: mod_base = OTHER; note = 2'-O-methyluridine-3'-phosphate
  modified_base 13: mod_base = OTHER; note = 2'-O-methylguanosine-3'-phosphate
  modified_base 14: mod_base = OTHER; note = 2'-O-methyluridine-3'-phosphate
  modified_base 15: mod_base = OTHER; note = 2'-O-methyluridine-3'-phosphate
  modified_base 16: mod_base = OTHER; note = 2'-O-methylguanosine-3'-phosphate
  modified_base 17: mod_base = OTHER; note = 2'-O-methylguanosine-3'-phosphate
  modified_base 18: mod_base = OTHER; note = 2'-O-methyluridine-3'-phosphate
  modified_base 19: mod_base = OTHER; note = 2'-O-methylcytidine-3'-phosphorothioate
  modified_base 20: mod_base = OTHER; note = 2'-O-methyluridine-3'-phosphorothioate
  modified_base 21: mod_base = OTHER; note = 2'-O-methyladenosine-3'-phosphate
gacatctattctgttggtcta

SEQ ID NO: 1408 - RNA, 21 nt, synthetic construct
  source 1..21: mol_type = other RNA
  modified_base 1: mod_base = OTHER; note = 2'-O-methyluridine-3'-phosphorothioate
  modified_base 2: mod_base = OTHER; note = 2'-O-methyladenosine-3'-phosphorothioate
  modified_base 3: mod_base = OTHER; note = 2'-O-methyladenosine-3'-phosphate
  modified_base 4: mod_base = OTHER; note = 2'-O-methylcytidine-3'-phosphate
  modified_base 5: mod_base = OTHER; note = 2'-O-methyluridine-3'-phosphate
  modified_base 6: mod_base = OTHER; note 2-amino-9-((2R,3S,4S,5R)-3-(docosyloxy)-4-hydroxy-5-(hydrox ymethyl)tetrahydrofuran-2-yl)-1,9-dihydro-6H-purin-6-one
  modified_base 7: mod_base = OTHER; note = 2'-fluoroadenosine-3'-phosphate
  modified_base 8: mod_base = OTHER; note = 2'-O-methylguanosine-3'-phosphate
  modified_base 9: mod_base = OTHER; note = 2'-fluorouridine-3'-phosphate
  modified_base 10: mod_base = OTHER; note = 2'-fluoroadenosine-3'-phosphate
  modified_base 11: mod_base = OTHER; note = 2'-fluoroguanosine-3'-phosphate
  modified_base 12: mod_base = OTHER; note = 2'-O-methyluridine-3'-phosphate
  modified_base 13: mod_base = OTHER; note = 2'-O-methylcytidine-3'-phosphate
  modified_base 14: mod_base = OTHER; note = 2'-O-methyluridine-3'-phosphate
  modified_base 15: mod_base = OTHER; note = 2'-O-methyluridine-3'-phosphate
  modified_base 16: mod_base = OTHER; note = 2'-O-methyladenosine-3'-phosphate
  modified_base 17: mod_base = OTHER; note = 2'-O-methyluridine-3'-phosphate
  modified_base 18: mod_base = OTHER; note = 2'-O-methyladenosine-3'-phosphate
  modified_base 19: mod_base = OTHER; note = 2'-O-methyluridine-3'-phosphorothioate
  modified_base 20: mod_base = OTHER; note = 2'-O-methyluridine-3'-phosphorothioate
  modified_base 21: mod_base = OTHER; note = 2'-O-methyladenosine-3'-phosphate
taactgagtagtcttatatta

SEQ ID NO: 1409 - RNA, 21 nt, synthetic construct
  source 1..21: mol_type = other RNA
  modified_base 1: mod_base = OTHER; note = 2'-O-methyluridine-3'-phosphorothioate
  modified_base 2: mod_base = OTHER; note = 2'-O-methylcytidine-3'-phosphorothioate
  modified_base 3: mod_base = OTHER; note = 2'-O-methyluridine-3'-phosphate
  modified_base 4: mod_base = OTHER; note = 2'-O-methylguanosine-3'-phosphate
  modified_base 5: mod_base = OTHER; note = 2'-O-methylguanosine-3'-phosphate
  modified_base 6: mod_base = OTHER; note (2R,3S,4S,5R)-5-(6-amino-9H-purin-9-yl)-4-(docosyloxy)-2-(h ydroxymethyl)tetrahydrofuran-3-ol
  modified_base 7: mod_base = OTHER; note = 2'-fluoroadenosine-3'-phosphate
  modified_base 8: mod_base = OTHER; note = 2'-O-methyluridine-3'-phosphate
  modified_base 9: mod_base = OTHER; note = 2'-fluorouridine-3'-phosphate
  modified_base 10: mod_base = OTHER; note = 2'-fluorouridine-3'-phosphate
  modified_base 11: mod_base = OTHER; note = 2'-fluoroadenosine-3'-phosphate
  modified_base 12: mod_base = OTHER; note = 2'-O-methylguanosine-3'-phosphate
  modified_base 13: mod_base = OTHER; note = 2'-O-methylcytidine-3'-phosphate
  modified_base 14: mod_base = OTHER; note = 2'-O-methylcytidine-3'-phosphate
  modified_base 15: mod_base = OTHER; note = 2'-O-methyluridine-3'-phosphate
  modified_base 16: mod_base = OTHER; note = 2'-O-methyluridine-3'-phosphate
  modified_base 17: mod_base = OTHER; note = 2'-O-methylcytidine-3'-phosphate
  modified_base 18: mod_base = OTHER; note = 2'-O-methyluridine-3'-phosphate
  modified_base 19: mod_base = OTHER; note = 2'-O-methyladenosine-3'-phosphorothioate
  modified_base 20: mod_base = OTHER; note = 2'-O-methyladenosine-3'-phosphorothioate
  modified_base 21: mod_base = OTHER; note = 2'-O-methyladenosine-3'-phosphate
tctggaatttagccttctaaa

SEQ ID NO: 1410 - RNA, 21 nt, synthetic construct
  source 1..21: mol_type = other RNA
  modified_base 1: mod_base = OTHER; note = 2'-O-methyladenosine-3'-phosphorothioate
  modified_base 2: mod_base = OTHER; note = 2'-O-methylcytidine-3'-phosphorothioate
  modified_base 3: mod_base = OTHER; note = 2'-O-methyladenosine-3'-phosphate
  modified_base 4: mod_base = OTHER; note = 2'-O-methyluridine-3'-phosphate
  modified_base 5: mod_base = OTHER; note = 2'-O-methylguanosine-3'-phosphate
  modified_base 6: mod_base = OTHER; note 4-amino-1-((2R,3R,4R,5R)-3-(docosyloxy)-4-hydroxy-5-(hydrox ymethyl)tetrahydrofuran-2-yl)pyrimidin-2(1H)-one
  modified_base 7: mod_base = OTHER; note = 2'-fluorocytidine-3'-phosphate
  modified_base 8: mod_base = OTHER; note = 2'-O-methyluridine-3'-phosphate
  modified_base 9: mod_base = OTHER; note = 2'-fluorouridine-3'-phosphate
  modified_base 10: mod_base = OTHER; note = 2'-fluoroguanosine-3'-phosphate
  modified_base 11: mod_base = OTHER; note = 2'-fluoroadenosine-3'-phosphate
  modified_base 12: mod_base = OTHER; note = 2'-O-methyladenosine-3'-phosphate
  modified_base 13: mod_base = OTHER; note = 2'-O-methylcytidine-3'-phosphate
  modified_base 14: mod_base = OTHER; note = 2'-O-methyluridine-3'-phosphate
  modified_base 15: mod_base = OTHER; note = 2'-O-methylcytidine-3'-phosphate
  modified_base 16: mod_base = OTHER; note = 2'-O-methyluridine-3'-phosphate
  modified_base 17: mod_base = OTHER; note = 2'-O-methyluridine-3'-phosphate
  modified_base 18: mod_base = OTHER; note = 2'-O-methylguanosine-3'-phosphate
  modified_base 19: mod_base = OTHER; note = 2'-O-methyladenosine-3'-phosphorothioate
  modified_base 20: mod_base = OTHER; note = 2'-O-methyladenosine-3'-phosphorothioate
  modified_base 21: mod_base = OTHER; note = 2'-O-methyladenosine-3'-phosphate
acatgccttgaactcttgaaa

SEQ ID NO: 1411 - RNA, 21 nt, synthetic construct
  source 1..21: mol_type = other RNA
  modified_base 1: mod_base = OTHER; note = 2'-O-methyladenosine-3'-phosphorothioate
  modified_base 2: mod_base = OTHER; note = 2'-O-methyluridine-3'-phosphorothioate
  modified_base 3: mod_base = OTHER; note = 2'-O-methylcytidine-3'-phosphate
  modified_base 4: mod_base = OTHER; note = 2'-O-methyladenosine-3'-phosphate
  modified_base 5: mod_base = OTHER; note = 2'-O-methyladenosine-3'-phosphate
  modified_base 6: mod_base = OTHER; note 2-amino-9-((2R,3S,4S,5R)-3-(docosyloxy)-4-hydroxy-5-(hydrox ymethyl)tetrahydrofuran-2-yl)-1,9-dihydro-6H-purin-6-one
  modified_base 7: mod_base = OTHER; note = 2'-fluorocytidine-3'-phosphate
  modified_base 8: mod_base = OTHER; note = 2'-O-methyladenosine-3'-phosphate
  modified_base 9: mod_base = OTHER; note = 2'-fluorocytidine-3'-phosphate
  modified_base 10: mod_base = OTHER; note = 2'-fluorouridine-3'-phosphate
  modified_base 11: mod_base = OTHER; note = 2'-fluorouridine-3'-phosphate
  modified_base 12: mod_base = OTHER; note = 2'-O-methylcytidine-3'-phosphate
  modified_base 13: mod_base = OTHER; note = 2'-O-methyluridine-3'-phosphate
  modified_base 14: mod_base = OTHER; note = 2'-O-methyluridine-3'-phosphate
  modified_base 15: mod_base = OTHER; note = 2'-O-methylguanosine-3'-phosphate
  modified_base 16: mod_base = OTHER; note = 2'-O-methylcytidine-3'-phosphate
  modified_base 17: mod_base = OTHER; note = 2'-O-methyladenosine-3'-phosphate
  modified_base 18: mod_base = OTHER; note = 2'-O-methylcytidine-3'-phosphate
  modified_base 19: mod_base = OTHER; note = 2'-O-methyluridine-3'-phosphorothioate
  modified_base 20: mod_base = OTHER; note = 2'-O-methyluridine-3'-phosphorothioate
  modified_base 21: mod_base = OTHER; note = 2'-O-methyladenosine-3'-phosphate
atcaagcacttcttgcactta

SEQ ID NO: 1412 - RNA, 21 nt, synthetic construct
  source 1..21: mol_type = other RNA
  modified_base 1: mod_base = OTHER; note = 2'-O-methylcytidine-3'-phosphorothioate
  modified_base 2: mod_base = OTHER; note = 2'-O-methyluridine-3'-phosphorothioate
  modified_base 3: mod_base = OTHER; note = 2'-O-methyluridine-3'-phosphate
  modified_base 4: mod_base = OTHER; note = 2'-O-methylguanosine-3'-phosphate
  modified_base 5: mod_base = OTHER; note = 2'-O-methylcytidine-3'-phosphate
  modified_base 6: mod_base = OTHER; note 1-((2R,3R,4R,5R)-3-(docosyloxy)-4-hydroxy-5-(hydroxymethyl) tetrahydrofuran-2-yl)pyrimidine-2,4(1H,3H)-dione
  modified_base 7: mod_base = OTHER; note = 2'-fluorouridine-3'-phosphate
  modified_base 8: mod_base = OTHER; note = 2'-O-methyluridine-3'-phosphate
  modified_base 9: mod_base = OTHER; note = 2'-fluorouridine-3'-phosphate
  modified_base 10: mod_base = OTHER; note = 2'-fluorocytidine-3'-phosphate
  modified_base 11: mod_base = OTHER; note = 2'-fluoroadenosine-3'-phosphate
  modified_base 12: mod_base = OTHER; note = 2'-O-methyluridine-3'-phosphate
  modified_base 13: mod_base = OTHER; note = 2'-O-methylcytidine-3'-phosphate
  modified_base 14: mod_base = OTHER; note = 2'-O-methyluridine-3'-phosphate
  modified_base 15: mod_base = OTHER; note = 2'-O-methyluridine-3'-phosphate
  modified_base 16: mod_base = OTHER; note = 2'-O-methyluridine-3'-phosphate
  modified_base 17: mod_base = OTHER; note = 2'-O-methyladenosine-3'-phosphate
  modified_base 18: mod_base = OTHER; note = 2'-O-methyluridine-3'-phosphate
  modified_base 19: mod_base = OTHER; note = 2'-O-methyladenosine-3'-phosphorothioate
  modified_base 20: mod_base = OTHER; note = 2'-O-methylcytidine-3'-phosphorothioate
  modified_base 21: mod_base = OTHER; note = 2'-O-methyladenosine-3'-phosphate
cttgcttttcatctttataca

SEQ ID NO: 1413 - RNA, 21 nt, synthetic construct
  source 1..21: mol_type = other RNA
  modified_base 1: mod_base = OTHER; note = 2'-O-methyluridine-3'-phosphorothioate
  modified_base 2: mod_base = OTHER; note = 2'-O-methyluridine-3'-phosphorothioate
  modified_base 3: mod_base = OTHER; note = 2'-O-methyluridine-3'-phosphate
  modified_base 4: mod_base = OTHER; note = 2'-O-methyluridine-3'-phosphate
  modified_base 5: mod_base = OTHER; note = 2'-O-methylcytidine-3'-phosphate
  modified_base 6: mod_base = OTHER; note 1-((2R,3R,4R,5R)-3-(docosyloxy)-4-hydroxy-5-(hydroxymethyl) tetrahydrofuran-2-yl)pyrimidine-2,4(1H,3H)-dione
  modified_base 7: mod_base = OTHER; note = 2'-fluorocytidine-3'-phosphate
  modified_base 8: mod_base = OTHER; note = 2'-O-methylcytidine-3'-phosphate
  modified_base 9: mod_base = OTHER; note = 2'-fluorocytidine-3'-phosphate
  modified_base 10: mod_base = OTHER; note = 2'-fluorouridine-3'-phosphate
  modified_base 11: mod_base = OTHER; note = 2'-fluoroadenosine-3'-phosphate
  modified_base 12: mod_base = OTHER; note = 2'-O-methyluridine-3'-phosphate
  modified_base 13: mod_base = OTHER; note = 2'-O-methylguanosine-3'-phosphate
  modified_base 14: mod_base = OTHER; note = 2'-O-methyluridine-3'-phosphate
  modified_base 15: mod_base = OTHER; note = 2'-O-methyladenosine-3'-phosphate
  modified_base 16: mod_base = OTHER; note = 2'-O-methyladenosine-3'-phosphate
  modified_base 17: mod_base = OTHER; note = 2'-O-methyluridine-3'-phosphate
  modified_base 18: mod_base = OTHER; note = 2'-O-methyladenosine-3'-phosphate
  modified_base 19: mod_base = OTHER; note = 2'-O-methyluridine-3'-phosphorothioate
  modified_base 20: mod_base = OTHER; note = 2'-O-methylcytidine-3'-phosphorothioate
  modified_base 21: mod_base = OTHER; note = 2'-O-methyladenosine-3'-phosphate
ttttctccctatgtaatatca

SEQ ID NO: 1414 - RNA, 21 nt, synthetic construct
  source 1..21: mol_type = other RNA
  modified_base 1: mod_base = OTHER; note = 2'-O-methyluridine-3'-phosphorothioate
  modified_base 2: mod_base = OTHER; note = 2'-O-methylguanosine-3'-phosphorothioate
  modified_base 3: mod_base = OTHER; note = 2'-O-methylcytidine-3'-phosphate
  modified_base 4: mod_base = OTHER; note = 2'-O-methyluridine-3'-phosphate
  modified_base 5: mod_base = OTHER; note = 2'-O-methyluridine-3'-phosphate
  modified_base 6: mod_base = OTHER; note 1-((2R,3R,4R,5R)-3-(docosyloxy)-4-hydroxy-5-(hydroxymethyl) tetrahydrofuran-2-yl)pyrimidine-2,4(1H,3H)-dione
  modified_base 7: mod_base = OTHER; note = 2'-fluorocytidine-3'-phosphate
  modified_base 8: mod_base = OTHER; note = 2'-O-methyluridine-3'-phosphate
  modified_base 9: mod_base = OTHER; note = 2'-fluorouridine-3'-phosphate
  modified_base 10: mod_base = OTHER; note = 2'-fluorocytidine-3'-phosphate
  modified_base 11: mod_base = OTHER; note = 2'-fluorouridine-3'-phosphate
  modified_base 12: mod_base = OTHER; note = 2'-O-methyladenosine-3'-phosphate
  modified_base 13: mod_base = OTHER; note = 2'-O-methyluridine-3'-phosphate
  modified_base 14: mod_base = OTHER; note = 2'-O-methylguanosine-3'-phosphate
  modified_base 15: mod_base = OTHER; note = 2'-O-methyluridine-3'-phosphate
  modified_base 16: mod_base = OTHER; note = 2'-O-methylcytidine-3'-phosphate
  modified_base 17: mod_base = OTHER; note = 2'-O-methyluridine-3'-phosphate
  modified_base 18: mod_base = OTHER; note = 2'-O-methyladenosine-3'-phosphate
  modified_base 19: mod_base = OTHER; note = 2'-O-methyladenosine-3'-phosphorothioate
  modified_base 20: mod_base = OTHER; note = 2'-O-methyladenosine-3'-phosphorothioate
  modified_base 21: mod_base = OTHER; note = 2'-O-methyladenosine-3'-phosphate
tgctttcttctatgtctaaaa

SEQ ID NO: 1415 - RNA, 21 nt, synthetic construct
  source 1..21: mol_type = other RNA
  modified_base 1: mod_base = OTHER; note = 2'-O-methyladenosine-3'-phosphorothioate
  modified_base 2: mod_base = OTHER; note = 2'-O-methylcytidine-3'-phosphorothioate
  modified_base 3: mod_base = OTHER; note = 2'-O-methylcytidine-3'-phosphate
  modified_base 4: mod_base = OTHER; note = 2'-O-methyluridine-3'-phosphate
  modified_base 5: mod_base = OTHER; note = 2'-O-methylguanosine-3'-phosphate
  modified_base 6: mod_base = OTHER; note 4-amino-1-((2R,3R,4R,5R)-3-(docosyloxy)-4-hydroxy-5-(hydrox ymethyl)tetrahydrofuran-2-yl)pyrimidin-2(1H)-one
  modified_base 7: mod_base = OTHER; note = 2'-fluorouridine-3'-phosphate
  modified_base 8: mod_base = OTHER; note = 2'-O-methyluridine-3'-phosphate
  modified_base 9: mod_base = OTHER; note = 2'-fluoroadenosine-3'-phosphate
  modified_base 10: mod_base = OTHER; note = 2'-fluoroguanosine-3'-phosphate
  modified_base 11: mod_base = OTHER; note = 2'-fluorocytidine-3'-phosphate
  modified_base 12: mod_base = OTHER; note = 2'-O-methyladenosine-3'-phosphate
  modified_base 13: mod_base = OTHER; note = 2'-O-methyladenosine-3'-phosphate
  modified_base 14: mod_base = OTHER; note = 2'-O-methyladenosine-3'-phosphate
  modified_base 15: mod_base = OTHER; note = 2'-O-methyluridine-3'-phosphate
  modified_base 16: mod_base = OTHER; note = 2'-O-methylcytidine-3'-phosphate
  modified_base 17: mod_base = OTHER; note = 2'-O-methylguanosine-3'-phosphate
  modified_base 18: mod_base = OTHER; note = 2'-O-methyluridine-3'-phosphate
  modified_base 19: mod_base = OTHER; note = 2'-O-methylcytidine-3'-phosphorothioate
  modified_base 20: mod_base = OTHER; note = 2'-O-methyluridine-3'-phosphorothioate
  modified_base 21: mod_base = OTHER; note = 2'-O-methyladenosine-3'-phosphate
acctgcttagcaaatcgtcta

SEQ ID NO: 1416 - RNA, 21 nt, synthetic construct
  source 1..21: mol_type = other RNA
  modified_base 1: mod_base = OTHER; note = 2'-O-methyladenosine-3'-phosphorothioate
  modified_base 2: mod_base = OTHER; note = 2'-O-methyluridine-3'-phosphorothioate
  modified_base 3: mod_base = OTHER; note = 2'-O-methyladenosine-3'-phosphate
  modified_base 4: mod_base = OTHER; note = 2'-O-methyluridine-3'-phosphate
  modified_base 5: mod_base = OTHER; note = 2'-O-methyluridine-3'-phosphate
  modified_base 6: mod_base = OTHER; note 4-amino-1-((2R,3R,4R,5R)-3-(docosyloxy)-4-hydroxy-5-(hydrox ymethyl)tetrahydrofuran-2-yl)pyrimidin-2(1H)-one
  modified_base 7: mod_base = OTHER; note = 2'-fluorocytidine-3'-phosphate
  modified_base 8: mod_base = OTHER; note = 2'-O-methyluridine-3'-phosphate
  modified_base 9: mod_base = OTHER; note = 2'-fluorocytidine-3'-phosphate
  modified_base 10: mod_base = OTHER; note = 2'-fluorouridine-3'-phosphate
  modified_base 11: mod_base = OTHER; note = 2'-fluoroadenosine-3'-phosphate
  modified_base 12: mod_base = OTHER; note = 2'-O-methylcytidine-3'-phosphate
  modified_base 13: mod_base = OTHER; note = 2'-O-methylcytidine-3'-phosphate
  modified_base 14: mod_base = OTHER; note = 2'-O-methylcytidine-3'-phosphate
  modified_base 15: mod_base = OTHER; note = 2'-O-methyluridine-3'-phosphate
  modified_base 16: mod_base = OTHER; note = 2'-O-methyluridine-3'-phosphate
  modified_base 17: mod_base = OTHER; note = 2'-O-methyluridine-3'-phosphate
  modified_base 18: mod_base = OTHER; note = 2'-O-methylcytidine-3'-phosphate
  modified_base 19: mod_base = OTHER; note = 2'-O-methyladenosine-3'-phosphorothioate
  modified_base 20: mod_base = OTHER; note = 2'-O-methylcytidine-3'-phosphorothioate
  modified_base 21: mod_base = OTHER; note = 2'-O-methyladenosine-3'-phosphate
atattcctctaccctttcaca

SEQ ID NO: 1417 - RNA, 21 nt, synthetic construct
  source 1..21: mol_type = other RNA
  modified_base 1: mod_base = OTHER; note = 2'-O-methyluridine-3'-phosphorothioate
  modified_base 2: mod_base = OTHER; note = 2'-O-methylcytidine-3'-phosphorothioate
  modified_base 3: mod_base = OTHER; note = 2'-O-methylcytidine-3'-phosphate
  modified_base 4: mod_base = OTHER; note = 2'-O-methylcytidine-3'-phosphate
  modified_base 5: mod_base = OTHER; note = 2'-O-methyladenosine-3'-phosphate
  modified_base 6: mod_base = OTHER; note 4-amino-1-((2R,3R,4R,5R)-3-(docosyloxy)-4-hydroxy-5-(hydrox ymethyl)tetrahydrofuran-2-yl)pyrimidin-2(1H)-one
  modified_base 7: mod_base = OTHER; note = 2'-fluorouridine-3'-phosphate
  modified_base 8: mod_base = OTHER; note = 2'-O-methyluridine-3'-phosphate
  modified_base 9: mod_base = OTHER; note = 2'-fluorouridine-3'-phosphate
  modified_base 10: mod_base = OTHER; note = 2'-fluorouridine-3'-phosphate
  modified_base 11: mod_base = OTHER; note = 2'-fluorocytidine-3'-phosphate
  modified_base 12: mod_base = OTHER; note = 2'-O-methyluridine-3'-phosphate
  modified_base 13: mod_base = OTHER; note = 2'-O-methyluridine-3'-phosphate
  modified_base 14: mod_base = OTHER; note = 2'-O-methyluridine-3'-phosphate
  modified_base 15: mod_base = OTHER; note = 2'-O-methylguanosine-3'-phosphate
  modified_base 16: mod_base = OTHER; note = 2'-O-methylguanosine-3'-phosphate
  modified_base 17: mod_base = OTHER; note = 2'-O-methylguanosine-3'-phosphate
  modified_base 18: mod_base = OTHER; note = 2'-O-methyluridine-3'-phosphate
  modified_base 19: mod_base = OTHER; note = 2'-O-methyluridine-3'-phosphorothioate
  modified_base 20: mod_base = OTHER; note = 2'-O-methyluridine-3'-phosphorothioate
  modified_base 21: mod_base = OTHER; note = 2'-O-methyladenosine-3'-phosphate
tcccacttttctttgggttta

SEQ ID NO: 1418 - RNA, 21 nt, synthetic construct
  source 1..21: mol_type = other RNA
  modified_base 1: mod_base = OTHER; note = 2'-O-methyladenosine-3'-phosphorothioate
  modified_base 2: mod_base = OTHER; note = 2'-O-methylguanosine-3'-phosphorothioate
  modified_base 3: mod_base = OTHER; note = 2'-O-methylguanosine-3'-phosphate
  modified_base 4: mod_base = OTHER; note = 2'-O-methylcytidine-3'-phosphate
  modified_base 5: mod_base = OTHER; note = 2'-O-methyluridine-3'-phosphate
  modified_base 6: mod_base = OTHER; note 1-((2R,3R,4R,5R)-3-(docosyloxy)-4-hydroxy-5-(hydroxymethyl) tetrahydrofuran-2-yl)pyrimidine-2,4(1H,3H)-dione
  modified_base 7: mod_base = OTHER; note = 2'-fluorocytidine-3'-phosphate
  modified_base 8: mod_base = OTHER; note = 2'-O-methyluridine-3'-phosphate
  modified_base 9: mod_base = OTHER; note = 2'-fluorouridine-3'-phosphate
  modified_base 10: mod_base = OTHER; note = 2'-fluoroguanosine-3'-phosphate
  modified_base 11: mod_base = OTHER; note = 2'-fluorouridine-3'-phosphate
  modified_base 12: mod_base = OTHER; note = 2'-O-methyladenosine-3'-phosphate
  modified_base 13: mod_base = OTHER; note = 2'-O-methyluridine-3'-phosphate
  modified_base 14: mod_base = OTHER; note = 2'-O-methyladenosine-3'-phosphate
  modified_base 15: mod_base = OTHER; note = 2'-O-methyluridine-3'-phosphate
  modified_base 16: mod_base = OTHER; note = 2'-O-methyladenosine-3'-phosphate
  modified_base 17: mod_base = OTHER; note = 2'-O-methylcytidine-3'-phosphate
  modified_base 18: mod_base = OTHER; note = 2'-O-methyluridine-3'-phosphate
  modified_base 19: mod_base = OTHER; note = 2'-O-methyluridine-3'-phosphorothioate
  modified_base 20: mod_base = OTHER; note = 2'-O-methyladenosine-3'-phosphorothioate
  modified_base 21: mod_base = OTHER; note = 2'-O-methyladenosine-3'-phosphate
aggcttcttgtatatacttaa

SEQ ID NO: 1419 - RNA, 21 nt, synthetic construct
  source 1..21: mol_type = other RNA
  modified_base 1: mod_base = OTHER; note = 2'-O-methyladenosine-3'-phosphorothioate
  modified_base 2: mod_base = OTHER; note = 2'-O-methyladenosine-3'-phosphorothioate
  modified_base 3: mod_base = OTHER; note = 2'-O-methyladenosine-3'-phosphate
  modified_base 4: mod_base = OTHER; note = 2'-O-methylcytidine-3'-phosphate
  modified_base 5: mod_base = OTHER; note = 2'-O-methyluridine-3'-phosphate
  modified_base 6: mod_base = OTHER; note 1-((2R,3R,4R,5R)-3-(docosyloxy)-4-hydroxy-5-(hydroxymethyl) tetrahydrofuran-2-yl)pyrimidine-2,4(1H,3H)-dione
  modified_base 7: mod_base = OTHER; note = 2'-fluoroguanosine-3'-phosphate
  modified_base 8: mod_base = OTHER; note = 2'-O-methyladenosine-3'-phosphate
  modified_base 9: mod_base = OTHER; note = 2'-fluorouridine-3'-phosphate
  modified_base 10: mod_base = OTHER; note = 2'-fluorocytidine-3'-phosphate
  modified_base 11: mod_base = OTHER; note = 2'-fluorouridine-3'-phosphate
  modified_base 12: mod_base = OTHER; note = 2'-O-methylguanosine-3'-phosphate
  modified_base 13: mod_base = OTHER; note = 2'-O-methyluridine-3'-phosphate
  modified_base 14: mod_base = OTHER; note = 2'-O-methylguanosine-3'-phosphate
  modified_base 15: mod_base = OTHER; note = 2'-O-methyluridine-3'-phosphate
  modified_base 16: mod_base = OTHER; note = 2'-O-methyluridine-3'-phosphate
  modified_base 17: mod_base = OTHER; note = 2'-O-methyluridine-3'-phosphate
  modified_base 18: mod_base = OTHER; note = 2'-O-methylcytidine-3'-phosphate
  modified_base 19: mod_base = OTHER; note = 2'-O-methyladenosine-3'-phosphorothioate
  modified_base 20: mod_base = OTHER; note = 2'-O-methylguanosine-3'-phosphorothioate
  modified_base 21: mod_base = OTHER; note = 2'-O-methyladenosine-3'-phosphate
aaacttgatctgtgtttcaga

SEQ ID NO: 1420 - RNA, 21 nt, synthetic construct
  source 1..21: mol_type = other RNA
  modified_base 1: mod_base = OTHER; note = 2'-O-methyluridine-3'-phosphorothioate
  modified_base 2: mod_base = OTHER; note = 2'-O-methyluridine-3'-phosphorothioate
  modified_base 3: mod_base = OTHER; note = 2'-O-methyluridine-3'-phosphate
  modified_base 4: mod_base = OTHER; note = 2'-O-methylguanosine-3'-phosphate
  modified_base 5: mod_base = OTHER; note = 2'-O-methylcytidine-3'-phosphate
  modified_base 6: mod_base = OTHER; note 1-((2R,3R,4R,5R)-3-(docosyloxy)-4-hydroxy-5-(hydroxymethyl) tetrahydrofuran-2-yl)pyrimidine-2,4(1H,3H)-dione
  modified_base 7: mod_base = OTHER; note = 2'-fluorouridine-3'-phosphate
  modified_base 8: mod_base = OTHER; note = 2'-O-methyluridine-3'-phosphate
  modified_base 9: mod_base = OTHER; note = 2'-fluoroadenosine-3'-phosphate
  modified_base 10: mod_base = OTHER; note = 2'-fluoroadenosine-3'-phosphate
  modified_base 11: mod_base = OTHER; note = 2'-fluorouridine-3'-phosphate
  modified_base 12: mod_base = OTHER; note = 2'-O-methylguanosine-3'-phosphate
  modified_base 13: mod_base = OTHER; note = 2'-O-methylcytidine-3'-phosphate
  modified_base 14: mod_base = OTHER; note = 2'-O-methyluridine-3'-phosphate
  modified_base 15: mod_base = OTHER; note = 2'-O-methyladenosine-3'-phosphate
  modified_base 16: mod_base = OTHER; note = 2'-O-methyladenosine-3'-phosphate
  modified_base 17: mod_base = OTHER; note = 2'-O-methyladenosine-3'-phosphate
  modified_base 18: mod_base = OTHER; note = 2'-O-methyluridine-3'-phosphate
  modified_base 19: mod_base = OTHER; note = 2'-O-methyluridine-3'-phosphorothioate
  modified_base 20: mod_base = OTHER; note = 2'-O-methylcytidine-3'-phosphorothioate
  modified_base 21: mod_base = OTHER; note = 2'-O-methyladenosine-3'-phosphate
tttgctttaatgctaaattca

SEQ ID NO: 1421 - RNA, 21 nt, synthetic construct
  source 1..21: mol_type = other RNA
  modified_base 1: mod_base = OTHER; note = 2'-O-methyladenosine-3'-phosphorothioate
  modified_base 2: mod_base = OTHER; note = 2'-O-methylguanosine-3'-phosphorothioate
  modified_base 3: mod_base = OTHER; note = 2'-O-methyladenosine-3'-phosphate
  modified_base 4: mod_base = OTHER; note = 2'-O-methylcytidine-3'-phosphate
  modified_base 5: mod_base = OTHER; note = 2'-O-methyluridine-3'-phosphate
  modified_base 6: mod_base = OTHER; note (2R,3S,4S,5R)-5-(6-amino-9H-purin-9-yl)-4-(docosyloxy)-2-(h ydroxymethyl)tetrahydrofuran-3-ol
  modified_base 7: mod_base = OTHER; note = 2'-fluoroguanosine-3'-phosphate
  modified_base 8: mod_base = OTHER; note = 2'-O-methylcytidine-3'-phosphate
  modified_base 9: mod_base = OTHER; note = 2'-fluorouridine-3'-phosphate
  modified_base 10: mod_base = OTHER; note = 2'-fluoroguanosine-3'-phosphate
  modified_base 11: mod_base = OTHER; note = 2'-fluorouridine-3'-phosphate
  modified_base 12: mod_base = OTHER; note = 2'-O-methyluridine-3'-phosphate
  modified_base 13: mod_base = OTHER; note = 2'-O-methyladenosine-3'-phosphate
  modified_base 14: mod_base = OTHER; note = 2'-O-methyluridine-3'-phosphate
  modified_base 15: mod_base = OTHER; note = 2'-O-methyluridine-3'-phosphate
  modified_base 16: mod_base = OTHER; note = 2'-O-methyluridine-3'-phosphate
  modified_base 17: mod_base = OTHER; note = 2'-O-methylguanosine-3'-phosphate
  modified_base 18: mod_base = OTHER; note = 2'-O-methyluridine-3'-phosphate
  modified_base 19: mod_base = OTHER; note = 2'-O-methyladenosine-3'-phosphorothioate
  modified_base 20: mod_base = OTHER; note = 2'-O-methyluridine-3'-phosphorothioate
  modified_base 21: mod_base = OTHER; note = 2'-O-methyladenosine-3'-phosphate
agactagctgttatttgtata

SEQ ID NO: 1422 - RNA, 21 nt, synthetic construct
  source 1..21: mol_type = other RNA
  modified_base 1: mod_base = OTHER; note = 2'-O-methyluridine-3'-phosphorothioate
  modified_base 2: mod_base = OTHER; note = 2'-O-methyluridine-3'-phosphorothioate
  modified_base 3: mod_base = OTHER; note = 2'-O-methylcytidine-3'-phosphate
  modified_base 4: mod_base = OTHER; note = 2'-O-methylcytidine-3'-phosphate
  modified_base 5: mod_base = OTHER; note = 2'-O-methyluridine-3'-phosphate
  modified_base 6: mod_base = OTHER; note (2R,3S,4S,5R)-5-(6-amino-9H-purin-9-yl)-4-(docosyloxy)-2-(h ydroxymethyl)tetrahydrofuran-3-ol
  modified_base 7: mod_base = OTHER; note = 2'-fluorocytidine-3'-phosphate
  modified_base 8: mod_base = OTHER; note = 2'-O-methyluridine-3'-phosphate
  modified_base 9: mod_base = OTHER; note = 2'-fluorouridine-3'-phosphate
  modified_base 10: mod_base = OTHER; note = 2'-fluorouridine-3'-phosphate
  modified_base 11: mod_base = OTHER; note = 2'-fluorocytidine-3'-phosphate
  modified_base 12: mod_base = OTHER; note = 2'-O-methylcytidine-3'-phosphate
  modified_base 13: mod_base = OTHER; note = 2'-O-methylcytidine-3'-phosphate
  modified_base 14: mod_base = OTHER; note = 2'-O-methyluridine-3'-phosphate
  modified_base 15: mod_base = OTHER; note = 2'-O-methyluridine-3'-phosphate
  modified_base 16: mod_base = OTHER; note = 2'-O-methylguanosine-3'-phosphate
  modified_base 17: mod_base = OTHER; note = 2'-O-methyladenosine-3'-phosphate
  modified_base 18: mod_base = OTHER; note = 2'-O-methyladenosine-3'-phosphate
  modified_base 19: mod_base = OTHER; note = 2'-O-methyluridine-3'-phosphorothioate
  modified_base 20: mod_base = OTHER; note = 2'-O-methyladenosine-3'-phosphorothioate
  modified_base 21: mod_base = OTHER; note = 2'-O-methyladenosine-3'-phosphate
ttcctactttcccttgaataa

SEQ ID NO: 1423 - RNA, 21 nt, synthetic construct
  source 1..21: mol_type = other RNA
  modified_base 1: mod_base = OTHER; note = 2'-O-methylcytidine-3'-phosphorothioate
  modified_base 2: mod_base = OTHER; note = 2'-O-methyladenosine-3'-phosphorothioate
  modified_base 3: mod_base = OTHER; note = 2'-O-methylguanosine-3'-phosphate
  modified_base 4: mod_base = OTHER; note = 2'-O-methyladenosine-3'-phosphate
  modified_base 5: mod_base = OTHER; note = 2'-O-methyladenosine-3'-phosphate
  modified_base 6: mod_base = OTHER; note 4-amino-1-((2R,3R,4R,5R)-3-(docosyloxy)-4-hydroxy-5-(hydrox ymethyl)tetrahydrofuran-2-yl)pyrimidin-2(1H)-one
  modified_base 7: mod_base = OTHER; note = 2'-fluorouridine-3'-phosphate
  modified_base 8: mod_base = OTHER; note = 2'-O-methylguanosine-3'-phosphate
  modified_base 9: mod_base = OTHER; note = 2'-fluoroadenosine-3'-phosphate
  modified_base 10: mod_base = OTHER; note = 2'-fluoroadenosine-3'-phosphate
  modified_base 11: mod_base = OTHER; note = 2'-fluorouridine-3'-phosphate
  modified_base 12: mod_base = OTHER; note = 2'-O-methylguanosine-3'-phosphate
  modified_base 13: mod_base = OTHER; note = 2'-O-methylcytidine-3'-phosphate
  modified_base 14: mod_base = OTHER; note = 2'-O-methyluridine-3'-phosphate
  modified_base 15: mod_base = OTHER; note = 2'-O-methylcytidine-3'-phosphate
  modified_base 16: mod_base = OTHER; note = 2'-O-methyladenosine-3'-phosphate
  modified_base 17: mod_base = OTHER; note = 2'-O-methyladenosine-3'-phosphate
  modified_base 18: mod_base = OTHER; note = 2'-O-methylguanosine-3'-phosphate
  modified_base 19: mod_base = OTHER; note = 2'-O-methyluridine-3'-phosphorothioate
  modified_base 20: mod_base = OTHER; note = 2'-O-methylcytidine-3'-phosphorothioate
  modified_base 21: mod_base = OTHER; note = 2'-O-methyladenosine-3'-phosphate
cagaactgaatgctcaagtca

SEQ ID NO: 1424 - RNA, 21 nt, synthetic construct
  source 1..21: mol_type = other RNA
  modified_base 1: mod_base = OTHER; note = 2'-O-methyluridine-3'-phosphorothioate
  modified_base 2: mod_base = OTHER; note = 2'-O-methylcytidine-3'-phosphorothioate
  modified_base 3: mod_base = OTHER; note = 2'-O-methyluridine-3'-phosphate
  modified_base 4: mod_base = OTHER; note = 2'-O-methyluridine-3'-phosphate
  modified_base 5: mod_base = OTHER; note = 2'-O-methylguanosine-3'-phosphate
  modified_base 6: mod_base = OTHER; note 1-((2R,3R,4R,5R)-3-(docosyloxy)-4-hydroxy-5-(hydroxymethyl) tetrahydrofuran-2-yl)pyrimidine-2,4(1H,3H)-dione
  modified_base 7: mod_base = OTHER; note = 2'-fluorouridine-3'-phosphate
  modified_base 8: mod_base = OTHER; note = 2'-O-methyladenosine-3'-phosphate
  modified_base 9: mod_base = OTHER; note = 2'-fluorocytidine-3'-phosphate
  modified_base 10: mod_base = OTHER; note = 2'-fluorouridine-3'-phosphate
  modified_base 11: mod_base = OTHER; note = 2'-fluoroadenosine-3'-phosphate
  modified_base 12: mod_base = OTHER; note = 2'-O-methyladenosine-3'-phosphate
  modified_base 13: mod_base = OTHER; note = 2'-O-methyluridine-3'-phosphate
  modified_base 14: mod_base = OTHER; note = 2'-O-methyluridine-3'-phosphate
  modified_base 15: mod_base = OTHER; note = 2'-O-methyluridine-3'-phosphate
  modified_base 16: mod_base = OTHER; note = 2'-O-methylcytidine-3'-phosphate
  modified_base 17: mod_base = OTHER; note = 2'-O-methyluridine-3'-phosphate
  modified_base 18: mod_base = OTHER; note = 2'-O-methylcytidine-3'-phosphate
  modified_base 19: mod_base = OTHER; note = 2'-O-methyladenosine-3'-phosphorothioate
  modified_base 20: mod_base = OTHER; note = 2'-O-methyluridine-3'-phosphorothioate
  modified_base 21: mod_base = OTHER; note = 2'-O-methyladenosine-3'-phosphate
tcttgttactaatttctcata

SEQ ID NO: 1425 - RNA, 21 nt, synthetic construct
  source 1..21: mol_type = other RNA
  modified_base 1: mod_base = OTHER; note = 2'-O-methylcytidine-3'-phosphorothioate
  modified_base 2: mod_base = OTHER; note = 2'-O-methyluridine-3'-phosphorothioate
  modified_base 3: mod_base = OTHER; note = 2'-O-methylcytidine-3'-phosphate
  modified_base 4: mod_base = OTHER; note = 2'-O-methyladenosine-3'-phosphate
  modified_base 5: mod_base = OTHER; note = 2'-O-methylguanosine-3'-phosphate
  modified_base 6: mod_base = OTHER; note 1-((2R,3R,4R,5R)-3-(docosyloxy)-4-hydroxy-5-(hydroxymethyl) tetrahydrofuran-2-yl)pyrimidine-2,4(1H,3H)-dione
  modified_base 7: mod_base = OTHER; note = 2'-fluoroguanosine-3'-phosphate
  modified_base 8: mod_base = OTHER; note = 2'-O-methyladenosine-3'-phosphate
  modified_base 9: mod_base = OTHER; note = 2'-fluorouridine-3'-phosphate
  modified_base 10: mod_base = OTHER; note = 2'-fluoroadenosine-3'-phosphate
  modified_base 11: mod_base = OTHER; note = 2'-fluoroguanosine-3'-phosphate
  modified_base 12: mod_base = OTHER; note = 2'-O-methylcytidine-3'-phosphate
  modified_base 13: mod_base = OTHER; note = 2'-O-methylcytidine-3'-phosphate
  modified_base 14: mod_base = OTHER; note = 2'-O-methyluridine-3'-phosphate
  modified_base 15: mod_base = OTHER; note = 2'-O-methyluridine-3'-phosphate
  modified_base 16: mod_base = OTHER; note = 2'-O-methyluridine-3'-phosphate
  modified_base 17: mod_base = OTHER; note = 2'-O-methyladenosine-3'-phosphate
  modified_base 18: mod_base = OTHER; note = 2'-O-methyluridine-3'-phosphate
  modified_base 19: mod_base = OTHER; note = 2'-O-methyladenosine-3'-phosphorothioate
  modified_base 20: mod_base = OTHER; note = 2'-O-methylcytidine-3'-phosphorothioate
  modified_base 21: mod_base = OTHER; note = 2'-O-methyladenosine-3'-phosphate
ctcagtgatagcctttataca

SEQ ID NO: 1426 - RNA, 21 nt, synthetic construct
  source 1..21: mol_type = other RNA
  modified_base 1: mod_base = OTHER; note = 2'-O-methyluridine-3'-phosphorothioate
  modified_base 2: mod_base = OTHER; note = 2'-O-methyluridine-3'-phosphorothioate
  modified_base 3: mod_base = OTHER; note = 2'-O-methyluridine-3'-phosphate
  modified_base 4: mod_base = OTHER; note = 2'-O-methyluridine-3'-phosphate
  modified_base 5: mod_base = OTHER; note = 2'-O-methyladenosine-3'-phosphate
  modified_base 6: mod_base = OTHER; note 1-((2R,3R,4R,5R)-3-(docosyloxy)-4-hydroxy-5-(hydroxymethyl) tetrahydrofuran-2-yl)pyrimidine-2,4(1H,3H)-dione
  modified_base 7: mod_base = OTHER; note = 2'-fluoroguanosine-3'-phosphate
  modified_base 8: mod_base = OTHER; note = 2'-O-methylcytidine-3'-phosphate
  modified_base 9: mod_base = OTHER; note = 2'-fluorouridine-3'-phosphate
  modified_base 10: mod_base = OTHER; note = 2'-fluorocytidine-3'-phosphate
  modified_base 11: mod_base = OTHER; note = 2'-fluorocytidine-3'-phosphate
  modified_base 12: mod_base = OTHER; note = 2'-O-methyluridine-3'-phosphate
  modified_base 13: mod_base = OTHER; note = 2'-O-methyladenosine-3'-phosphate
  modified_base 14: mod_base = OTHER; note = 2'-O-methyladenosine-3'-phosphate
  modified_base 15: mod_base = OTHER; note = 2'-O-methyladenosine-3'-phosphate
  modified_base 16: mod_base = OTHER; note = 2'-O-methyladenosine-3'-phosphate
  modified_base 17: mod_base = OTHER; note = 2'-O-methylcytidine-3'-phosphate
  modified_base 18: mod_base = OTHER; note = 2'-O-methyladenosine-3'-phosphate
  modified_base 19: mod_base = OTHER; note = 2'-O-methyluridine-3'-phosphorothioate
  modified_base 20: mod_base = OTHER; note = 2'-O-methylcytidine-3'-phosphorothioate
  modified_base 21: mod_base = OTHER; note = 2'-O-methyladenosine-3'-phosphate
ttttatgctcctaaaacatca

SEQ ID NO: 1427 - RNA, 21 nt, synthetic construct
  source 1..21: mol_type = other RNA
  modified_base 1: mod_base = OTHER; note = 2'-O-methyluridine-3'-phosphorothioate
  modified_base 2: mod_base = OTHER; note = 2'-O-methyluridine-3'-phosphorothioate
  modified_base 3: mod_base = OTHER; note = 2'-O-methylcytidine-3'-phosphate
  modified_base 4: mod_base = OTHER; note = 2'-O-methyluridine-3'-phosphate
  modified_base 5: mod_base = OTHER; note = 2'-O-methylcytidine-3'-phosphate
  modified_base 6: mod_base = OTHER; note 4-amino-1-((2R,3R,4R,5R)-3-(docosyloxy)-4-hydroxy-5-(hydrox ymethyl)tetrahydrofuran-2-yl)pyrimidin-2(1H)-one
  modified_base 7: mod_base = OTHER; note = 2'-fluorouridine-3'-phosphate
  modified_base 8: mod_base = OTHER; note = 2'-O-methyluridine-3'-phosphate
  modified_base 9: mod_base = OTHER; note = 2'-fluoroadenosine-3'-phosphate
  modified_base 10: mod_base = OTHER; note = 2'-fluoroguanosine-3'-phosphate
  modified_base 11: mod_base = OTHER; note = 2'-fluoroguanosine-3'-phosphate
  modified_base 12: mod_base = OTHER; note = 2'-O-methyluridine-3'-phosphate
  modified_base 13: mod_base = OTHER; note = 2'-O-methyluridine-3'-phosphate
  modified_base 14: mod_base = OTHER; note = 2'-O-methyladenosine-3'-phosphate
  modified_base 15: mod_base = OTHER; note = 2'-O-methyluridine-3'-phosphate
  modified_base 16: mod_base = OTHER; note = 2'-O-methylguanosine-3'-phosphate
  modified_base 17: mod_base = OTHER; note = 2'-O-methyluridine-3'-phosphate
  modified_base 18: mod_base = OTHER; note = 2'-O-methyluridine-3'-phosphate
  modified_base 19: mod_base = OTHER; note = 2'-O-methylcytidine-3'-phosphorothioate
  modified_base 20: mod_base = OTHER; note = 2'-O-methyladenosine-3'-phosphorothioate
  modified_base 21: mod_base = OTHER; note = 2'-O-methyladenosine-3'-phosphate
ttctccttaggttatgttcaa

SEQ ID NO: 1428 - RNA, 21 nt, synthetic construct
  source 1..21: mol_type = other RNA
  modified_base 1: mod_base = OTHER; note = 2'-O-methyladenosine-3'-phosphorothioate
  modified_base 2: mod_base = OTHER; note = 2'-O-methyluridine-3'-phosphorothioate
  modified_base 3: mod_base = OTHER; note = 2'-O-methyluridine-3'-phosphate
  modified_base 4: mod_base = OTHER; note = 2'-O-methylguanosine-3'-phosphate
  modified_base 5: mod_base = OTHER; note = 2'-O-methylcytidine-3'-phosphate
  modified_base 6: mod_base = OTHER; note 1-((2R,3R,4R,5R)-3-(docosyloxy)-4-hydroxy-5-(hydroxymethyl) tetrahydrofuran-2-yl)pyrimidine-2,4(1H,3H)-dione
  modified_base 7: mod_base = OTHER; note = 2'-fluorocytidine-3'-phosphate
  modified_base 8: mod_base = OTHER; note = 2'-O-methyladenosine-3'-phosphate
  modified_base 9: mod_base = OTHER; note = 2'-fluorouridine-3'-phosphate
  modified_base 10: mod_base = OTHER; note = 2'-fluorocytidine-3'-phosphate
  modified_base 11: mod_base = OTHER; note = 2'-fluoroguanosine-3'-phosphate
  modified_base 12: mod_base = OTHER; note = 2'-O-methyladenosine-3'-phosphate
  modified_base 13: mod_base = OTHER; note = 2'-O-methylguanosine-3'-phosphate
  modified_base 14: mod_base = OTHER; note = 2'-O-methyladenosine-3'-phosphate
  modified_base 15: mod_base = OTHER; note = 2'-O-methylcytidine-3'-phosphate
  modified_base 16: mod_base = OTHER; note = 2'-O-methyladenosine-3'-phosphate
  modified_base 17: mod_base = OTHER; note = 2'-O-methyluridine-3'-phosphate
  modified_base 18: mod_base = OTHER; note = 2'-O-methyladenosine-3'-phosphate
  modified_base 19: mod_base = OTHER; note = 2'-O-methyladenosine-3'-phosphorothioate
  modified_base 20: mod_base = OTHER; note = 2'-O-methyladenosine-3'-phosphorothioate
  modified_base 21: mod_base = OTHER; note = 2'-O-methyladenosine-3'-phosphate
attgctcatcgagacataaaa

SEQ ID NO: 1429 - RNA, 21 nt, synthetic construct
  source 1..21: mol_type = other RNA
  modified_base 1: mod_base = OTHER; note = 2'-O-methylcytidine-3'-phosphorothioate
  modified_base 2: mod_base = OTHER; note = 2'-O-methylcytidine-3'-phosphorothioate
  modified_base 3: mod_base = OTHER; note = 2'-O-methyluridine-3'-phosphate
  modified_base 4: mod_base = OTHER; note = 2'-O-methyluridine-3'-phosphate
  modified_base 5: mod_base = OTHER; note = 2'-O-methyluridine-3'-phosphate
  modified_base 6: mod_base = OTHER; note 2-amino-9-((2R,3S,4S,5R)-3-(docosyloxy)-4-hydroxy-5-(hydrox ymethyl)tetrahydrofuran-2-yl)-1,9-dihydro-6H-purin-6-one
  modified_base 7: mod_base = OTHER; note = 2'-fluorouridine-3'-phosphate
  modified_base 8: mod_base = OTHER; note = 2'-O-methyladenosine-3'-phosphate
  modified_base 9: mod_base = OTHER; note = 2'-fluorocytidine-3'-phosphate
  modified_base 10: mod_base = OTHER; note = 2'-fluoroadenosine-3'-phosphate
  modified_base 11: mod_base = OTHER; note = 2'-fluorouridine-3'-phosphate
  modified_base 12: mod_base = OTHER; note = 2'-O-methyladenosine-3'-phosphate
  modified_base 13: mod_base = OTHER; note = 2'-O-methylcytidine-3'-phosphate
  modified_base 14: mod_base = OTHER; note = 2'-O-methyladenosine-3'-phosphate
  modified_base 15: mod_base = OTHER; note = 2'-O-methylcytidine-3'-phosphate
  modified_base 16: mod_base = OTHER; note = 2'-O-methyladenosine-3'-phosphate
  modified_base 17: mod_base = OTHER; note = 2'-O-methylcytidine-3'-phosphate
  modified_base 18: mod_base = OTHER; note = 2'-O-methyluridine-3'-phosphate
  modified_base 19: mod_base = OTHER; note = 2'-O-methyluridine-3'-phosphorothioate
  modified_base 20: mod_base = OTHER; note = 2'-O-methyladenosine-3'-phosphorothioate
  modified_base 21: mod_base = OTHER; note = 2'-O-methyladenosine-3'-phosphate
cctttgtacatacacacttaa

SEQ ID NO: 1430 - RNA, 21 nt, synthetic construct
  source 1..21: mol_type = other RNA
  modified_base 1: mod_base = OTHER; note = 2'-O-methyluridine-3'-phosphorothioate
  modified_base 2: mod_base = OTHER; note = 2'-O-methyluridine-3'-phosphorothioate
  modified_base 3: mod_base = OTHER; note = 2'-O-methylguanosine-3'-phosphate
  modified_base 4: mod_base = OTHER; note = 2'-O-methyladenosine-3'-phosphate
  modified_base 5: mod_base = OTHER; note = 2'-O-methyladenosine-3'-phosphate
  modified_base 6: mod_base = OTHER; note 4-amino-1-((2R,3R,4R,5R)-3-(docosyloxy)-4-hydroxy-5-(hydrox ymethyl)tetrahydrofuran-2-yl)pyrimidin-2(1H)-one
  modified_base 7: mod_base = OTHER; note = 2'-fluorocytidine-3'-phosphate
  modified_base 8: mod_base = OTHER; note = 2'-O-methyladenosine-3'-phosphate
  modified_base 9: mod_base = OTHER; note = 2'-fluoroadenosine-3'-phosphate
  modified_base 10: mod_base = OTHER; note = 2'-fluoroguanosine-3'-phosphate
  modified_base 11: mod_base = OTHER; note = 2'-fluoroadenosine-3'-phosphate
  modified_base 12: mod_base = OTHER; note = 2'-O-methylguanosine-3'-phosphate
  modified_base 13: mod_base = OTHER; note = 2'-O-methylcytidine-3'-phosphate
  modified_base 14: mod_base = OTHER; note = 2'-O-methyladenosine-3'-phosphate
  modified_base 15: mod_base = OTHER; note = 2'-O-methylcytidine-3'-phosphate
  modified_base 16: mod_base = OTHER; note = 2'-O-methyladenosine-3'-phosphate
  modified_base 17: mod_base = OTHER; note = 2'-O-methyluridine-3'-phosphate
  modified_base 18: mod_base = OTHER; note = 2'-O-methylguanosine-3'-phosphate
  modified_base 19: mod_base = OTHER; note = 2'-O-methyladenosine-3'-phosphorothioate
  modified_base 20: mod_base = OTHER; note = 2'-O-methyladenosine-3'-phosphorothioate
  modified_base 21: mod_base = OTHER; note = 2'-O-methyladenosine-3'-phosphate
ttgaaccaagagcacatgaaa

SEQ ID NO: 1431 - RNA, 21 nt, synthetic construct
  source 1..21: mol_type = other RNA
  modified_base 1: mod_base = OTHER; note = 2'-O-methyluridine-3'-phosphorothioate
  modified_base 2: mod_base = OTHER; note = 2'-O-methylcytidine-3'-phosphorothioate
  modified_base 3: mod_base = OTHER; note = 2'-O-methyladenosine-3'-phosphate
  modified_base 4: mod_base = OTHER; note = 2'-O-methylguanosine-3'-phosphate
  modified_base 5: mod_base = OTHER; note = 2'-O-methylguanosine-3'-phosphate
  modified_base 6: mod_base = OTHER; note 2-amino-9-((2R,3S,4S,5R)-3-(docosyloxy)-4-hydroxy-5-(hydrox ymethyl)tetrahydrofuran-2-yl)-1,9-dihydro-6H-purin-6-one
  modified_base 7: mod_base = OTHER; note = 2'-fluoroadenosine-3'-phosphate
  modified_base 8: mod_base = OTHER; note = 2'-O-methyluridine-3'-phosphate
  modified_base 9: mod_base = OTHER; note = 2'-fluorouridine-3'-phosphate
  modified_base 10: mod_base = OTHER; note = 2'-fluorouridine-3'-phosphate
  modified_base 11: mod_base = OTHER; note = 2'-fluorouridine-3'-phosphate
  modified_base 12: mod_base = OTHER; note = 2'-O-methyladenosine-3'-phosphate
  modified_base 13: mod_base = OTHER; note = 2'-O-methyladenosine-3'-phosphate
  modified_base 14: mod_base = OTHER; note = 2'-O-methyladenosine-3'-phosphate
  modified_base 15: mod_base = OTHER; note = 2'-O-methylguanosine-3'-phosphate
  modified_base 16: mod_base = OTHER; note = 2'-O-methyluridine-3'-phosphate
  modified_base 17: mod_base = OTHER; note = 2'-O-methylcytidine-3'-phosphate
  modified_base 18: mod_base = OTHER; note = 2'-O-methyluridine-3'-phosphate
  modified_base 19: mod_base = OTHER; note = 2'-O-methyladenosine-3'-phosphorothioate
  modified_base 20: mod_base = OTHER; note = 2'-O-methyladenosine-3'-phosphorothioate
  modified_base 21: mod_base = OTHER; note = 2'-O-methyladenosine-3'-phosphate
tcagggattttaaagtctaaa

SEQ ID NO: 1432 - RNA, 21 nt, synthetic construct
  source 1..21: mol_type = other RNA
  modified_base 1: mod_base = OTHER; note = 2'-O-methyluridine-3'-phosphorothioate
  modified_base 2: mod_base = OTHER; note = 2'-O-methyladenosine-3'-phosphorothioate
  modified_base 3: mod_base = OTHER; note = 2'-O-methylcytidine-3'-phosphate
  modified_base 4: mod_base = OTHER; note = 2'-O-methyluridine-3'-phosphate
  modified_base 5: mod_base = OTHER; note = 2'-O-methyluridine-3'-phosphate
  modified_base 6: mod_base = OTHER; note 2-amino-9-((2R,3S,4S,5R)-3-(docosyloxy)-4-hydroxy-5-(hydrox ymethyl)tetrahydrofuran-2-yl)-1,9-dihydro-6H-purin-6-one
  modified_base 7: mod_base = OTHER; note = 2'-fluorocytidine-3'-phosphate
  modified_base 8: mod_base = OTHER; note = 2'-O-methyluridine-3'-phosphate
  modified_base 9: mod_base = OTHER; note = 2'-fluorouridine-3'-phosphate
  modified_base 10: mod_base = OTHER; note = 2'-fluoroadenosine-3'-phosphate
  modified_base 11: mod_base = OTHER; note = 2'-fluorouridine-3'-phosphate
  modified_base 12: mod_base = OTHER; note = 2'-O-methyladenosine-3'-phosphate
  modified_base 13: mod_base = OTHER; note = 2'-O-methyladenosine-3'-phosphate
  modified_base 14: mod_base = OTHER; note = 2'-O-methyladenosine-3'-phosphate
  modified_base 15: mod_base = OTHER; note = 2'-O-methylguanosine-3'-phosphate
  modified_base 16: mod_base = OTHER; note = 2'-O-methyluridine-3'-phosphate
  modified_base 17: mod_base = OTHER; note = 2'-O-methylguanosine-3'-phosphate
  modified_base 18: mod_base = OTHER; note = 2'-O-methyladenosine-3'-phosphate
  modified_base 19: mod_base = OTHER; note = 2'-O-methyluridine-3'-phosphorothioate
  modified_base 20: mod_base = OTHER; note = 2'-O-methyladenosine-3'-phosphorothioate
  modified_base 21: mod_base = OTHER; note = 2'-O-methyladenosine-3'-phosphate
tacttgcttataaagtgataa

SEQ ID NO: 1433 - RNA, 21 nt, synthetic construct
  source 1..21: mol_type = other RNA
  modified_base 1: mod_base = OTHER; note = 2'-O-methyladenosine-3'-phosphorothioate
  modified_base 2: mod_base = OTHER; note = 2'-O-methyluridine-3'-phosphorothioate
  modified_base 3: mod_base = OTHER; note = 2'-O-methylguanosine-3'-phosphate
  modified_base 4: mod_base = OTHER; note = 2'-O-methylcytidine-3'-phosphate
  modified_base 5: mod_base = OTHER; note = 2'-O-methyladenosine-3'-phosphate
  modified_base 6: mod_base = OTHER; note 1-((2R,3R,4R,5R)-3-(docosyloxy)-4-hydroxy-5-(hydroxymethyl) tetrahydrofuran-2-yl)pyrimidine-2,4(1H,3H)-dione
  modified_base 7: mod_base = OTHER; note = 2'-fluorocytidine-3'-phosphate
  modified_base 8: mod_base = OTHER; note = 2'-O-methyluridine-3'-phosphate
  modified_base 9: mod_base = OTHER; note = 2'-fluoroadenosine-3'-phosphate
  modified_base 10: mod_base = OTHER; note = 2'-fluoroadenosine-3'-phosphate
  modified_base 11: mod_base = OTHER; note = 2'-fluoroadenosine-3'-phosphate
  modified_base 12: mod_base = OTHER; note = 2'-O-methylcytidine-3'-phosphate
  modified_base 13: mod_base = OTHER; note = 2'-O-methylcytidine-3'-phosphate
  modified_base 14: mod_base = OTHER; note = 2'-O-methyluridine-3'-phosphate
  modified_base 15: mod_base = OTHER; note = 2'-O-methyladenosine-3'-phosphate
  modified_base 16: mod_base = OTHER; note = 2'-O-methylcytidine-3'-phosphate
  modified_base 17: mod_base = OTHER; note = 2'-O-methylcytidine-3'-phosphate
  modified_base 18: mod_base = OTHER; note = 2'-O-methyluridine-3'-phosphate
  modified_base 19: mod_base = OTHER; note = 2'-O-methyluridine-3'-phosphorothioate
  modified_base 20: mod_base = OTHER; note = 2'-O-methylguanosine-3'-phosphorothioate
  modified_base 21: mod_base = OTHER; note = 2'-O-methyladenosine-3'-phosphate
atgcatctaaacctaccttga

SEQ ID NO: 1434 - RNA, 21 nt, synthetic construct
  source 1..21: mol_type = other RNA
  modified_base 1: mod_base = OTHER; note = 2'-O-methyluridine-3'-phosphorothioate
  modified_base 2: mod_base = OTHER; note = 2'-O-methyluridine-3'-phosphorothioate
  modified_base 3: mod_base = OTHER; note = 2'-O-methylguanosine-3'-phosphate
  modified_base 4: mod_base = OTHER; note = 2'-O-methylguanosine-3'-phosphate
  modified_base 5: mod_base = OTHER; note = 2'-O-methylguanosine-3'-phosphate
  modified_base 6: mod_base = OTHER; note (2R,3S,4S,5R)-5-(6-amino-9H-purin-9-yl)-4-(docosyloxy)-2-(h ydroxymethyl)tetrahydrofuran-3-ol
  modified_base 7: mod_base = OTHER; note = 2'-fluoroadenosine-3'-phosphate
  modified_base 8: mod_base = OTHER; note = 2'-O-methyladenosine-3'-phosphate
  modified_base 9: mod_base = OTHER; note = 2'-fluoroadenosine-3'-phosphate
  modified_base 10: mod_base = OTHER; note = 2'-fluorocytidine-3'-phosphate
  modified_base 11: mod_base = OTHER; note = 2'-fluoroadenosine-3'-phosphate
  modified_base 12: mod_base = OTHER; note = 2'-O-methylcytidine-3'-phosphate
  modified_base 13: mod_base = OTHER; note = 2'-O-methyluridine-3'-phosphate
  modified_base 14: mod_base = OTHER; note = 2'-O-methyladenosine-3'-phosphate
  modified_base 15: mod_base = OTHER; note = 2'-O-methyluridine-3'-phosphate
  modified_base 16: mod_base = OTHER; note = 2'-O-methyluridine-3'-phosphate
  modified_base 17: mod_base = OTHER; note = 2'-O-methyladenosine-3'-phosphate
  modified_base 18: mod_base = OTHER; note = 2'-O-methyluridine-3'-phosphate
  modified_base 19: mod_base = OTHER; note = 2'-O-methylguanosine-3'-phosphorothioate
  modified_base 20: mod_base = OTHER; note = 2'-O-methyladenosine-3'-phosphorothioate
  modified_base 21: mod_base = OTHER; note = 2'-O-methyladenosine-3'-phosphate
ttgggaaaacactattatgaa

SEQ ID NO: 1435 - RNA, 21 nt, synthetic construct
  source 1..21: mol_type = other RNA
  modified_base 1: mod_base = OTHER; note = 2'-O-methyladenosine-3'-phosphorothioate
  modified_base 2: mod_base = OTHER; note = 2'-O-methyladenosine-3'-phosphorothioate
  modified_base 3: mod_base = OTHER; note = 2'-O-methyladenosine-3'-phosphate
  modified_base 4: mod_base = OTHER; note = 2'-O-methylcytidine-3'-phosphate
  modified_base 5: mod_base = OTHER; note = 2'-O-methyluridine-3'-phosphate
  modified_base 6: mod_base = OTHER; note 4-amino-1-((2R,3R,4R,5R)-3-(docosyloxy)-4-hydroxy-5-(hydrox ymethyl)tetrahydrofuran-2-yl)pyrimidin-2(1H)-one
  modified_base 7: mod_base = OTHER; note = 2'-fluorocytidine-3'-phosphate
  modified_base 8: mod_base = OTHER; note = 2'-O-methyladenosine-3'-phosphate
  modified_base 9: mod_base = OTHER; note = 2'-fluoroadenosine-3'-phosphate
  modified_base 10: mod_base = OTHER; note = 2'-fluoroadenosine-3'-phosphate
  modified_base 11: mod_base = OTHER; note = 2'-fluoroguanosine-3'-phosphate
  modified_base 12: mod_base = OTHER; note = 2'-O-methyladenosine-3'-phosphate
  modified_base 13: mod_base = OTHER; note = 2'-O-methylguanosine-3'-phosphate
  modified_base 14: mod_base = OTHER; note = 2'-O-methyladenosine-3'-phosphate
  modified_base 15: mod_base = OTHER; note = 2'-O-methyladenosine-3'-phosphate
  modified_base 16: mod_base = OTHER; note = 2'-O-methyladenosine-3'-phosphate
  modified_base 17: mod_base = OTHER; note = 2'-O-methyluridine-3'-phosphate
  modified_base 18: mod_base = OTHER; note = 2'-O-methylguanosine-3'-phosphate
  modified_base 19: mod_base = OTHER; note = 2'-O-methyladenosine-3'-phosphorothioate
  modified_base 20: mod_base = OTHER; note = 2'-O-methyladenosine-3'-phosphorothioate
  modified_base 21: mod_base = OTHER; note = 2'-O-methyladenosine-3'-phosphate
aaactccaaagagaaatgaaa

SEQ ID NO: 1436 - RNA, 21 nt, synthetic construct
  source 1..21: mol_type = other RNA
  modified_base 1: mod_base = OTHER; note = 2'-O-methyladenosine-3'-phosphorothioate
  modified_base 2: mod_base = OTHER; note = 2'-O-methyluridine-3'-phosphorothioate
  modified_base 3: mod_base = OTHER; note = 2'-O-methylguanosine-3'-phosphate
  modified_base 4: mod_base = OTHER; note = 2'-O-methylguanosine-3'-phosphate
  modified_base 5: mod_base = OTHER; note = 2'-O-methylguanosine-3'-phosphate
  modified_base 6: mod_base = OTHER; note 4-amino-1-((2R,3R,4R,5R)-3-(docosyloxy)-4-hydroxy-5-(hydrox ymethyl)tetrahydrofuran-2-yl)pyrimidin-2(1H)-one
  modified_base 7: mod_base = OTHER; note = 2'-fluoroadenosine-3'-phosphate
  modified_base 8: mod_base = OTHER; note = 2'-O-methyluridine-3'-phosphate
  modified_base 9: mod_base = OTHER; note = 2'-fluorouridine-3'-phosphate
  modified_base 10: mod_base = OTHER; note = 2'-fluorouridine-3'-phosphate
  modified_base 11: mod_base = OTHER; note = 2'-fluorouridine-3'-phosphate
  modified_base 12: mod_base = OTHER; note = 2'-O-methyluridine-3'-phosphate
  modified_base 13: mod_base = OTHER; note = 2'-O-methylcytidine-3'-phosphate
  modified_base 14: mod_base = OTHER; note = 2'-O-methyladenosine-3'-phosphate
  modified_base 15: mod_base = OTHER; note = 2'-O-methyladenosine-3'-phosphate
  modified_base 16: mod_base = OTHER; note = 2'-O-methyladenosine-3'-phosphate
  modified_base 17: mod_base = OTHER; note = 2'-O-methyladenosine-3'-phosphate
  modified_base 18: mod_base = OTHER; note = 2'-O-methylcytidine-3'-phosphate
  modified_base 19: mod_base = OTHER; note = 2'-O-methyladenosine-3'-phosphorothioate
  modified_base 20: mod_base = OTHER; note = 2'-O-methyluridine-3'-phosphorothioate
  modified_base 21: mod_base = OTHER; note = 2'-O-methyladenosine-3'-phosphate
atgggcatttttcaaaacata

SEQ ID NO: 1437 - RNA, 21 nt, synthetic construct
  source 1..21: mol_type = other RNA
  modified_base 1: mod_base = OTHER; note = 2'-O-methyladenosine-3'-phosphorothioate
  modified_base 2: mod_base = OTHER; note = 2'-O-methyluridine-3'-phosphorothioate
  modified_base 3: mod_base = OTHER; note = 2'-O-methyladenosine-3'-phosphate
  modified_base 4: mod_base = OTHER; note = 2'-O-methyladenosine-3'-phosphate
  modified_base 5: mod_base = OTHER; note = 2'-O-methyluridine-3'-phosphate
  modified_base 6: mod_base = OTHER; note 2-amino-9-((2R,3S,4S,5R)-3-(docosyloxy)-4-hydroxy-5-(hydrox ymethyl)tetrahydrofuran-2-yl)-1,9-dihydro-6H-purin-6-one
  modified_base 7: mod_base = OTHER; note = 2'-fluoroguanosine-3'-phosphate
  modified_base 8: mod_base = OTHER; note = 2'-O-methyladenosine-3'-phosphate
  modified_base 9: mod_base = OTHER; note = 2'-fluoroadenosine-3'-phosphate
  modified_base 10: mod_base = OTHER; note = 2'-fluorocytidine-3'-phosphate
  modified_base 11: mod_base = OTHER; note = 2'-fluorouridine-3'-phosphate
  modified_base 12: mod_base = OTHER; note = 2'-O-methyluridine-3'-phosphate
  modified_base 13: mod_base = OTHER; note = 2'-O-methylguanosine-3'-phosphate
  modified_base 14: mod_base = OTHER; note = 2'-O-methylguanosine-3'-phosphate
  modified_base 15: mod_base = OTHER; note = 2'-O-methyladenosine-3'-phosphate
  modified_base 16: mod_base = OTHER; note = 2'-O-methylcytidine-3'-phosphate
  modified_base 17: mod_base = OTHER; note = 2'-O-methyluridine-3'-phosphate
  modified_base 18: mod_base = OTHER; note = 2'-O-methylcytidine-3'-phosphate
  modified_base 19: mod_base = OTHER; note = 2'-O-methyladenosine-3'-phosphorothioate
  modified_base 20: mod_base = OTHER; note = 2'-O-methyladenosine-3'-phosphorothioate
  modified_base 21: mod_base = OTHER; note = 2'-O-methyladenosine-3'-phosphate
ataatggaacttggactcaaa

SEQ ID NO: 1438 - RNA, 21 nt, synthetic construct
  source 1..21: mol_type = other RNA
  modified_base 1: mod_base = OTHER; note = 2'-O-methyluridine-3'-phosphorothioate
  modified_base 2: mod_base = OTHER; note = 2'-O-methylguanosine-3'-phosphorothioate
  modified_base 3: mod_base = OTHER; note = 2'-O-methyluridine-3'-phosphate
  modified_base 4: mod_base = OTHER; note = 2'-O-methylguanosine-3'-phosphate
  modified_base 5: mod_base = OTHER; note = 2'-O-methyluridine-3'-phosphate
  modified_base 6: mod_base = OTHER; note (2R,3S,4S,5R)-5-(6-amino-9H-purin-9-yl)-4-(docosyloxy)-2-(h ydroxymethyl)tetrahydrofuran-3-ol
  modified_base 7: mod_base = OTHER; note = 2'-fluoroguanosine-3'-phosphate
  modified_base 8: mod_base = OTHER; note = 2'-O-methyladenosine-3'-phosphate
  modified_base 9: mod_base = OTHER; note = 2'-fluorouridine-3'-phosphate
  modified_base 10: mod_base = OTHER; note = 2'-fluoroguanosine-3'-phosphate
  modified_base 11: mod_base = OTHER; note = 2'-fluoroadenosine-3'-phosphate
  modified_base 12: mod_base = OTHER; note = 2'-O-methylcytidine-3'-phosphate
  modified_base 13: mod_base = OTHER; note = 2'-O-methylguanosine-3'-phosphate
  modified_base 14: mod_base = OTHER; note = 2'-O-methyladenosine-3'-phosphate
  modified_base 15: mod_base = OTHER; note = 2'-O-methyladenosine-3'-phosphate
  modified_base 16: mod_base = OTHER; note = 2'-O-methyladenosine-3'-phosphate
  modified_base 17: mod_base = OTHER; note = 2'-O-methylcytidine-3'-phosphate
  modified_base 18: mod_base = OTHER; note = 2'-O-methylcytidine-3'-phosphate
  modified_base 19: mod_base = OTHER; note = 2'-O-methyladenosine-3'-phosphorothioate
  modified_base 20: mod_base = OTHER; note = 2'-O-methyladenosine-3'-phosphorothioate
  modified_base 21: mod_base = OTHER; note = 2'-O-methyladenosine-3'-phosphate
tgtgtagatgacgaaaccaaa

SEQ ID NO: 1439 - RNA, 21 nt, synthetic construct
  source 1..21: mol_type = other RNA
  modified_base 1: mod_base = OTHER; note = 2'-O-methyluridine-3'-phosphorothioate
  modified_base 2: mod_base = OTHER; note = 2'-O-methyluridine-3'-phosphorothioate
  modified_base 3: mod_base = OTHER; note = 2'-O-methylcytidine-3'-phosphate
  modified_base 4: mod_base = OTHER; note = 2'-O-methyluridine-3'-phosphate
  modified_base 5: mod_base = OTHER; note = 2'-O-methyladenosine-3'-phosphate
  modified_base 6: mod_base = OTHER; note 4-amino-1-((2R,3R,4R,5R)-3-(docosyloxy)-4-hydroxy-5-(hydrox ymethyl)tetrahydrofuran-2-yl)pyrimidin-2(1H)-one
  modified_base 7: mod_base = OTHER; note = 2'-fluorocytidine-3'-phosphate
  modified_base 8: mod_base = OTHER; note = 2'-O-methyluridine-3'-phosphate
  modified_base 9: mod_base = OTHER; note = 2'-fluorocytidine-3'-phosphate
  modified_base 10: mod_base = OTHER; note = 2'-fluoroadenosine-3'-phosphate
  modified_base 11: mod_base = OTHER; note = 2'-fluoroadenosine-3'-phosphate
  modified_base 12: mod_base = OTHER; note = 2'-O-methyladenosine-3'-phosphate
  modified_base 13: mod_base = OTHER; note = 2'-O-methylguanosine-3'-phosphate
  modified_base 14: mod_base = OTHER; note = 2'-O-methyladenosine-3'-phosphate
  modified_base 15: mod_base = OTHER; note = 2'-O-methyluridine-3'-phosphate
  modified_base 16: mod_base = OTHER; note = 2'-O-methyladenosine-3'-phosphate
  modified_base 17: mod_base = OTHER; note = 2'-O-methyladenosine-3'-phosphate
  modified_base 18: mod_base = OTHER; note = 2'-O-methylguanosine-3'-phosphate
  modified_base 19: mod_base = OTHER; note = 2'-O-methyladenosine-3'-phosphorothioate
  modified_base 20: mod_base = OTHER; note = 2'-O-methylcytidine-3'-phosphorothioate
  modified_base 21: mod_base = OTHER; note = 2'-O-methyladenosine-3'-phosphate
ttctacctcaaagataagaca

SEQ ID NO: 1440 - RNA, 21 nt, synthetic construct
  source 1..21: mol_type = other RNA
  modified_base 1: mod_base = OTHER; note = 2'-O-methyladenosine-3'-phosphorothioate
  modified_base 2: mod_base = OTHER; note = 2'-O-methylguanosine-3'-phosphorothioate
  modified_base 3: mod_base = OTHER; note = 2'-O-methyladenosine-3'-phosphate
  modified_base 4: mod_base = OTHER; note = 2'-O-methyladenosine-3'-phosphate
  modified_base 5: mod_base = OTHER; note = 2'-O-methylguanosine-3'-phosphate
  modified_base 6: mod_base = OTHER; note 2-amino-9-((2R,3S,4S,5R)-3-(docosyloxy)-4-hydroxy-5-(hydrox ymethyl)tetrahydrofuran-2-yl)-1,9-dihydro-6H-purin-6-one
  modified_base 7: mod_base = OTHER; note = 2'-fluorocytidine-3'-phosphate
  modified_base 8: mod_base = OTHER; note = 2'-O-methyladenosine-3'-phosphate
  modified_base 9: mod_base = OTHER; note = 2'-fluorouridine-3'-phosphate
  modified_base 10: mod_base = OTHER; note = 2'-fluoroadenosine-3'-phosphate
  modified_base 11: mod_base = OTHER; note = 2'-fluorouridine-3'-phosphate
  modified_base 12: mod_base = OTHER; note = 2'-O-methyluridine-3'-phosphate
  modified_base 13: mod_base = OTHER; note = 2'-O-methylguanosine-3'-phosphate
  modified_base 14: mod_base = OTHER; note = 2'-O-methyladenosine-3'-phosphate
  modified_base 15: mod_base = OTHER; note = 2'-O-methylguanosine-3'-phosphate
  modified_base 16: mod_base = OTHER; note = 2'-O-methyluridine-3'-phosphate
  modified_base 17: mod_base = OTHER; note = 2'-O-methyluridine-3'-phosphate
  modified_base 18: mod_base = OTHER; note = 2'-O-methyladenosine-3'-phosphate
  modified_base 19: mod_base = OTHER; note = 2'-O-methyluridine-3'-phosphorothioate
  modified_base 20: mod_base = OTHER; note = 2'-O-methyluridine-3'-phosphorothioate
  modified_base 21: mod_base = OTHER; note = 2'-O-methyladenosine-3'-phosphate
agaaggcatattgagttatta

SEQ ID NO: 1441 - RNA, 21 nt, synthetic construct
  source 1..21: mol_type = other RNA
  modified_base 1: mod_base = OTHER; note = 2'-O-methyladenosine-3'-phosphorothioate
  modified_base 2: mod_base = OTHER; note = 2'-O-methyluridine-3'-phosphorothioate
  modified_base 3: mod_base = OTHER; note = 2'-O-methylguanosine-3'-phosphate
  modified_base 4: mod_base = OTHER; note = 2'-O-methylguanosine-3'-phosphate
  modified_base 5: mod_base = OTHER; note = 2'-O-methyladenosine-3'-phosphate
  modified_base 6: mod_base = OTHER; note 2-amino-9-((2R,3S,4S,5R)-3-(docosyloxy)-4-hydroxy-5-(hydrox ymethyl)tetrahydrofuran-2-yl)-1,9-dihydro-6H-purin-6-one
  modified_base 7: mod_base = OTHER; note = 2'-fluorouridine-3'-phosphate
  modified_base 8: mod_base = OTHER; note = 2'-O-methyluridine-3'-phosphate
  modified_base 9: mod_base = OTHER; note = 2'-fluorouridine-3'-phosphate
  modified_base 10: mod_base = OTHER; note = 2'-fluorouridine-3'-phosphate
  modified_base 11: mod_base = OTHER; note = 2'-fluorouridine-3'-phosphate
  modified_base 12: mod_base = OTHER; note = 2'-O-methylcytidine-3'-phosphate
  modified_base 13: mod_base = OTHER; note = 2'-O-methyluridine-3'-phosphate
  modified_base 14: mod_base = OTHER; note = 2'-O-methylguanosine-3'-phosphate
  modified_base 15: mod_base = OTHER; note = 2'-O-methylcytidine-3'-phosphate
  modified_base 16: mod_base = OTHER; note = 2'-O-methyluridine-3'-phosphate
  modified_base 17: mod_base = OTHER; note = 2'-O-methyladenosine-3'-phosphate
  modified_base 18: mod_base = OTHER; note = 2'-O-methyluridine-3'-phosphate
  modified_base 19: mod_base = OTHER; note = 2'-O-methyluridine-3'-phosphorothioate
  modified_base 20: mod_base = OTHER; note = 2'-O-methyluridine-3'-phosphorothioate
  modified_base 21: mod_base = OTHER; note = 2'-O-methyladenosine-3'-phosphate
atggagtttttctgctattta

SEQ ID NO: 1442 - RNA, 21 nt, synthetic construct
  source 1..21: mol_type = other RNA
  modified_base 1: mod_base = OTHER; note = 2'-O-methyluridine-3'-phosphorothioate
  modified_base 2: mod_base = OTHER; note = 2'-O-methylcytidine-3'-phosphorothioate
  modified_base 3: mod_base = OTHER; note = 2'-O-methyladenosine-3'-phosphate
  modified_base 4: mod_base = OTHER; note = 2'-O-methylguanosine-3'-phosphate
  modified_base 5: mod_base = OTHER; note = 2'-O-methyluridine-3'-phosphate
  modified_base 6: mod_base = OTHER; note 1-((2R,3R,4R,5R)-3-(docosyloxy)-4-hydroxy-5-(hydroxymethyl) tetrahydrofuran-2-yl)pyrimidine-2,4(1H,3H)-dione
  modified_base 7: mod_base = OTHER; note = 2'-fluorouridine-3'-phosphate
  modified_base 8: mod_base = OTHER; note = 2'-O-methylcytidine-3'-phosphate
  modified_base 9: mod_base = OTHER; note = 2'-fluorouridine-3'-phosphate
  modified_base 10: mod_base = OTHER; note = 2'-fluorocytidine-3'-phosphate
  modified_base 11: mod_base = OTHER; note = 2'-fluoroadenosine-3'-phosphate
  modified_base 12: mod_base = OTHER; note = 2'-O-methyluridine-3'-phosphate
  modified_base 13: mod_base = OTHER; note = 2'-O-methyluridine-3'-phosphate
  modified_base 14: mod_base = OTHER; note = 2'-O-methyladenosine-3'-phosphate
  modified_base 15: mod_base = OTHER; note = 2'-O-methylguanosine-3'-phosphate
  modified_base 16: mod_base = OTHER; note = 2'-O-methyluridine-3'-phosphate
  modified_base 17: mod_base = OTHER; note = 2'-O-methyluridine-3'-phosphate
  modified_base 18: mod_base = OTHER; note = 2'-O-methyluridine-3'-phosphate
  modified_base 19: mod_base = OTHER; note = 2'-O-methylguanosine-3'-phosphorothioate
  modified_base 20: mod_base = OTHER; note = 2'-O-methyluridine-3'-phosphorothioate
  modified_base 21: mod_base = OTHER; note = 2'-O-methyladenosine-3'-phosphate
tcagtttctcattagtttgta

SEQ ID NO: 1443 - RNA, 21 nt, synthetic construct
  source 1..21: mol_type = other RNA
  modified_base 1: mod_base = OTHER; note = 2'-O-methylcytidine-3'-phosphorothioate
  modified_base 2: mod_base = OTHER; note = 2'-O-methyluridine-3'-phosphorothioate
  modified_base 3: mod_base = OTHER; note = 2'-O-methylguanosine-3'-phosphate
  modified_base 4: mod_base = OTHER; note = 2'-O-methylcytidine-3'-phosphate
  modified_base 5: mod_base = OTHER; note = 2'-O-methyladenosine-3'-phosphate
  modified_base 6: mod_base = OTHER; note 1-((2R,3R,4R,5R)-3-(docosyloxy)-4-hydroxy-5-(hydroxymethyl) tetrahydrofuran-2-yl)pyrimidine-2,4(1H,3H)-dione
  modified_base 7: mod_base = OTHER; note = 2'-fluoroadenosine-3'-phosphate
  modified_base 8: mod_base = OTHER; note = 2'-O-methyluridine-3'-phosphate
  modified_base 9: mod_base = OTHER; note = 2'-fluoroadenosine-3'-phosphate
  modified_base 10: mod_base = OTHER; note = 2'-fluorouridine-3'-phosphate
  modified_base 11: mod_base = OTHER; note = 2'-fluoroadenosine-3'-phosphate
  modified_base 12: mod_base = OTHER; note = 2'-O-methyladenosine-3'-phosphate
  modified_base 13: mod_base = OTHER; note = 2'-O-methylguanosine-3'-phosphate
  modified_base 14: mod_base = OTHER; note = 2'-O-methyladenosine-3'-phosphate
  modified_base 15: mod_base = OTHER; note = 2'-O-methyladenosine-3'-phosphate
  modified_base 16: mod_base = OTHER; note = 2'-O-methylcytidine-3'-phosphate
  modified_base 17: mod_base = OTHER; note = 2'-O-methylguanosine-3'-phosphate
  modified_base 18: mod_base = OTHER; note = 2'-O-methyladenosine-3'-phosphate
  modified_base 19: mod_base = OTHER; note = 2'-O-methyladenosine-3'-phosphorothioate
  modified_base 20: mod_base = OTHER; note = 2'-O-methyladenosine-3'-phosphorothioate
  modified_base 21: mod_base = OTHER; note = 2'-O-methyladenosine-3'-phosphate
ctgcatatataagaacgaaaa

SEQ ID NO: 1444 - RNA, 21 nt, synthetic construct
  source 1..21: mol_type = other RNA
  modified_base 1: mod_base = OTHER; note = 2'-O-methyluridine-3'-phosphorothioate
  modified_base 2: mod_base = OTHER; note = 2'-O-methylguanosine-3'-phosphorothioate
  modified_base 3: mod_base = OTHER; note = 2'-O-methyladenosine-3'-phosphate
  modified_base 4: mod_base = OTHER; note = 2'-O-methylguanosine-3'-phosphate
  modified_base 5: mod_base = OTHER; note = 2'-O-methylcytidine-3'-phosphate
  modified_base 6: mod_base = OTHER; note 4-amino-1-((2R,3R,4R,5R)-3-(docosyloxy)-4-hydroxy-5-(hydrox ymethyl)tetrahydrofuran-2-yl)pyrimidin-2(1H)-one
  modified_base 7: mod_base = OTHER; note = 2'-fluoroadenosine-3'-phosphate
  modified_base 8: mod_base = OTHER; note = 2'-O-methyladenosine-3'-phosphate
  modified_base 9: mod_base = OTHER; note = 2'-fluoroadenosine-3'-phosphate
  modified_base 10: mod_base = OTHER; note = 2'-fluoroadenosine-3'-phosphate
  modified_base 11: mod_base = OTHER; note = 2'-fluorouridine-3'-phosphate
  modified_base 12: mod_base = OTHER; note = 2'-O-methyladenosine-3'-phosphate
  modified_base 13: mod_base = OTHER; note = 2'-O-methyluridine-3'-phosphate
  modified_base 14: mod_base = OTHER; note = 2'-O-methyluridine-3'-phosphate
  modified_base 15: mod_base = OTHER; note = 2'-O-methyladenosine-3'-phosphate
  modified_base 16: mod_base = OTHER; note = 2'-O-methyladenosine-3'-phosphate
  modified_base 17: mod_base = OTHER; note = 2'-O-methyladenosine-3'-phosphate
  modified_base 18: mod_base = OTHER; note = 2'-O-methyluridine-3'-phosphate
  modified_base 19: mod_base = OTHER; note = 2'-O-methyluridine-3'-phosphorothioate
  modified_base 20: mod_base = OTHER; note = 2'-O-methylcytidine-3'-phosphorothioate
  modified_base 21: mod_base = OTHER; note = 2'-O-methyladenosine-3'-phosphate
tgagccaaaatattaaattca

SEQ ID NO: 1445 - RNA, 21 nt, synthetic construct
  source 1..21: mol_type = other RNA
  modified_base 1: mod_base = OTHER; note = 2'-O-methyladenosine-3'-phosphorothioate
  modified_base 2: mod_base = OTHER; note = 2'-O-methylguanosine-3'-phosphorothioate
  modified_base 3: mod_base = OTHER; note = 2'-O-methyladenosine-3'-phosphate
  modified_base 4: mod_base = OTHER; note = 2'-O-methyladenosine-3'-phosphate
  modified_base 5: mod_base = OTHER; note = 2'-O-methyluridine-3'-phosphate
  modified_base 6: mod_base = OTHER; note 2-amino-9-((2R,3S,4S,5R)-3-(docosyloxy)-4-hydroxy-5-(hydrox ymethyl)tetrahydrofuran-2-yl)-1,9-dihydro-6H-purin-6-one
  modified_base 7: mod_base = OTHER; note = 2'-fluoroadenosine-3'-phosphate
  modified_base 8: mod_base = OTHER; note = 2'-O-methyluridine-3'-phosphate
  modified_base 9: mod_base = OTHER; note = 2'-fluoroadenosine-3'-phosphate
  modified_base 10: mod_base = OTHER; note = 2'-fluorouridine-3'-phosphate
  modified_base 11: mod_base = OTHER; note = 2'-fluorouridine-3'-phosphate
  modified_base 12: mod_base = OTHER; note = 2'-O-methyluridine-3'-phosphate
  modified_base 13: mod_base = OTHER; note = 2'-O-methylcytidine-3'-phosphate
  modified_base 14: mod_base = OTHER; note = 2'-O-methylcytidine-3'-phosphate
  modified_base 15: mod_base = OTHER; note = 2'-O-methyluridine-3'-phosphate
  modified_base 16: mod_base = OTHER; note = 2'-O-methylguanosine-3'-phosphate
  modified_base 17: mod_base = OTHER; note = 2'-O-methyluridine-3'-phosphate
  modified_base 18: mod_base = OTHER; note = 2'-O-methyluridine-3'-phosphate
  modified_base 19: mod_base = OTHER; note = 2'-O-methyluridine-3'-phosphorothioate
  modified_base 20: mod_base = OTHER; note = 2'-O-methyluridine-3'-phosphorothioate
  modified_base 21: mod_base = OTHER; note = 2'-O-methyladenosine-3'-phosphate
agaatgatatttcctgtttta

SEQ ID NO: 1446 - RNA, 21 nt, synthetic construct
  source 1..21: mol_type = other RNA
  modified_base 1: mod_base = OTHER; note = 2'-O-methylguanosine-3'-phosphorothioate
  modified_base 2: mod_base = OTHER; note = 2'-O-methyluridine-3'-phosphorothioate
  modified_base 3: mod_base = OTHER; note = 2'-O-methylguanosine-3'-phosphate
  modified_base 4: mod_base = OTHER; note = 2'-O-methylcytidine-3'-phosphate
  modified_base 5: mod_base = OTHER; note = 2'-O-methyluridine-3'-phosphate
  modified_base 6: mod_base = OTHER; note 4-amino-1-((2R,3R,4R,5R)-3-(docosyloxy)-4-hydroxy-5-(hydrox ymethyl)tetrahydrofuran-2-yl)pyrimidin-2(1H)-one
  modified_base 7: mod_base = OTHER; note = 2'-fluorouridine-3'-phosphate
  modified_base 8: mod_base = OTHER; note = 2'-O-methyladenosine-3'-phosphate
  modified_base 9: mod_base = OTHER; note = 2'-fluorouridine-3'-phosphate
  modified_base 10: mod_base = OTHER; note = 2'-fluoroadenosine-3'-phosphate
  modified_base 11: mod_base = OTHER; note = 2'-fluorouridine-3'-phosphate
  modified_base 12: mod_base = OTHER; note = 2'-O-methyladenosine-3'-phosphate
  modified_base 13: mod_base = OTHER; note = 2'-O-methyladenosine-3'-phosphate
  modified_base 14: mod_base = OTHER; note = 2'-O-methyladenosine-3'-phosphate
  modified_base 15: mod_base = OTHER; note = 2'-O-methyluridine-3'-phosphate
  modified_base 16: mod_base = OTHER; note = 2'-O-methylcytidine-3'-phosphate
  modified_base 17: mod_base = OTHER; note = 2'-O-methyluridine-3'-phosphate
  modified_base 18: mod_base = OTHER; note = 2'-O-methyluridine-3'-phosphate
  modified_base 19: mod_base = OTHER; note = 2'-O-methylcytidine-3'-phosphorothioate
  modified_base 20: mod_base = OTHER; note = 2'-O-methylcytidine-3'-phosphorothioate
  modified_base 21: mod_base = OTHER; note = 2'-O-methyladenosine-3'-phosphate
gtgctctatataaatcttcca

SEQ ID NO: 1447 - RNA, 21 nt, synthetic construct
  source 1..21: mol_type = other RNA
  modified_base 1: mod_base = OTHER; note = 2'-O-methyluridine-3'-phosphorothioate
  modified_base 2: mod_base = OTHER; note = 2'-O-methyluridine-3'-phosphorothioate
  modified_base 3: mod_base = OTHER; note = 2'-O-methyluridine-3'-phosphate
  modified_base 4: mod_base = OTHER; note = 2'-O-methyladenosine-3'-phosphate
  modified_base 5: mod_base = OTHER; note = 2'-O-methylcytidine-3'-phosphate
  modified_base 6: mod_base = OTHER; note (2R,3S,4S,5R)-5-(6-amino-9H-purin-9-yl)-4-(docosyloxy)-2-(h ydroxymethyl)tetrahydrofuran-3-ol
  modified_base 7: mod_base = OTHER; note = 2'-fluoroguanosine-3'-phosphate
  modified_base 8: mod_base = OTHER; note = 2'-O-methyladenosine-3'-phosphate
  modified_base 9: mod_base = OTHER; note = 2'-fluoroguanosine-3'-phosphate
  modified_base 10: mod_base = OTHER; note = 2'-fluoroadenosine-3'-phosphate
  modified_base 11: mod_base = OTHER; note = 2'-fluoroadenosine-3'-phosphate
  modified_base 12: mod_base = OTHER; note = 2'-O-methylguanosine-3'-phosphate
  modified_base 13: mod_base = OTHER; note = 2'-O-methylcytidine-3'-phosphate
  modified_base 14: mod_base = OTHER; note = 2'-O-methyladenosine-3'-phosphate
  modified_base 15: mod_base = OTHER; note = 2'-O-methyluridine-3'-phosphate
  modified_base 16: mod_base = OTHER; note = 2'-O-methylcytidine-3'-phosphate
  modified_base 17: mod_base = OTHER; note = 2'-O-methyluridine-3'-phosphate
  modified_base 18: mod_base = OTHER; note = 2'-O-methyluridine-3'-phosphate
  modified_base 19: mod_base = OTHER; note = 2'-O-methyladenosine-3'-phosphorothioate
  modified_base 20: mod_base = OTHER; note = 2'-O-methyluridine-3'-phosphorothioate
  modified_base 21: mod_base = OTHER; note = 2'-O-methyladenosine-3'-phosphate
tttacagagaagcatcttata

SEQ ID NO: 1448 - RNA, 21 nt, synthetic construct
  source 1..21: mol_type = other RNA
  modified_base 1: mod_base = OTHER; note = 2'-O-methylguanosine-3'-phosphorothioate
  modified_base 2: mod_base = OTHER; note = 2'-O-methyluridine-3'-phosphorothioate
  modified_base 3: mod_base = OTHER; note = 2'-O-methylcytidine-3'-phosphate
  modified_base 4: mod_base = OTHER; note = 2'-O-methyluridine-3'-phosphate
  modified_base 5: mod_base = OTHER; note = 2'-O-methyluridine-3'-phosphate
  modified_base 6: mod_base = OTHER; note 2-amino-9-((2R,3S,4S,5R)-3-(docosyloxy)-4-hydroxy-5-(hydrox ymethyl)tetrahydrofuran-2-yl)-1,9-dihydro-6H-purin-6-one
  modified_base 7: mod_base = OTHER; note = 2'-fluoroadenosine-3'-phosphate
  modified_base 8: mod_base = OTHER; note = 2'-O-methylguanosine-3'-phosphate
  modified_base 9: mod_base = OTHER; note = 2'-fluorouridine-3'-phosphate
  modified_base 10: mod_base = OTHER; note = 2'-fluorouridine-3'-phosphate
  modified_base 11: mod_base = OTHER; note = 2'-fluorocytidine-3'-phosphate
  modified_base 12: mod_base = OTHER; note = 2'-O-methyluridine-3'-phosphate
  modified_base 13: mod_base = OTHER; note = 2'-O-methylguanosine-3'-phosphate
  modified_base 14: mod_base = OTHER; note = 2'-O-methylcytidine-3'-phosphate
  modified_base 15: mod_base = OTHER; note = 2'-O-methyladenosine-3'-phosphate
  modified_base 16: mod_base = OTHER; note = 2'-O-methyluridine-3'-phosphate
  modified_base 17: mod_base = OTHER; note = 2'-O-methylguanosine-3'-phosphate
  modified_base 18: mod_base = OTHER; note = 2'-O-methyladenosine-3'-phosphate
  modified_base 19: mod_base = OTHER; note = 2'-O-methylcytidine-3'-phosphorothioate
  modified_base 20: mod_base = OTHER; note = 2'-O-methyladenosine-3'-phosphorothioate
  modified_base 21: mod_base = OTHER; note = 2'-O-methyladenosine-3'-phosphate
gtcttgagttctgcatgacaa

SEQ ID NO: 1449 - RNA, 21 nt, synthetic construct
  source 1..21: mol_type = other RNA
  modified_base 1: mod_base = OTHER; note = 2'-O-methylcytidine-3'-phosphorothioate
  modified_base 2: mod_base = OTHER; note = 2'-O-methyluridine-3'-phosphorothioate
  modified_base 3: mod_base = OTHER; note = 2'-O-methyluridine-3'-phosphate
  modified_base 4: mod_base = OTHER; note = 2'-O-methylcytidine-3'-phosphate
  modified_base 5: mod_base = OTHER; note = 2'-O-methyladenosine-3'-phosphate
  modified_base 6: mod_base = OTHER; note (2R,3S,4S,5R)-5-(6-amino-9H-purin-9-yl)-4-(docosyloxy)-2-(h ydroxymethyl)tetrahydrofuran-3-ol
  modified_base 7: mod_base = OTHER; note = 2'-fluoroadenosine-3'-phosphate
  modified_base 8: mod_base = OTHER; note = 2'-O-methyluridine-3'-phosphate
  modified_base 9: mod_base = OTHER; note = 2'-fluorocytidine-3'-phosphate
  modified_base 10: mod_base = OTHER; note = 2'-fluorouridine-3'-phosphate
  modified_base 11: mod_base = OTHER; note = 2'-fluoroadenosine-3'-phosphate
  modified_base 12: mod_base = OTHER; note = 2'-O-methyluridine-3'-phosphate
  modified_base 13: mod_base = OTHER; note = 2'-O-methyladenosine-3'-phosphate
  modified_base 14: mod_base = OTHER; note = 2'-O-methyladenosine-3'-phosphate
  modified_base 15: mod_base = OTHER; note = 2'-O-methyluridine-3'-phosphate
  modified_base 16: mod_base = OTHER; note = 2'-O-methyluridine-3'-phosphate
  modified_base 17: mod_base = OTHER; note = 2'-O-methyluridine-3'-phosphate
  modified_base 18: mod_base = OTHER; note = 2'-O-methyluridine-3'-phosphate
  modified_base 19: mod_base = OTHER; note = 2'-O-methyladenosine-3'-phosphorothioate
  modified_base 20: mod_base = OTHER; note = 2'-O-methylcytidine-3'-phosphorothioate
  modified_base 21: mod_base = OTHER; note = 2'-O-methyladenosine-3'-phosphate
cttcaaatctataattttaca

SEQ ID NO: 1450 - RNA, 21 nt, synthetic construct
  source 1..21: mol_type = other RNA
  modified_base 1: mod_base = OTHER; note = 2'-O-methylguanosine-3'-phosphorothioate
  modified_base 2: mod_base = OTHER; note = 2'-O-methyladenosine-3'-phosphorothioate
  modified_base 3: mod_base = OTHER; note = 2'-O-methyladenosine-3'-phosphate
  modified_base 4: mod_base = OTHER; note = 2'-O-methylguanosine-3'-phosphate
  modified_base 5: mod_base = OTHER; note = 2'-O-methylcytidine-3'-phosphate
  modified_base 6: mod_base = OTHER; note (2R,3S,4S,5R)-5-(6-amino-9H-purin-9-yl)-4-(docosyloxy)-2-(h ydroxymethyl)tetrahydrofuran-3-ol
  modified_base 7: mod_base = OTHER; note = 2'-fluorouridine-3'-phosphate
  modified_base 8: mod_base = OTHER; note = 2'-O-methyladenosine-3'-phosphate
  modified_base 9: mod_base = OTHER; note = 2'-fluorouridine-3'-phosphate
  modified_base 10: mod_base = OTHER; note = 2'-fluoroadenosine-3'-phosphate
  modified_base 11: mod_base = OTHER; note = 2'-fluoroguanosine-3'-phosphate
  modified_base 12: mod_base = OTHER; note = 2'-O-methyladenosine-3'-phosphate
  modified_base 13: mod_base = OTHER; note = 2'-O-methyladenosine-3'-phosphate
  modified_base 14: mod_base = OTHER; note = 2'-O-methylcytidine-3'-phosphate
  modified_base 15: mod_base = OTHER; note = 2'-O-methyluridine-3'-phosphate
  modified_base 16: mod_base = OTHER; note = 2'-O-methylcytidine-3'-phosphate
  modified_base 17: mod_base = OTHER; note = 2'-O-methyluridine-3'-phosphate
  modified_base 18: mod_base = OTHER; note = 2'-O-methyladenosine-3'-phosphate
  modified_base 19: mod_base = OTHER; note = 2'-O-methyluridine-3'-phosphorothioate
  modified_base 20: mod_base = OTHER; note = 2'-O-methyluridine-3'-phosphorothioate
  modified_base 21: mod_base = OTHER; note = 2'-O-methyladenosine-3'-phosphate
gaagcatatagaactctatta

SEQ ID NO: 1451 - RNA, 21 nt, synthetic construct
  source 1..21: mol_type = other RNA
  modified_base 1: mod_base = OTHER; note = 2'-O-methylguanosine-3'-phosphorothioate
  modified_base 2: mod_base = OTHER; note = 2'-O-methyladenosine-3'-phosphorothioate
  modified_base 3: mod_base = OTHER; note = 2'-O-methylguanosine-3'-phosphate
  modified_base 4: mod_base = OTHER; note = 2'-O-methylcytidine-3'-phosphate
  modified_base 5: mod_base = OTHER; note = 2'-O-methyluridine-3'-phosphate
  modified_base 6: mod_base = OTHER; note 2-amino-9-((2R,3S,4S,5R)-3-(docosyloxy)-4-hydroxy-5-(hydrox ymethyl)tetrahydrofuran-2-yl)-1,9-dihydro-6H-purin-6-one
  modified_base 7: mod_base = OTHER; note = 2'-fluorocytidine-3'-phosphate
  modified_base 8: mod_base = OTHER; note = 2'-O-methyluridine-3'-phosphate
  modified_base 9: mod_base = OTHER; note = 2'-fluorouridine-3'-phosphate
  modified_base 10: mod_base = OTHER; note = 2'-fluorocytidine-3'-phosphate
  modified_base 11: mod_base = OTHER; note = 2'-fluorouridine-3'-phosphate
  modified_base 12: mod_base = OTHER; note = 2'-O-methyladenosine-3'-phosphate
  modified_base 13: mod_base = OTHER; note = 2'-O-methyladenosine-3'-phosphate
  modified_base 14: mod_base = OTHER; note = 2'-O-methyladenosine-3'-phosphate
  modified_base 15: mod_base = OTHER; note = 2'-O-methyluridine-3'-phosphate
  modified_base 16: mod_base = OTHER; note = 2'-O-methyladenosine-3'-phosphate
  modified_base 17: mod_base = OTHER; note = 2'-O-methyladenosine-3'-phosphate
  modified_base 18: mod_base = OTHER; note = 2'-O-methylcytidine-3'-phosphate
  modified_base 19: mod_base = OTHER; note = 2'-O-methyladenosine-3'-phosphorothioate
  modified_base 20: mod_base = OTHER; note = 2'-O-methyladenosine-3'-phosphorothioate
  modified_base 21: mod_base = OTHER; note = 2'-O-methyladenosine-3'-phosphate
gagctgcttctaaataacaaa

SEQ ID NO: 1452 - RNA, 21 nt, synthetic construct
  source 1..21: mol_type = other RNA
  modified_base 1: mod_base = OTHER; note = 2'-O-methyluridine-3'-phosphorothioate
  modified_base 2: mod_base = OTHER; note = 2'-O-methylguanosine-3'-phosphorothioate
  modified_base 3: mod_base = OTHER; note = 2'-O-methyladenosine-3'-phosphate
  modified_base 4: mod_base = OTHER; note = 2'-O-methylcytidine-3'-phosphate
  modified_base 5: mod_base = OTHER; note = 2'-O-methyluridine-3'-phosphate
  modified_base 6: mod_base = OTHER; note 2-amino-9-((2R,3S,4S,5R)-3-(docosyloxy)-4-hydroxy-5-(hydrox ymethyl)tetrahydrofuran-2-yl)-1,9-dihydro-6H-purin-6-one
  modified_base 7: mod_base = OTHER; note = 2'-fluorouridine-3'-phosphate
  modified_base 8: mod_base = OTHER; note = 2'-O-methyladenosine-3'-phosphate
  modified_base 9: mod_base = OTHER; note = 2'-fluorouridine-3'-phosphate
  modified_base 10: mod_base = OTHER; note = 2'-fluorouridine-3'-phosphate
  modified_base 11: mod_base = OTHER; note = 2'-fluorouridine-3'-phosphate
  modified_base 12: mod_base = OTHER; note = 2'-O-methylcytidine-3'-phosphate
  modified_base 13: mod_base = OTHER; note = 2'-O-methylcytidine-3'-phosphate
  modified_base 14: mod_base = OTHER; note = 2'-O-methyluridine-3'-phosphate
  modified_base 15: mod_base = OTHER; note = 2'-O-methylguanosine-3'-phosphate
  modified_base 16: mod_base = OTHER; note = 2'-O-methyladenosine-3'-phosphate
  modified_base 17: mod_base = OTHER; note = 2'-O-methyluridine-3'-phosphate
  modified_base 18: mod_base = OTHER; note = 2'-O-methylcytidine-3'-phosphate
  modified_base 19: mod_base = OTHER; note = 2'-O-methyladenosine-3'-phosphorothioate
  modified_base 20: mod_base = OTHER; note = 2'-O-methyluridine-3'-phosphorothioate
  modified_base 21: mod_base = OTHER; note = 2'-O-methyladenosine-3'-phosphate
tgactgtatttcctgatcata

SEQ ID NO: 1453 - RNA, 21 nt, synthetic construct
  source 1..21: mol_type = other RNA
  modified_base 1: mod_base = OTHER; note = 2'-O-methylguanosine-3'-phosphorothioate
  modified_base 2: mod_base = OTHER; note = 2'-O-methyluridine-3'-phosphorothioate
  modified_base 3: mod_base = OTHER; note = 2'-O-methyluridine-3'-phosphate
  modified_base 4: mod_base = OTHER; note = 2'-O-methylcytidine-3'-phosphate
  modified_base 5: mod_base = OTHER; note = 2'-O-methyluridine-3'-phosphate
  modified_base 6: mod_base = OTHER; note 2-amino-9-((2R,3S,4S,5R)-3-(docosyloxy)-4-hydroxy-5-(hydrox ymethyl)tetrahydrofuran-2-yl)-1,9-dihydro-6H-purin-6-one
  modified_base 7: mod_base = OTHER; note = 2'-fluoroadenosine-3'-phosphate
  modified_base 8: mod_base = OTHER; note = 2'-O-methyladenosine-3'-phosphate
  modified_base 9: mod_base = OTHER; note = 2'-fluoroguanosine-3'-phosphate
  modified_base 10: mod_base = OTHER; note = 2'-fluoroguanosine-3'-phosphate
  modified_base 11: mod_base = OTHER; note = 2'-fluoroadenosine-3'-phosphate
  modified_base 12: mod_base = OTHER; note = 2'-O-methyluridine-3'-phosphate
  modified_base 13: mod_base = OTHER; note = 2'-O-methyladenosine-3'-phosphate
  modified_base 14: mod_base = OTHER; note = 2'-O-methyluridine-3'-phosphate
  modified_base 15: mod_base = OTHER; note = 2'-O-methyladenosine-3'-phosphate
  modified_base 16: mod_base = OTHER; note = 2'-O-methylcytidine-3'-phosphate
  modified_base 17: mod_base = OTHER; note = 2'-O-methyluridine-3'-phosphate
  modified_base 18: mod_base = OTHER; note = 2'-O-methyluridine-3'-phosphate
  modified_base 19: mod_base = OTHER; note = 2'-O-methylcytidine-3'-phosphorothioate
  modified_base 20: mod_base = OTHER; note = 2'-O-methyluridine-3'-phosphorothioate
  modified_base 21: mod_base = OTHER; note = 2'-O-methyladenosine-3'-phosphate
gttctgaaggatatacttcta

SEQ ID NO: 1454 - RNA, 21 nt, synthetic construct
  source 1..21: mol_type = other RNA
  modified_base 1: mod_base = OTHER; note = 2'-O-methylguanosine-3'-phosphorothioate
  modified_base 2: mod_base = OTHER; note = 2'-O-methyluridine-3'-phosphorothioate
  modified_base 3: mod_base = OTHER; note = 2'-O-methylguanosine-3'-phosphate
  modified_base 4: mod_base = OTHER; note = 2'-O-methyladenosine-3'-phosphate
  modified_base 5: mod_base = OTHER; note = 2'-O-methyladenosine-3'-phosphate
  modified_base 6: mod_base = OTHER; note 2-amino-9-((2R,3S,4S,5R)-3-(docosyloxy)-4-hydroxy-5-(hydrox ymethyl)tetrahydrofuran-2-yl)-1,9-dihydro-6H-purin-6-one
  modified_base 7: mod_base = OTHER; note = 2'-fluorocytidine-3'-phosphate
  modified_base 8: mod_base = OTHER; note = 2'-O-methyladenosine-3'-phosphate
  modified_base 9: mod_base = OTHER; note = 2'-fluorouridine-3'-phosphate
  modified_base 10: mod_base = OTHER; note = 2'-fluoroguanosine-3'-phosphate
  modified_base 11: mod_base = OTHER; note = 2'-fluoroadenosine-3'-phosphate
  modified_base 12: mod_base = OTHER; note = 2'-O-methyluridine-3'-phosphate
  modified_base 13: mod_base = OTHER; note = 2'-O-methyluridine-3'-phosphate
  modified_base 14: mod_base = OTHER; note = 2'-O-methylcytidine-3'-phosphate
  modified_base 15: mod_base = OTHER; note = 2'-O-methyladenosine-3'-phosphate
  modified_base 16: mod_base = OTHER; note = 2'-O-methyladenosine-3'-phosphate
  modified_base 17: mod_base = OTHER; note = 2'-O-methyluridine-3'-phosphate
  modified_base 18: mod_base = OTHER; note = 2'-O-methyladenosine-3'-phosphate
  modified_base 19: mod_base = OTHER; note = 2'-O-methylcytidine-3'-phosphorothioate
  modified_base 20: mod_base = OTHER; note = 2'-O-methyluridine-3'-phosphorothioate
  modified_base 21: mod_base = OTHER; note = 2'-O-methyladenosine-3'-phosphate
gtgaagcatgattcaatacta

SEQ ID NO: 1455 - RNA, 21 nt, synthetic construct
  source 1..21: mol_type = other RNA
  modified_base 1: mod_base = OTHER; note = 2'-O-methyladenosine-3'-phosphorothioate
  modified_base 2: mod_base = OTHER; note = 2'-O-methyladenosine-3'-phosphorothioate
  modified_base 3: mod_base = OTHER; note = 2'-O-methyluridine-3'-phosphate
  modified_base 4: mod_base = OTHER; note = 2'-O-methylguanosine-3'-phosphate
  modified_base 5: mod_base = OTHER; note = 2'-O-methylcytidine-3'-phosphate
  modified_base 6: mod_base = OTHER; note 1-((2R,3R,4R,5R)-3-(docosyloxy)-4-hydroxy-5-(hydroxymethyl) tetrahydrofuran-2-yl)pyrimidine-2,4(1H,3H)-dione
  modified_base 7: mod_base = OTHER; note = 2'-fluoroguanosine-3'-phosphate
  modified_base 8: mod_base = OTHER; note = 2'-O-methylcytidine-3'-phosphate
  modified_base 9: mod_base = OTHER; note = 2'-fluorouridine-3'-phosphate
  modified_base 10: mod_base = OTHER; note = 2'-fluorouridine-3'-phosphate
  modified_base 11: mod_base = OTHER; note = 2'-fluorocytidine-3'-phosphate
  modified_base 12: mod_base = OTHER; note = 2'-O-methyladenosine-3'-phosphate
  modified_base 13: mod_base = OTHER; note = 2'-O-methylcytidine-3'-phosphate
  modified_base 14: mod_base = OTHER; note = 2'-O-methyladenosine-3'-phosphate
  modified_base 15: mod_base = OTHER; note = 2'-O-methylguanosine-3'-phosphate
  modified_base 16: mod_base = OTHER; note = 2'-O-methyladenosine-3'-phosphate
  modified_base 17: mod_base = OTHER; note = 2'-O-methyluridine-3'-phosphate
  modified_base 18: mod_base = OTHER; note = 2'-O-methyluridine-3'-phosphate
  modified_base 19: mod_base = OTHER; note = 2'-O-methyluridine-3'-phosphorothioate
  modified_base 20: mod_base = OTHER; note = 2'-O-methyluridine-3'-phosphorothioate
  modified_base 21: mod_base = OTHER; note = 2'-O-methyladenosine-3'-phosphate
aatgctgcttcacagatttta

SEQ ID NO: 1456 - RNA, 21 nt, synthetic construct
  source 1..21: mol_type = other RNA
  modified_base 1: mod_base = OTHER; note = 2'-O-methyluridine-3'-phosphorothioate
  modified_base 2: mod_base = OTHER; note = 2'-O-methylguanosine-3'-phosphorothioate
  modified_base 3: mod_base = OTHER; note = 2'-O-methyluridine-3'-phosphate
  modified_base 4: mod_base = OTHER; note = 2'-O-methylguanosine-3'-phosphate
  modified_base 5: mod_base = OTHER; note = 2'-O-methylguanosine-3'-phosphate
  modified_base 6: mod_base = OTHER; note 2-amino-9-((2R,3S,4S,5R)-3-(docosyloxy)-4-hydroxy-5-(hydrox ymethyl)tetrahydrofuran-2-yl)-1,9-dihydro-6H-purin-6-one
  modified_base 7: mod_base = OTHER; note = 2'-fluorouridine-3'-phosphate
  modified_base 8: mod_base = OTHER; note = 2'-O-methyluridine-3'-phosphate
  modified_base 9: mod_base = OTHER; note = 2'-fluoroadenosine-3'-phosphate
  modified_base 10: mod_base = OTHER; note = 2'-fluorouridine-3'-phosphate
  modified_base 11: mod_base = OTHER; note = 2'-fluoroguanosine-3'-phosphate
  modified_base 12: mod_base = OTHER; note = 2'-O-methyluridine-3'-phosphate
  modified_base 13: mod_base = OTHER; note = 2'-O-methyluridine-3'-phosphate
  modified_base 14: mod_base = OTHER; note = 2'-O-methyladenosine-3'-phosphate
  modified_base 15: mod_base = OTHER; note = 2'-O-methyladenosine-3'-phosphate
  modified_base 16: mod_base = OTHER; note = 2'-O-methyluridine-3'-phosphate
  modified_base 17: mod_base = OTHER; note = 2'-O-methylcytidine-3'-phosphate
  modified_base 18: mod_base = OTHER; note = 2'-O-methyluridine-3'-phosphate
  modified_base 19: mod_base = OTHER; note = 2'-O-methylguanosine-3'-phosphorothioate
  modified_base 20: mod_base = OTHER; note = 2'-O-methyladenosine-3'-phosphorothioate
  modified_base 21: mod_base = OTHER; note = 2'-O-methyladenosine-3'-phosphate
tgtgggttatgttaatctgaa

SEQ ID NO: 1457 - RNA, 21 nt, synthetic construct
  source 1..21: mol_type = other RNA
  modified_base 1: mod_base = OTHER; note = 2'-O-methylguanosine-3'-phosphorothioate
  modified_base 2: mod_base = OTHER; note = 2'-O-methyladenosine-3'-phosphorothioate
  modified_base 3: mod_base = OTHER; note = 2'-O-methylguanosine-3'-phosphate
  modified_base 4: mod_base = OTHER; note = 2'-O-methyluridine-3'-phosphate
  modified_base 5: mod_base = OTHER; note = 2'-O-methyladenosine-3'-phosphate
  modified_base 6: mod_base = OTHER; note 4-amino-1-((2R,3R,4R,5R)-3-(docosyloxy)-4-hydroxy-5-(hydrox ymethyl)tetrahydrofuran-2-yl)pyrimidin-2(1H)-one
  modified_base 7: mod_base = OTHER; note = 2'-fluoroadenosine-3'-phosphate
  modified_base 8: mod_base = OTHER; note = 2'-O-methylguanosine-3'-phosphate
  modified_base 9: mod_base = OTHER; note = 2'-fluoroadenosine-3'-phosphate
  modified_base 10: mod_base = OTHER; note = 2'-fluoroadenosine-3'-phosphate
  modified_base 11: mod_base = OTHER; note = 2'-fluoroguanosine-3'-phosphate
  modified_base 12: mod_base = OTHER; note = 2'-O-methyladenosine-3'-phosphate
  modified_base 13: mod_base = OTHER; note = 2'-O-methyladenosine-3'-phosphate
  modified_base 14: mod_base = OTHER; note = 2'-O-methyluridine-3'-phosphate
  modified_base 15: mod_base = OTHER; note = 2'-O-methylguanosine-3'-phosphate
  modified_base 16: mod_base = OTHER; note = 2'-O-methylcytidine-3'-phosphate
  modified_base 17: mod_base = OTHER; note = 2'-O-methyluridine-3'-phosphate
  modified_base 18: mod_base = OTHER; note = 2'-O-methylcytidine-3'-phosphate
  modified_base 19: mod_base = OTHER; note = 2'-O-methyladenosine-3'-phosphorothioate
  modified_base 20: mod_base = OTHER; note = 2'-O-methyluridine-3'-phosphorothioate
  modified_base 21: mod_base = OTHER; note = 2'-O-methyladenosine-3'-phosphate
gagtacagaagaatgctcata

SEQ ID NO: 1458 - RNA, 21 nt, synthetic construct
  source 1..21: mol_type = other RNA
  modified_base 1: mod_base = OTHER; note = 2'-O-methylcytidine-3'-phosphorothioate
  modified_base 2: mod_base = OTHER; note = 2'-O-methyluridine-3'-phosphorothioate
  modified_base 3: mod_base = OTHER; note = 2'-O-methylguanosine-3'-phosphate
  modified_base 4: mod_base = OTHER; note = 2'-O-methyluridine-3'-phosphate
  modified_base 5: mod_base = OTHER; note = 2'-O-methyladenosine-3'-phosphate
  modified_base 6: mod_base = OTHER; note 1-((2R,3R,4R,5R)-3-(docosyloxy)-4-hydroxy-5-(hydroxymethyl) tetrahydrofuran-2-yl)pyrimidine-2,4(1H,3H)-dione
  modified_base 7: mod_base = OTHER; note = 2'-fluorouridine-3'-phosphate
  modified_base 8: mod_base = OTHER; note = 2'-O-methyluridine-3'-phosphate
  modified_base 9: mod_base = OTHER; note = 2'-fluorocytidine-3'-phosphate
  modified_base 10: mod_base = OTHER; note = 2'-fluoroadenosine-3'-phosphate
  modified_base 11: mod_base = OTHER; note = 2'-fluorouridine-3'-phosphate
  modified_base 12: mod_base = OTHER; note = 2'-O-methylcytidine-3'-phosphate
  modified_base 13: mod_base = OTHER; note = 2'-O-methylcytidine-3'-phosphate
  modified_base 14: mod_base = OTHER; note = 2'-O-methyluridine-3'-phosphate
  modified_base 15: mod_base = OTHER; note = 2'-O-methyladenosine-3'-phosphate
  modified_base 16: mod_base = OTHER; note = 2'-O-methylguanosine-3'-phosphate
  modified_base 17: mod_base = OTHER; note = 2'-O-methyladenosine-3'-phosphate
  modified_base 18: mod_base = OTHER; note = 2'-O-methyluridine-3'-phosphate
  modified_base 19: mod_base = OTHER; note = 2'-O-methyluridine-3'-phosphorothioate
  modified_base 20: mod_base = OTHER; note = 2'-O-methyluridine-3'-phosphorothioate
  modified_base 21: mod_base = OTHER; note = 2'-O-methyladenosine-3'-phosphate
ctgtatttcatcctagattta

SEQ ID NO: 1459 - RNA, 21 nt, synthetic construct
  source 1..21: mol_type = other RNA
  modified_base 1: mod_base = OTHER; note = 2'-O-methyladenosine-3'-phosphorothioate
  modified_base 2: mod_base = OTHER; note = 2'-O-methyladenosine-3'-phosphorothioate
  modified_base 3: mod_base = OTHER; note = 2'-O-methyluridine-3'-phosphate
  modified_base 4: mod_base = OTHER; note = 2'-O-methylcytidine-3'-phosphate
  modified_base 5: mod_base = OTHER; note = 2'-O-methyluridine-3'-phosphate
  modified_base 6: mod_base = OTHER; note 2-amino-9-((2R,3S,4S,5R)-3-(docosyloxy)-4-hydroxy-5-(hydrox ymethyl)tetrahydrofuran-2-yl)-1,9-dihydro-6H-purin-6-one
  modified_base 7: mod_base = OTHER; note = 2'-fluoroguanosine-3'-phosphate
  modified_base 8: mod_base = OTHER; note = 2'-O-methyluridine-3'-phosphate
  modified_base 9: mod_base = OTHER; note = 2'-fluoroadenosine-3'-phosphate
  modified_base 10: mod_base = OTHER; note = 2'-fluoroadenosine-3'-phosphate
  modified_base 11: mod_base = OTHER; note = 2'-fluoroadenosine-3'-phosphate
  modified_base 12: mod_base = OTHER; note = 2'-O-methyluridine-3'-phosphate
  modified_base 13: mod_base = OTHER; note = 2'-O-methylguanosine-3'-phosphate
  modified_base 14: mod_base = OTHER; note = 2'-O-methylcytidine-3'-phosphate
  modified_base 15: mod_base = OTHER; note = 2'-O-methyluridine-3'-phosphate
  modified_base 16: mod_base = OTHER; note = 2'-O-methylguanosine-3'-phosphate
  modified_base 17: mod_base = OTHER; note = 2'-O-methylguanosine-3'-phosphate
  modified_base 18: mod_base = OTHER; note = 2'-O-methyladenosine-3'-phosphate
  modified_base 19: mod_base = OTHER; note = 2'-O-methyladenosine-3'-phosphorothioate
  modified_base 20: mod_base = OTHER; note = 2'-O-methyladenosine-3'-phosphorothioate
  modified_base 21: mod_base = OTHER; note = 2'-O-methyladenosine-3'-phosphate
aatctggtaaatgctggaaaa

SEQ ID NO: 1460 - RNA, 21 nt, synthetic construct
  source 1..21: mol_type = other RNA
  modified_base 1: mod_base = OTHER; note = 2'-O-methyluridine-3'-phosphorothioate
  modified_base 2: mod_base = OTHER; note = 2'-O-methylguanosine-3'-phosphorothioate
  modified_base 3: mod_base = OTHER; note = 2'-O-methylcytidine-3'-phosphate
  modified_base 4: mod_base = OTHER; note = 2'-O-methyluridine-3'-phosphate
  modified_base 5: mod_base = OTHER; note = 2'-O-methylcytidine-3'-phosphate
  modified_base 6: mod_base = OTHER; note (2R,3S,4S,5R)-5-(6-amino-9H-purin-9-yl)-4-(docosyloxy)-2-(h ydroxymethyl)tetrahydrofuran-3-ol
  modified_base 7: mod_base = OTHER; note = 2'-fluoroguanosine-3'-phosphate
  modified_base 8: mod_base = OTHER; note = 2'-O-methyladenosine-3'-phosphate
  modified_base 9: mod_base = OTHER; note = 2'-fluorouridine-3'-phosphate
  modified_base 10: mod_base = OTHER; note = 2'-fluorouridine-3'-phosphate
  modified_base 11: mod_base = OTHER; note = 2'-fluoroadenosine-3'-phosphate
  modified_base 12: mod_base = OTHER; note = 2'-O-methylcytidine-3'-phosphate
  modified_base 13: mod_base = OTHER; note = 2'-O-methylcytidine-3'-phosphate
  modified_base 14: mod_base = OTHER; note = 2'-O-methyluridine-3'-phosphate
  modified_base 15: mod_base = OTHER; note = 2'-O-methylguanosine-3'-phosphate
  modified_base 16: mod_base = OTHER; note = 2'-O-methyladenosine-3'-phosphate
  modified_base 17: mod_base = OTHER; note = 2'-O-methyluridine-3'-phosphate
  modified_base 18: mod_base = OTHER; note = 2'-O-methylcytidine-3'-phosphate
  modified_base 19: mod_base = OTHER; note = 2'-O-methylguanosine-3'-phosphorothioate
  modified_base 20: mod_base = OTHER; note = 2'-O-methyluridine-3'-phosphorothioate
  modified_base 21: mod_base = OTHER; note = 2'-O-methyladenosine-3'-phosphate
tgctcagattacctgatcgta

SEQ ID NO: 1461 - RNA, 21 nt, synthetic construct
  source 1..21: mol_type = other RNA
  modified_base 1: mod_base = OTHER; note = 2'-O-methylguanosine-3'-phosphorothioate
  modified_base 2: mod_base = OTHER; note = 2'-O-methyladenosine-3'-phosphorothioate
  modified_base 3: mod_base = OTHER; note = 2'-O-methylcytidine-3'-phosphate
  modified_base 4: mod_base = OTHER; note = 2'-O-methyladenosine-3'-phosphate
  modified_base 5: mod_base = OTHER; note = 2'-O-methylguanosine-3'-phosphate
  modified_base 6: mod_base = OTHER; note 4-amino-1-((2R,3R,4R,5R)-3-(docosyloxy)-4-hydroxy-5-(hydrox ymethyl)tetrahydrofuran-2-yl)pyrimidin-2(1H)-one
  modified_base 7: mod_base = OTHER; note = 2'-fluorouridine-3'-phosphate
  modified_base 8: mod_base = OTHER; note = 2'-O-methyladenosine-3'-phosphate
  modified_base 9: mod_base = OTHER; note = 2'-fluorouridine-3'-phosphate
  modified_base 10: mod_base = OTHER; note = 2'-fluoroguanosine-3'-phosphate
  modified_base 11: mod_base = OTHER; note = 2'-fluoroguanosine-3'-phosphate
  modified_base 12: mod_base = OTHER; note = 2'-O-methyladenosine-3'-phosphate
  modified_base 13: mod_base = OTHER; note = 2'-O-methylguanosine-3'-phosphate
  modified_base 14: mod_base = OTHER; note = 2'-O-methyluridine-3'-phosphate
  modified_base 15: mod_base = OTHER; note = 2'-O-methyluridine-3'-phosphate
  modified_base 16: mod_base = OTHER; note = 2'-O-methyluridine-3'-phosphate
  modified_base 17: mod_base = OTHER; note = 2'-O-methylguanosine-3'-phosphate
  modified_base 18: mod_base = OTHER; note = 2'-O-methylcytidine-3'-phosphate
  modified_base 19: mod_base = OTHER; note = 2'-O-methylguanosine-3'-phosphorothioate
  modified_base 20: mod_base = OTHER; note = 2'-O-methyluridine-3'-phosphorothioate
  modified_base 21: mod_base = OTHER; note = 2'-O-methyladenosine-3'-phosphate
gacagctatggagtttgcgta

SEQ ID NO: 1462 - RNA, 21 nt, synthetic construct
  source 1..21: mol_type = other RNA
  modified_base 1: mod_base = OTHER; note = 2'-O-methyluridine-3'-phosphorothioate
  modified_base 2: mod_base = OTHER; note = 2'-O-methyladenosine-3'-phosphorothioate
  modified_base 3: mod_base = OTHER; note = 2'-O-methylguanosine-3'-phosphate
  modified_base 4: mod_base = OTHER; note = 2'-O-methyladenosine-3'-phosphate
  modified_base 5: mod_base = OTHER; note = 2'-O-methyladenosine-3'-phosphate
  modified_base 6: mod_base = OTHER; note 4-amino-1-((2R,3R,4R,5R)-3-(docosyloxy)-4-hydroxy-5-(hydrox ymethyl)tetrahydrofuran-2-yl)pyrimidin-2(1H)-one
  modified_base 7: mod_base = OTHER; note = 2'-fluoroadenosine-3'-phosphate
  modified_base 8: mod_base = OTHER; note = 2'-O-methyluridine-3'-phosphate
  modified_base 9: mod_base = OTHER; note = 2'-fluoroguanosine-3'-phosphate
  modified_base 10: mod_base = OTHER; note = 2'-fluorocytidine-3'-phosphate
  modified_base 11: mod_base = OTHER; note = 2'-fluorouridine-3'-phosphate
  modified_base 12: mod_base = OTHER; note = 2'-O-methylcytidine-3'-phosphate
  modified_base 13: mod_base = OTHER; note = 2'-O-methyladenosine-3'-phosphate
  modified_base 14: mod_base = OTHER; note = 2'-O-methylcytidine-3'-phosphate
  modified_base 15: mod_base = OTHER; note = 2'-O-methyluridine-3'-phosphate
  modified_base 16: mod_base = OTHER; note = 2'-O-methyluridine-3'-phosphate
  modified_base 17: mod_base = OTHER; note = 2'-O-methyladenosine-3'-phosphate
  modified_base 18: mod_base = OTHER; note = 2'-O-methylcytidine-3'-phosphate
  modified_base 19: mod_base = OTHER; note = 2'-O-methyladenosine-3'-phosphorothioate
  modified_base 20: mod_base = OTHER; note = 2'-O-methyladenosine-3'-phosphorothioate
  modified_base 21: mod_base = OTHER; note = 2'-O-methyladenosine-3'-phosphate
tagaacatgctcacttacaaa

SEQ ID NO: 1463 - RNA, 21 nt, synthetic construct
  source 1..21: mol_type = other RNA
  modified_base 1: mod_base = OTHER; note = 2'-O-methyladenosine-3'-phosphorothioate
  modified_base 2: mod_base = OTHER; note = 2'-O-methyluridine-3'-phosphorothioate
  modified_base 3: mod_base = OTHER; note = 2'-O-methyluridine-3'-phosphate
  modified_base 4: mod_base = OTHER; note = 2'-O-methyladenosine-3'-phosphate
  modified_base 5: mod_base = OTHER; note = 2'-O-methyluridine-3'-phosphate
  modified_base 6: mod_base = OTHER; note 2-amino-9-((2R,3S,4S,5R)-3-(docosyloxy)-4-hydroxy-5-(hydrox ymethyl)tetrahydrofuran-2-yl)-1,9-dihydro-6H-purin-6-one
  modified_base 7: mod_base = OTHER; note = 2'-fluorocytidine-3'-phosphate
  modified_base 8: mod_base = OTHER; note = 2'-O-methyluridine-3'-phosphate
  modified_base 9: mod_base = OTHER; note = 2'-fluorouridine-3'-phosphate
  modified_base 10: mod_base = OTHER; note = 2'-fluorocytidine-3'-phosphate
  modified_base 11: mod_base = OTHER; note = 2'-fluoroadenosine-3'-phosphate
  modified_base 12: mod_base = OTHER; note = 2'-O-methyluridine-3'-phosphate
  modified_base 13: mod_base = OTHER; note = 2'-O-methyluridine-3'-phosphate
  modified_base 14: mod_base = OTHER; note = 2'-O-methyluridine-3'-phosphate
  modified_base 15: mod_base = OTHER; note = 2'-O-methylcytidine-3'-phosphate
  modified_base 16: mod_base = OTHER; note = 2'-O-methyladenosine-3'-phosphate
  modified_base 17: mod_base = OTHER; note = 2'-O-methylcytidine-3'-phosphate
  modified_base 18: mod_base = OTHER; note = 2'-O-methyluridine-3'-phosphate
  modified_base 19: mod_base = OTHER; note = 2'-O-methyladenosine-3'-phosphorothioate
  modified_base 20: mod_base = OTHER; note = 2'-O-methyluridine-3'-phosphorothioate
  modified_base 21: mod_base = OTHER; note = 2'-O-methyladenosine-3'-phosphate
attatgcttcatttcactata

SEQ ID NO: 1464 - RNA, 21 nt, synthetic construct
  source 1..21: mol_type = other RNA
  modified_base 1: mod_base = OTHER; note = 2'-O-methylcytidine-3'-phosphorothioate
  modified_base 2: mod_base = OTHER; note = 2'-O-methyladenosine-3'-phosphorothioate
  modified_base 3: mod_base = OTHER; note = 2'-O-methyladenosine-3'-phosphate
  modified_base 4: mod_base = OTHER; note = 2'-O-methylcytidine-3'-phosphate
  modified_base 5: mod_base = OTHER; note = 2'-O-methyladenosine-3'-phosphate
  modified_base 6: mod_base = OTHER; note 2-amino-9-((2R,3S,4S,5R)-3-(docosyloxy)-4-hydroxy-5-(hydrox ymethyl)tetrahydrofuran-2-yl)-1,9-dihydro-6H-purin-6-one
  modified_base 7: mod_base = OTHER; note = 2'-fluorocytidine-3'-phosphate
  modified_base 8: mod_base = OTHER; note = 2'-O-methyladenosine-3'-phosphate
  modified_base 9: mod_base = OTHER; note = 2'-fluoroadenosine-3'-phosphate
  modified_base 10: mod_base = OTHER; note = 2'-fluoroguanosine-3'-phosphate
  modified_base 11: mod_base = OTHER; note = 2'-fluorouridine-3'-phosphate
  modified_base 12: mod_base = OTHER; note = 2'-O-methylcytidine-3'-phosphate
  modified_base 13: mod_base = OTHER; note = 2'-O-methyladenosine-3'-phosphate
  modified_base 14: mod_base = OTHER; note = 2'-O-methyluridine-3'-phosphate
  modified_base 15: mod_base = OTHER; note = 2'-O-methyladenosine-3'-phosphate
  modified_base 16: mod_base = OTHER; note = 2'-O-methyladenosine-3'-phosphate
  modified_base 17: mod_base = OTHER; note = 2'-O-methyladenosine-3'-phosphate
  modified_base 18: mod_base = OTHER; note = 2'-O-methyladenosine-3'-phosphate
  modified_base 19: mod_base = OTHER; note = 2'-O-methylguanosine-3'-phosphorothioate
  modified_base 20: mod_base = OTHER; note = 2'-O-methyluridine-3'-phosphorothioate
  modified_base 21: mod_base = OTHER; note = 2'-O-methyladenosine-3'-phosphate
caacagcaagtcataaaagta

SEQ ID NO: 1465 - RNA, 21 nt, synthetic construct
  source 1..21: mol_type = other RNA
  modified_base 1: mod_base = OTHER; note = 2'-O-methyluridine-3'-phosphorothioate
  modified_base 2: mod_base = OTHER; note = 2'-O-methyluridine-3'-phosphorothioate
  modified_base 3: mod_base = OTHER; note = 2'-O-methylguanosine-3'-phosphate
  modified_base 4: mod_base = OTHER; note = 2'-O-methyluridine-3'-phosphate
  modified_base 5: mod_base = OTHER; note = 2'-O-methylcytidine-3'-phosphate
  modified_base 6: mod_base = OTHER; note 1-((2R,3R,4R,5R)-3-(docosyloxy)-4-hydroxy-5-(hydroxymethyl) tetrahydrofuran-2-yl)pyrimidine-2,4(1H,3H)-dione
  modified_base 7: mod_base = OTHER; note = 2'-fluoroguanosine-3'-phosphate
  modified_base 8: mod_base = OTHER; note = 2'-O-methyladenosine-3'-phosphate
  modified_base 9: mod_base = OTHER; note = 2'-fluoroadenosine-3'-phosphate
  modified_base 10: mod_base = OTHER; note = 2'-fluoroadenosine-3'-phosphate
  modified_base 11: mod_base = OTHER; note = 2'-fluoroadenosine-3'-phosphate
  modified_base 12: mod_base = OTHER; note = 2'-O-methyluridine-3'-phosphate
  modified_base 13: mod_base = OTHER; note = 2'-O-methylguanosine-3'-phosphate
  modified_base 14: mod_base = OTHER; note = 2'-O-methyluridine-3'-phosphate
  modified_base 15: mod_base = OTHER; note = 2'-O-methylcytidine-3'-phosphate
  modified_base 16: mod_base = OTHER; note = 2'-O-methyluridine-3'-phosphate
  modified_base 17: mod_base = OTHER; note = 2'-O-methyluridine-3'-phosphate
  modified_base 18: mod_base = OTHER; note = 2'-O-methyluridine-3'-phosphate
  modified_base 19: mod_base = OTHER; note = 2'-O-methyladenosine-3'-phosphorothioate
  modified_base 20: mod_base = OTHER; note = 2'-O-methyladenosine-3'-phosphorothioate
  modified_base 21: mod_base = OTHER; note = 2'-O-methyladenosine-3'-phosphate
ttgtctgaaaatgtctttaaa

SEQ ID NO: 1466 - RNA, 21 nt, synthetic construct
  source 1..21: mol_type = other RNA
  modified_base 1: mod_base = OTHER; note = 2'-O-methyluridine-3'-phosphorothioate
  modified_base 2: mod_base = OTHER; note = 2'-O-methylguanosine-3'-phosphorothioate
  modified_base 3: mod_base = OTHER; note = 2'-O-methyluridine-3'-phosphate
  modified_base 4: mod_base = OTHER; note = 2'-O-methyluridine-3'-phosphate
  modified_base 5: mod_base = OTHER; note = 2'-O-methylguanosine-3'-phosphate
  modified_base 6: mod_base = OTHER; note 2-amino-9-((2R,3S,4S,5R)-3-(docosyloxy)-4-hydroxy-5-(hydrox ymethyl)tetrahydrofuran-2-yl)-1,9-dihydro-6H-purin-6-one
  modified_base 7: mod_base = OTHER; note = 2'-fluorouridine-3'-phosphate
  modified_base 8: mod_base = OTHER; note = 2'-O-methyluridine-3'-phosphate
  modified_base 9: mod_base = OTHER; note = 2'-fluorocytidine-3'-phosphate
  modified_base 10: mod_base = OTHER; note = 2'-fluoroadenosine-3'-phosphate
  modified_base 11: mod_base = OTHER; note = 2'-fluoroadenosine-3'-phosphate
  modified_base 12: mod_base = OTHER; note = 2'-O-methyladenosine-3'-phosphate
  modified_base 13: mod_base = OTHER; note = 2'-O-methylguanosine-3'-phosphate
  modified_base 14: mod_base = OTHER; note = 2'-O-methylguanosine-3'-phosphate
  modified_base 15: mod_base = OTHER; note = 2'-O-methyladenosine-3'-phosphate
  modified_base 16: mod_base = OTHER; note = 2'-O-methylcytidine-3'-phosphate
  modified_base 17: mod_base = OTHER; note = 2'-O-methyladenosine-3'-phosphate
  modified_base 18: mod_base = OTHER; note = 2'-O-methyladenosine-3'-phosphate
  modified_base 19: mod_base = OTHER; note = 2'-O-methyluridine-3'-phosphorothioate
  modified_base 20: mod_base = OTHER; note = 2'-O-methyluridine-3'-phosphorothioate
  modified_base 21: mod_base = OTHER; note = 2'-O-methyladenosine-3'-phosphate
tgttggttcaaaggacaatta

SEQ ID NO: 1467 - RNA, 21 nt, synthetic construct
  source 1..21: mol_type = other RNA
  modified_base 1: mod_base = OTHER; note = 2'-O-methyluridine-3'-phosphorothioate
  modified_base 2: mod_base = OTHER; note = 2'-O-methylcytidine-3'-phosphorothioate
  modified_base 3: mod_base = OTHER; note = 2'-O-methyluridine-3'-phosphate
  modified_base 4: mod_base = OTHER; note = 2'-O-methyladenosine-3'-phosphate
  modified_base 5: mod_base = OTHER; note = 2'-O-methyladenosine-3'-phosphate
  modified_base 6: mod_base = OTHER; note (2R,3S,4S,5R)-5-(6-amino-9H-purin-9-yl)-4-(docosyloxy)-2-(h ydroxymethyl)tetrahydrofuran-3-ol
  modified_base 7: mod_base = OTHER; note = 2'-fluorocytidine-3'-phosphate
  modified_base 8: mod_base = OTHER; note = 2'-O-methyluridine-3'-phosphate
  modified_base 9: mod_base = OTHER; note = 2'-fluorouridine-3'-phosphate
  modified_base 10: mod_base = OTHER; note = 2'-fluorouridine-3'-phosphate
  modified_base 11: mod_base = OTHER; note = 2'-fluoroadenosine-3'-phosphate
  modified_base 12: mod_base = OTHER; note = 2'-O-methyladenosine-3'-phosphate
  modified_base 13: mod_base = OTHER; note = 2'-O-methyluridine-3'-phosphate
  modified_base 14: mod_base = OTHER; note = 2'-O-methyladenosine-3'-phosphate
  modified_base 15: mod_base = OTHER; note = 2'-O-methyluridine-3'-phosphate
  modified_base 16: mod_base = OTHER; note = 2'-O-methyladenosine-3'-phosphate
  modified_base 17: mod_base = OTHER; note = 2'-O-methyluridine-3'-phosphate
  modified_base 18: mod_base = OTHER; note = 2'-O-methylcytidine-3'-phosphate
  modified_base 19: mod_base = OTHER; note = 2'-O-methylguanosine-3'-phosphorothioate
  modified_base 20: mod_base = OTHER; note = 2'-O-methyladenosine-3'-phosphorothioate
  modified_base 21: mod_base = OTHER; note = 2'-O-methyladenosine-3'-phosphate
tctaaactttaatatatcgaa

SEQ ID NO: 1468 - RNA, 21 nt, synthetic construct
  source 1..21: mol_type = other RNA
  modified_base 1: mod_base = OTHER; note = 2'-O-methyladenosine-3'-phosphorothioate
  modified_base 2: mod_base = OTHER; note = 2'-O-methyladenosine-3'-phosphorothioate
  modified_base 3: mod_base = OTHER; note = 2'-O-methylguanosine-3'-phosphate
  modified_base 4: mod_base = OTHER; note = 2'-O-methyluridine-3'-phosphate
  modified_base 5: mod_base = OTHER; note = 2'-O-methylguanosine-3'-phosphate
  modified_base 6: mod_base = OTHER; note (2R,3S,4S,5R)-5-(6-amino-9H-purin-9-yl)-4-(docosyloxy)-2-(h ydroxymethyl)tetrahydrofuran-3-ol
  modified_base 7: mod_base = OTHER; note = 2'-fluoroadenosine-3'-phosphate
  modified_base 8: mod_base = OTHER; note = 2'-O-methyladenosine-3'-phosphate
  modified_base 9: mod_base = OTHER; note = 2'-fluorocytidine-3'-phosphate
  modified_base 10: mod_base = OTHER; note = 2'-fluoroadenosine-3'-phosphate
  modified_base 11: mod_base = OTHER; note = 2'-fluorouridine-3'-phosphate
  modified_base 12: mod_base = OTHER; note = 2'-O-methylguanosine-3'-phosphate
  modified_base 13: mod_base = OTHER; note = 2'-O-methyladenosine-3'-phosphate
  modified_base 14: mod_base = OTHER; note = 2'-O-methylcytidine-3'-phosphate
  modified_base 15: mod_base = OTHER; note = 2'-O-methyluridine-3'-phosphate
  modified_base 16: mod_base = OTHER; note = 2'-O-methylguanosine-3'-phosphate
  modified_base 17: mod_base = OTHER; note = 2'-O-methyluridine-3'-phosphate
  modified_base 18: mod_base = OTHER; note = 2'-O-methylcytidine-3'-phosphate
  modified_base 19: mod_base = OTHER; note = 2'-O-methylguanosine-3'-phosphorothioate
  modified_base 20: mod_base = OTHER; note = 2'-O-methyluridine-3'-phosphorothioate
  modified_base 21: mod_base = OTHER; note = 2'-O-methyladenosine-3'-phosphate
aagtgaaacatgactgtcgta

SEQ ID NO: 1469 - RNA, 21 nt, synthetic construct
  source 1..21: mol_type = other RNA
  modified_base 1: mod_base = OTHER; note = 2'-O-methyladenosine-3'-phosphorothioate
  modified_base 2: mod_base = OTHER; note = 2'-O-methyluridine-3'-phosphorothioate
  modified_base 3: mod_base = OTHER; note = 2'-O-methylcytidine-3'-phosphate
  modified_base 4: mod_base = OTHER; note = 2'-O-methylguanosine-3'-phosphate
  modified_base 5: mod_base = OTHER; note = 2'-O-methyluridine-3'-phosphate
  modified_base 6: mod_base = OTHER; note 4-amino-1-((2R,3R,4R,5R)-3-(docosyloxy)-4-hydroxy-5-(hydrox ymethyl)tetrahydrofuran-2-yl)pyrimidin-2(1H)-one
  modified_base 7: mod_base = OTHER; note = 2'-fluorocytidine-3'-phosphate
  modified_base 8: mod_base = OTHER; note = 2'-O-methyladenosine-3'-phosphate
  modified_base 9: mod_base = OTHER; note = 2'-fluorouridine-3'-phosphate
  modified_base 10: mod_base = OTHER; note = 2'-fluoroadenosine-3'-phosphate
  modified_base 11: mod_base = OTHER; note = 2'-fluorocytidine-3'-phosphate
  modified_base 12: mod_base = OTHER; note = 2'-O-methyladenosine-3'-phosphate
  modified_base 13: mod_base = OTHER; note = 2'-O-methylguanosine-3'-phosphate
  modified_base 14: mod_base = OTHER; note = 2'-O-methyluridine-3'-phosphate
  modified_base 15: mod_base = OTHER; note = 2'-O-methyluridine-3'-phosphate
  modified_base 16: mod_base = OTHER; note = 2'-O-methyluridine-3'-phosphate
  modified_base 17: mod_base = OTHER; note = 2'-O-methyluridine-3'-phosphate
  modified_base 18: mod_base = OTHER; note = 2'-O-methylcytidine-3'-phosphate
  modified_base 19: mod_base = OTHER; note = 2'-O-methyladenosine-3'-phosphorothioate
  modified_base 20: mod_base = OTHER; note = 2'-O-methyluridine-3'-phosphorothioate
  modified_base 21: mod_base = OTHER; note = 2'-O-methyladenosine-3'-phosphate
atcgtccatacagttttcata

SEQ ID NO: 1470 - RNA, 21 nt, synthetic construct
  source 1..21: mol_type = other RNA
  modified_base 1: mod_base = OTHER; note = 2'-O-methylcytidine-3'-phosphorothioate
  modified_base 2: mod_base = OTHER; note = 2'-O-methyluridine-3'-phosphorothioate
  modified_base 3: mod_base = OTHER; note = 2'-O-methyluridine-3'-phosphate
  modified_base 4: mod_base = OTHER; note = 2'-O-methylcytidine-3'-phosphate
  modified_base 5: mod_base = OTHER; note = 2'-O-methyladenosine-3'-phosphate
  modified_base 6: mod_base = OTHER; note 2-amino-9-((2R,3S,4S,5R)-3-(docosyloxy)-4-hydroxy-5-(hydrox ymethyl)tetrahydrofuran-2-yl)-1,9-dihydro-6H-purin-6-one
  modified_base 7: mod_base = OTHER; note = 2'-fluoroguanosine-3'-phosphate
  modified_base 8: mod_base = OTHER; note = 2'-O-methyladenosine-3'-phosphate
  modified_base 9: mod_base = OTHER; note = 2'-fluoroadenosine-3'-phosphate
  modified_base 10: mod_base = OTHER; note = 2'-fluoroadenosine-3'-phosphate
  modified_base 11: mod_base = OTHER; note = 2'-fluorouridine-3'-phosphate
  modified_base 12: mod_base = OTHER; note = 2'-O-methyladenosine-3'-phosphate
  modified_base 13: mod_base = OTHER; note = 2'-O-methylguanosine-3'-phosphate
  modified_base 14: mod_base = OTHER; note = 2'-O-methyluridine-3'-phosphate
  modified_base 15: mod_base = OTHER; note = 2'-O-methyladenosine-3'-phosphate
  modified_base 16: mod_base = OTHER; note = 2'-O-methylguanosine-3'-phosphate
  modified_base 17: mod_base = OTHER; note = 2'-O-methylguanosine-3'-phosphate
  modified_base 18: mod_base = OTHER; note = 2'-O-methyladenosine-3'-phosphate
  modified_base 19: mod_base = OTHER; note = 2'-O-methyladenosine-3'-phosphorothioate
  modified_base 20: mod_base = OTHER; note = 2'-O-methyladenosine-3'-phosphorothioate
  modified_base 21: mod_base = OTHER; note = 2'-O-methyladenosine-3'-phosphate
cttcaggaaatagtaggaaaa

SEQ ID NO: 1471 - RNA, 21 nt, synthetic construct
  source 1..21: mol_type = other RNA
  modified_base 1: mod_base = OTHER; note = 2'-O-methylcytidine-3'-phosphorothioate
  modified_base 2: mod_base = OTHER; note = 2'-O-methyladenosine-3'-phosphorothioate
  modified_base 3: mod_base = OTHER; note = 2'-O-methylcytidine-3'-phosphate
  modified_base 4: mod_base = OTHER; note = 2'-O-methylcytidine-3'-phosphate
  modified_base 5: mod_base = OTHER; note = 2'-O-methylcytidine-3'-phosphate
  modified_base 6: mod_base = OTHER; note 1-((2R,3R,4R,5R)-3-(docosyloxy)-4-hydroxy-5-(hydroxymethyl) tetrahydrofuran-2-yl)pyrimidine-2,4(1H,3H)-dione
  modified_base 7: mod_base = OTHER; note = 2'-fluorouridine-3'-phosphate
  modified_base 8: mod_base = OTHER; note = 2'-O-methyluridine-3'-phosphate
  modified_base 9: mod_base = OTHER; note = 2'-fluorocytidine-3'-phosphate
  modified_base 10: mod_base = OTHER; note = 2'-fluorouridine-3'-phosphate
  modified_base 11: mod_base = OTHER; note = 2'-fluoroguanosine-3'-phosphate
  modified_base 12: mod_base = OTHER; note = 2'-O-methyluridine-3'-phosphate
  modified_base 13: mod_base = OTHER; note = 2'-O-methyladenosine-3'-phosphate
  modified_base 14: mod_base = OTHER; note = 2'-O-methyladenosine-3'-phosphate
  modified_base 15: mod_base = OTHER; note = 2'-O-methylguanosine-3'-phosphate
  modified_base 16: mod_base = OTHER; note = 2'-O-methylguanosine-3'-phosphate
  modified_base 17: mod_base = OTHER; note = 2'-O-methyladenosine-3'-phosphate
  modified_base 18: mod_base = OTHER; note = 2'-O-methylcytidine-3'-phosphate
  modified_base 19: mod_base = OTHER; note = 2'-O-methyluridine-3'-phosphorothioate
  modified_base 20: mod_base = OTHER; note = 2'-O-methylguanosine-3'-phosphorothioate
  modified_base 21: mod_base = OTHER; note = 2'-O-methyladenosine-3'-phosphate
caccctttctgtaaggactga

SEQ ID NO: 1472 - RNA, 21 nt, synthetic construct
  source 1..21: mol_type = other RNA
  modified_base 1: mod_base = OTHER; note = 2'-O-methyladenosine-3'-phosphorothioate
  modified_base 2: mod_base = OTHER; note = 2'-O-methyladenosine-3'-phosphorothioate
  modified_base 3: mod_base = OTHER; note = 2'-O-methyladenosine-3'-phosphate
  modified_base 4: mod_base = OTHER; note = 2'-O-methylguanosine-3'-phosphate
  modified_base 5: mod_base = OTHER; note = 2'-O-methyladenosine-3'-phosphate
  modified_base 6: mod_base = OTHER; note 2-amino-9-((2R,3S,4S,5R)-3-(docosyloxy)-4-hydroxy-5-(hydrox ymethyl)tetrahydrofuran-2-yl)-1,9-dihydro-6H-purin-6-one
  modified_base 7: mod_base = OTHER; note = 2'-fluoroadenosine-3'-phosphate
  modified_base 8: mod_base = OTHER; note = 2'-O-methyluridine-3'-phosphate
  modified_base 9: mod_base = OTHER; note = 2'-fluoroadenosine-3'-phosphate
  modified_base 10: mod_base = OTHER; note = 2'-fluorocytidine-3'-phosphate
  modified_base 11: mod_base = OTHER; note = 2'-fluorocytidine-3'-phosphate
  modified_base 12: mod_base = OTHER; note = 2'-O-methyluridine-3'-phosphate
  modified_base 13: mod_base = OTHER; note = 2'-O-methylguanosine-3'-phosphate
  modified_base 14: mod_base = OTHER; note = 2'-O-methyladenosine-3'-phosphate
  modified_base 15: mod_base = OTHER; note = 2'-O-methylcytidine-3'-phosphate
  modified_base 16: mod_base = OTHER; note = 2'-O-methyladenosine-3'-phosphate
  modified_base 17: mod_base = OTHER; note = 2'-O-methyluridine-3'-phosphate
  modified_base 18: mod_base = OTHER; note = 2'-O-methylcytidine-3'-phosphate
  modified_base 19: mod_base = OTHER; note = 2'-O-methylcytidine-3'-phosphorothioate
  modified_base 20: mod_base = OTHER; note = 2'-O-methyluridine-3'-phosphorothioate
  modified_base 21: mod_base = OTHER; note = 2'-O-methyladenosine-3'-phosphate
aaagagatacctgacatccta

SEQ ID NO: 1473 - RNA, 21 nt, synthetic construct
  source 1..21: mol_type = other RNA
  modified_base 1: mod_base = OTHER; note = 2'-O-methyladenosine-3'-phosphorothioate
  modified_base 2: mod_base = OTHER; note = 2'-O-methyluridine-3'-phosphorothioate
  modified_base 3: mod_base = OTHER; note = 2'-O-methylguanosine-3'-phosphate
  modified_base 4: mod_base = OTHER; note = 2'-O-methyladenosine-3'-phosphate
  modified_base 5: mod_base = OTHER; note = 2'-O-methylguanosine-3'-phosphate
  modified_base 6: mod_base = OTHER; note 4-amino-1-((2R,3R,4R,5R)-3-(docosyloxy)-4-hydroxy-5-(hydrox ymethyl)tetrahydrofuran-2-yl)pyrimidin-2(1H)-one
  modified_base 7: mod_base = OTHER; note = 2'-fluoroadenosine-3'-phosphate
  modified_base 8: mod_base = OTHER; note = 2'-O-methyluridine-3'-phosphate
  modified_base 9: mod_base = OTHER; note = 2'-fluorouridine-3'-phosphate
  modified_base 10: mod_base = OTHER; note = 2'-fluoroadenosine-3'-phosphate
  modified_base 11: mod_base = OTHER; note = 2'-fluoroadenosine-3'-phosphate
  modified_base 12: mod_base = OTHER; note = 2'-O-methyluridine-3'-phosphate
  modified_base 13: mod_base = OTHER; note = 2'-O-methylguanosine-3'-phosphate
  modified_base 14: mod_base = OTHER; note = 2'-O-methyluridine-3'-phosphate
  modified_base 15: mod_base = OTHER; note = 2'-O-methyluridine-3'-phosphate
  modified_base 16: mod_base = OTHER; note = 2'-O-methyluridine-3'-phosphate
  modified_base 17: mod_base = OTHER; note = 2'-O-methyluridine-3'-phosphate
  modified_base 18: mod_base = OTHER; note = 2'-O-methylcytidine-3'-phosphate
  modified_base 19: mod_base = OTHER; note = 2'-O-methyluridine-3'-phosphorothioate
  modified_base 20: mod_base = OTHER; note = 2'-O-methylguanosine-3'-phosphorothioate
  modified_base 21: mod_base = OTHER; note = 2'-O-methyladenosine-3'-phosphate
atgagcattaatgttttctga

SEQ ID NO: 1474 - RNA, 21 nt, synthetic construct
  source 1..21: mol_type = other RNA
  modified_base 1: mod_base = OTHER; note = 2'-O-methyluridine-3'-phosphorothioate
  modified_base 2: mod_base = OTHER; note = 2'-O-methylguanosine-3'-phosphorothioate
  modified_base 3: mod_base = OTHER; note = 2'-O-methyladenosine-3'-phosphate
  modified_base 4: mod_base = OTHER; note = 2'-O-methylcytidine-3'-phosphate
  modified_base 5: mod_base = OTHER; note = 2'-O-methyladenosine-3'-phosphate
  modified_base 6: mod_base = OTHER; note 1-((2R,3R,4R,5R)-3-(docosyloxy)-4-hydroxy-5-(hydroxymethyl) tetrahydrofuran-2-yl)pyrimidine-2,4(1H,3H)-dione
  modified_base 7: mod_base = OTHER; note = 2'-fluorouridine-3'-phosphate
  modified_base 8: mod_base = OTHER; note = 2'-O-methyluridine-3'-phosphate
  modified_base 9: mod_base = OTHER; note = 2'-fluorouridine-3'-phosphate
  modified_base 10: mod_base = OTHER; note = 2'-fluorouridine-3'-phosphate
  modified_base 11: mod_base = OTHER; note = 2'-fluorouridine-3'-phosphate
  modified_base 12: mod_base = OTHER; note = 2'-O-methylcytidine-3'-phosphate
  modified_base 13: mod_base = OTHER; note = 2'-O-methyluridine-3'-phosphate
  modified_base 14: mod_base = OTHER; note = 2'-O-methylcytidine-3'-phosphate
  modified_base 15: mod_base = OTHER; note = 2'-O-methyladenosine-3'-phosphate
  modified_base 16: mod_base = OTHER; note = 2'-O-methyluridine-3'-phosphate
  modified_base 17: mod_base = OTHER; note = 2'-O-methyladenosine-3'-phosphate
  modified_base 18: mod_base = OTHER; note = 2'-O-methylguanosine-3'-phosphate
  modified_base 19: mod_base = OTHER; note = 2'-O-methyladenosine-3'-phosphorothioate
  modified_base 20: mod_base = OTHER; note = 2'-O-methyladenosine-3'-phosphorothioate
  modified_base 21: mod_base = OTHER; note = 2'-O-methyladenosine-3'-phosphate
tgacattttttctcatagaaa

SEQ ID NO: 1475 - RNA, 21 nt, synthetic construct
  source 1..21: mol_type = other RNA
  modified_base 1: mod_base = OTHER; note = 2'-O-methylcytidine-3'-phosphorothioate
  modified_base 2: mod_base = OTHER; note = 2'-O-methyladenosine-3'-phosphorothioate
  modified_base 3: mod_base = OTHER; note = 2'-O-methylguanosine-3'-phosphate
  modified_base 4: mod_base = OTHER; note = 2'-O-methyladenosine-3'-phosphate
  modified_base 5: mod_base = OTHER; note = 2'-O-methylguanosine-3'-phosphate
  modified_base 6: mod_base = OTHER; note (2R,3S,4S,5R)-5-(6-amino-9H-purin-9-yl)-4-(docosyloxy)-2-(h ydroxymethyl)tetrahydrofuran-3-ol
  modified_base 7: mod_base = OTHER; note = 2'-fluorouridine-3'-phosphate
  modified_base 8: mod_base = OTHER; note = 2'-O-methyluridine-3'-phosphate
  modified_base 9: mod_base = OTHER; note = 2'-fluoroadenosine-3'-phosphate
  modified_base 10: mod_base = OTHER; note = 2'-fluoroadenosine-3'-phosphate
  modified_base 11: mod_base = OTHER; note = 2'-fluoroadenosine-3'-phosphate
  modified_base 12: mod_base = OTHER; note = 2'-O-methyluridine-3'-phosphate
  modified_base 13: mod_base = OTHER; note = 2'-O-methylguanosine-3'-phosphate
  modified_base 14: mod_base = OTHER; note = 2'-O-methyladenosine-3'-phosphate
  modified_base 15: mod_base = OTHER; note = 2'-O-methylcytidine-3'-phosphate
  modified_base 16: mod_base = OTHER; note = 2'-O-methyluridine-3'-phosphate
  modified_base 17: mod_base = OTHER; note = 2'-O-methyladenosine-3'-phosphate
  modified_base 18: mod_base = OTHER; note = 2'-O-methylcytidine-3'-phosphate
  modified_base 19: mod_base = OTHER; note = 2'-O-methyluridine-3'-phosphorothioate
  modified_base 20: mod_base = OTHER; note = 2'-O-methyladenosine-3'-phosphorothioate
  modified_base 21: mod_base = OTHER; note = 2'-O-methyladenosine-3'-phosphate
cagagattaaatgactactaa

SEQ ID NO: 1476 - RNA, 21 nt, synthetic construct
  source 1..21: mol_type = other RNA
  modified_base 1: mod_base = OTHER; note = 2'-O-methylguanosine-3'-phosphorothioate
  modified_base 2: mod_base = OTHER; note = 2'-O-methylcytidine-3'-phosphorothioate
  modified_base 3: mod_base = OTHER; note = 2'-O-methyluridine-3'-phosphate
  modified_base 4: mod_base = OTHER; note = 2'-O-methylguanosine-3'-phosphate
  modified_base 5: mod_base = OTHER; note = 2'-O-methyluridine-3'-phosphate
  modified_base 6: mod_base = OTHER; note 4-amino-1-((2R,3R,4R,5R)-3-(docosyloxy)-4-hydroxy-5-(hydrox ymethyl)tetrahydrofuran-2-yl)pyrimidin-2(1H)-one
  modified_base 7: mod_base = OTHER; note = 2'-fluoroadenosine-3'-phosphate
  modified_base 8: mod_base = OTHER; note = 2'-O-methyladenosine-3'-phosphate
  modified_base 9: mod_base = OTHER; note = 2'-fluoroadenosine-3'-phosphate
  modified_base 10: mod_base = OTHER; note = 2'-fluorouridine-3'-phosphate
  modified_base 11: mod_base = OTHER; note = 2'-fluoroguanosine-3'-phosphate
  modified_base 12: mod_base = OTHER; note = 2'-O-methyluridine-3'-phosphate
  modified_base 13: mod_base = OTHER; note = 2'-O-methyluridine-3'-phosphate
  modified_base 14: mod_base = OTHER; note = 2'-O-methyladenosine-3'-phosphate
  modified_base 15: mod_base = OTHER; note = 2'-O-methyluridine-3'-phosphate
  modified_base 16: mod_base = OTHER; note = 2'-O-methyladenosine-3'-phosphate
  modified_base 17: mod_base = OTHER; note = 2'-O-methyluridine-3'-phosphate
  modified_base 18: mod_base = OTHER; note = 2'-O-methyluridine-3'-phosphate
  modified_base 19: mod_base = OTHER; note = 2'-O-methylguanosine-3'-phosphorothioate
  modified_base 20: mod_base = OTHER; note = 2'-O-methyluridine-3'-phosphorothioate
  modified_base 21: mod_base = OTHER; note = 2'-O-methyladenosine-3'-phosphate
gctgtcaaatgttatattgta

SEQ ID NO: 1477 - RNA, 21 nt, synthetic construct
  source 1..21: mol_type = other RNA
  modified_base 1: mod_base = OTHER; note = 2'-O-methyladenosine-3'-phosphorothioate
  modified_base 2: mod_base = OTHER; note = 2'-O-methyladenosine-3'-phosphorothioate
  modified_base 3: mod_base = OTHER; note = 2'-O-methyluridine-3'-phosphate
  modified_base 4: mod_base = OTHER; note = 2'-O-methyladenosine-3'-phosphate
  modified_base 5: mod_base = OTHER; note = 2'-O-methyluridine-3'-phosphate
  modified_base 6: mod_base = OTHER; note (2R,3S,4S,5R)-5-(6-amino-9H-purin-9-yl)-4-(docosyloxy)-2-(h ydroxymethyl)tetrahydrofuran-3-ol
  modified_base 7: mod_base = OTHER; note = 2'-fluoroadenosine-3'-phosphate
  modified_base 8: mod_base = OTHER; note = 2'-O-methyluridine-3'-phosphate
  modified_base 9: mod_base = OTHER; note = 2'-fluoroadenosine-3'-phosphate
  modified_base 10: mod_base = OTHER; note = 2'-fluorocytidine-3'-phosphate
  modified_base 11: mod_base = OTHER; note = 2'-fluorouridine-3'-phosphate
  modified_base 12: mod_base = OTHER; note = 2'-O-methyladenosine-3'-phosphate
  modified_base 13: mod_base = OTHER; note = 2'-O-methylcytidine-3'-phosphate
  modified_base 14: mod_base = OTHER; note = 2'-O-methyladenosine-3'-phosphate
  modified_base 15: mod_base = OTHER; note = 2'-O-methylguanosine-3'-phosphate
  modified_base 16: mod_base = OTHER; note = 2'-O-methylcytidine-3'-phosphate
  modified_base 17: mod_base = OTHER; note = 2'-O-methyladenosine-3'-phosphate
  modified_base 18: mod_base = OTHER; note = 2'-O-methyladenosine-3'-phosphate
  modified_base 19: mod_base = OTHER; note = 2'-O-methyladenosine-3'-phosphorothioate
  modified_base 20: mod_base = OTHER; note = 2'-O-methyladenosine-3'-phosphorothioate
  modified_base 21: mod_base = OTHER; note = 2'-O-methyladenosine-3'-phosphate
aatataatactacagcaaaaa

SEQ ID NO: 1478 - RNA, 21 nt, synthetic construct
  source 1..21: mol_type = other RNA
  modified_base 1: mod_base = OTHER; note = 2'-O-methylguanosine-3'-phosphorothioate
  modified_base 2: mod_base = OTHER; note = 2'-O-methylguanosine-3'-phosphorothioate
  modified_base 3: mod_base = OTHER; note = 2'-O-methyluridine-3'-phosphate
  modified_base 4: mod_base = OTHER; note = 2'-O-methylguanosine-3'-phosphate
  modified_base 5: mod_base = OTHER; note = 2'-O-methyluridine-3'-phosphate
  modified_base 6: mod_base = OTHER; note 4-amino-1-((2R,3R,4R,5R)-3-(docosyloxy)-4-hydroxy-5-(hydrox ymethyl)tetrahydrofuran-2-yl)pyrimidin-2(1H)-one
  modified_base 7: mod_base = OTHER; note = 2'-fluorouridine-3'-phosphate
  modified_base 8: mod_base = OTHER; note = 2'-O-methyladenosine-3'-phosphate
  modified_base 9: mod_base = OTHER; note = 2'-fluoroadenosine-3'-phosphate
  modified_base 10: mod_base = OTHER; note = 2'-fluoroadenosine-3'-phosphate
  modified_base 11: mod_base = OTHER; note = 2'-fluorouridine-3'-phosphate
  modified_base 12: mod_base = OTHER; note = 2'-O-methyladenosine-3'-phosphate
  modified_base 13: mod_base = OTHER; note = 2'-O-methyluridine-3'-phosphate
  modified_base 14: mod_base = OTHER; note = 2'-O-methyladenosine-3'-phosphate
  modified_base 15: mod_base = OTHER; note = 2'-O-methyladenosine-3'-phosphate
  modified_base 16: mod_base = OTHER; note = 2'-O-methyluridine-3'-phosphate
  modified_base 17: mod_base = OTHER; note = 2'-O-methyluridine-3'-phosphate
  modified_base 18: mod_base = OTHER; note = 2'-O-methyluridine-3'-phosphate
  modified_base 19: mod_base = OTHER; note = 2'-O-methylcytidine-3'-phosphorothioate
  modified_base 20: mod_base = OTHER; note = 2'-O-methyladenosine-3'-phosphorothioate
  modified_base 21: mod_base = OTHER; note = 2'-O-methyladenosine-3'-phosphate
ggtgtctaaatataatttcaa

SEQ ID NO: 1479 - RNA, 21 nt, synthetic construct
  source 1..21: mol_type = other RNA
  modified_base 1: mod_base = OTHER; note = 2'-O-methylcytidine-3'-phosphorothioate
  modified_base 2: mod_base = OTHER; note = 2'-O-methyluridine-3'-phosphorothioate
  modified_base 3: mod_base = OTHER; note = 2'-O-methylcytidine-3'-phosphate
  modified_base 4: mod_base = OTHER; note = 2'-O-methyluridine-3'-phosphate
  modified_base 5: mod_base = OTHER; note = 2'-O-methyluridine-3'-phosphate
  modified_base 6: mod_base = OTHER; note 1-((2R,3R,4R,5R)-3-(docosyloxy)-4-hydroxy-5-(hydroxymethyl) tetrahydrofuran-2-yl)pyrimidine-2,4(1H,3H)-dione
  modified_base 7: mod_base = OTHER; note = 2'-fluoroadenosine-3'-phosphate
  modified_base 8: mod_base = OTHER; note = 2'-O-methyluridine-3'-phosphate
  modified_base 9: mod_base = OTHER; note = 2'-fluoroadenosine-3'-phosphate
  modified_base 10: mod_base = OTHER; note = 2'-fluorocytidine-3'-phosphate
  modified_base 11: mod_base = OTHER; note = 2'-fluoroadenosine-3'-phosphate
  modified_base 12: mod_base = OTHER; note = 2'-O-methyladenosine-3'-phosphate
  modified_base 13: mod_base = OTHER; note = 2'-O-methyladenosine-3'-phosphate
  modified_base 14: mod_base = OTHER; note = 2'-O-methyladenosine-3'-phosphate
  modified_base 15: mod_base = OTHER; note = 2'-O-methyluridine-3'-phosphate
  modified_base 16: mod_base = OTHER; note = 2'-O-methylguanosine-3'-phosphate
  modified_base 17: mod_base = OTHER; note = 2'-O-methyladenosine-3'-phosphate
  modified_base 18: mod_base = OTHER; note = 2'-O-methylguanosine-3'-phosphate
  modified_base 19: mod_base = OTHER; note = 2'-O-methyladenosine-3'-phosphorothioate
  modified_base 20: mod_base = OTHER; note = 2'-O-methylguanosine-3'-phosphorothioate
  modified_base 21: mod_base = OTHER; note = 2'-O-methyladenosine-3'-phosphate
ctctttatacaaaatgagaga

SEQ ID NO: 1480 - RNA, 21 nt, synthetic construct
  source 1..21: mol_type = other RNA
  modified_base 1: mod_base = OTHER; note = 2'-O-methylguanosine-3'-phosphorothioate
  modified_base 2: mod_base = OTHER; note = 2'-O-methylcytidine-3'-phosphorothioate
  modified_base 3: mod_base = OTHER; note = 2'-O-methyladenosine-3'-phosphate
  modified_base 4: mod_base = OTHER; note = 2'-O-methylguanosine-3'-phosphate
  modified_base 5: mod_base = OTHER; note = 2'-O-methyluridine-3'-phosphate
  modified_base 6: mod_base = OTHER; note (2R,3S,4S,5R)-5-(6-amino-9H-purin-9-yl)-4-(docosyloxy)-2-(h ydroxymethyl)tetrahydrofuran-3-ol
  modified_base 7: mod_base = OTHER; note = 2'-fluorocytidine-3'-phosphate
  modified_base 8: mod_base = OTHER; note = 2'-O-methylcytidine-3'-phosphate
  modified_base 9: mod_base = OTHER; note = 2'-fluoroadenosine-3'-phosphate
  modified_base 10: mod_base = OTHER; note = 2'-fluoroadenosine-3'-phosphate
  modified_base 11: mod_base = OTHER; note = 2'-fluoroadenosine-3'-phosphate
  modified_base 12: mod_base = OTHER; note = 2'-O-methyluridine-3'-phosphate
  modified_base 13: mod_base = OTHER; note = 2'-O-methylguanosine-3'-phosphate
  modified_base 14: mod_base = OTHER; note = 2'-O-methyladenosine-3'-phosphate
  modified_base 15: mod_base = OTHER; note = 2'-O-methyladenosine-3'-phosphate
  modified_base 16: mod_base = OTHER; note = 2'-O-methyluridine-3'-phosphate
  modified_base 17: mod_base = OTHER; note = 2'-O-methyladenosine-3'-phosphate
  modified_base 18: mod_base = OTHER; note = 2'-O-methyladenosine-3'-phosphate
  modified_base 19: mod_base = OTHER; note = 2'-O-methyladenosine-3'-phosphorothioate
  modified_base 20: mod_base = OTHER; note = 2'-O-methyladenosine-3'-phosphorothioate
  modified_base 21: mod_base = OTHER; note = 2'-O-methyladenosine-3'-phosphate
gcagtaccaaatgaataaaaa

SEQ ID NO: 1481 - RNA, 21 nt, synthetic construct
  source 1..21: mol_type = other RNA
  modified_base 1: mod_base = OTHER; note = 2'-O-methyluridine-3'-phosphorothioate
  modified_base 2: mod_base = OTHER; note = 2'-O-methyluridine-3'-phosphorothioate
  modified_base 3: mod_base = OTHER; note = 2'-O-methylguanosine-3'-phosphate
  modified_base 4: mod_base = OTHER; note = 2'-O-methyluridine-3'-phosphate
  modified_base 5: mod_base = OTHER; note = 2'-O-methyluridine-3'-phosphate
  modified_base 6: mod_base = OTHER; note 2-amino-9-((2R,3S,4S,5R)-3-(docosyloxy)-4-hydroxy-5-(hydrox ymethyl)tetrahydrofuran-2-yl)-1,9-dihydro-6H-purin-6-one
  modified_base 7: mod_base = OTHER; note = 2'-fluoroguanosine-3'-phosphate
  modified_base 8: mod_base = OTHER; note = 2'-O-methyluridine-3'-phosphate
  modified_base 9: mod_base = OTHER; note = 2'-fluoroadenosine-3'-phosphate
  modified_base 10: mod_base = OTHER; note = 2'-fluorocytidine-3'-phosphate
  modified_base 11: mod_base = OTHER; note = 2'-fluoroadenosine-3'-phosphate
  modified_base 12: mod_base = OTHER; note = 2'-O-methylcytidine-3'-phosphate
  modified_base 13: mod_base = OTHER; note = 2'-O-methyladenosine-3'-phosphate
  modified_base 14: mod_base = OTHER; note = 2'-O-methyladenosine-3'-phosphate
  modified_base 15: mod_base = OTHER; note = 2'-O-methylguanosine-3'-phosphate
  modified_base 16: mod_base = OTHER; note = 2'-O-methylguanosine-3'-phosphate
  modified_base 17: mod_base = OTHER; note = 2'-O-methyluridine-3'-phosphate
  modified_base 18: mod_base = OTHER; note = 2'-O-methyladenosine-3'-phosphate
  modified_base 19: mod_base = OTHER; note = 2'-O-methyladenosine-3'-phosphorothioate
  modified_base 20: mod_base = OTHER; note = 2'-O-methyladenosine-3'-phosphorothioate
  modified_base 21: mod_base = OTHER; note = 2'-O-methyladenosine-3'-phosphate
ttgttggtacacaaggtaaaa

SEQ ID NO: 1482 - RNA, 21 nt, synthetic construct
  source 1..21: mol_type = other RNA
  modified_base 1: mod_base = OTHER; note = 2'-O-methylcytidine-3'-phosphorothioate
  modified_base 2: mod_base = OTHER; note = 2'-O-methyluridine-3'-phosphorothioate
  modified_base 3: mod_base = OTHER; note = 2'-O-methylcytidine-3'-phosphate
  modified_base 4: mod_base = OTHER; note = 2'-O-methyluridine-3'-phosphate
  modified_base 5: mod_base = OTHER; note = 2'-O-methyluridine-3'-phosphate
  modified_base 6: mod_base = OTHER; note (2R,3S,4S,5R)-5-(6-amino-9H-purin-9-yl)-4-(docosyloxy)-2-(h ydroxymethyl)tetrahydrofuran-3-ol
  modified_base 7: mod_base = OTHER; note = 2'-fluorouridine-3'-phosphate
  modified_base 8: mod_base = OTHER; note = 2'-O-methyluridine-3'-phosphate
  modified_base 9: mod_base = OTHER; note = 2'-fluorouridine-3'-phosphate
  modified_base 10: mod_base = OTHER; note = 2'-fluoroadenosine-3'-phosphate
  modified_base 11: mod_base = OTHER; note = 2'-fluoroadenosine-3'-phosphate
  modified_base 12: mod_base = OTHER; note = 2'-O-methylcytidine-3'-phosphate
  modified_base 13: mod_base = OTHER; note = 2'-O-methyluridine-3'-phosphate
  modified_base 14: mod_base = OTHER; note = 2'-O-methyluridine-3'-phosphate
  modified_base 15: mod_base = OTHER; note = 2'-O-methyladenosine-3'-phosphate
  modified_base 16: mod_base = OTHER; note = 2'-O-methyladenosine-3'-phosphate
  modified_base 17: mod_base = OTHER; note = 2'-O-methylcytidine-3'-phosphate
  modified_base 18: mod_base = OTHER; note = 2'-O-methylcytidine-3'-phosphate
  modified_base 19: mod_base = OTHER; note = 2'-O-methylguanosine-3'-phosphorothioate
  modified_base 20: mod_base = OTHER; note = 2'-O-methyluridine-3'-phosphorothioate
  modified_base 21: mod_base = OTHER; note = 2'-O-methyladenosine-3'-phosphate
ctcttatttaacttaaccgta

SEQ ID NO: 1483 - RNA, 21 nt, synthetic construct
  source 1..21: mol_type = other RNA
  modified_base 1: mod_base = OTHER; note = 2'-O-methyluridine-3'-phosphorothioate
  modified_base 2: mod_base = OTHER; note = 2'-O-methylguanosine-3'-phosphorothioate
  modified_base 3: mod_base = OTHER; note = 2'-O-methylcytidine-3'-phosphate
  modified_base 4: mod_base = OTHER; note = 2'-O-methyluridine-3'-phosphate
  modified_base 5: mod_base = OTHER; note = 2'-O-methyluridine-3'-phosphate
  modified_base 6: mod_base = OTHER; note 2-amino-9-((2R,3S,4S,5R)-3-(docosyloxy)-4-hydroxy-5-(hydrox ymethyl)tetrahydrofuran-2-yl)-1,9-dihydro-6H-purin-6-one
  modified_base 7: mod_base = OTHER; note = 2'-fluoroadenosine-3'-phosphate
  modified_base 8: mod_base = OTHER; note = 2'-O-methyluridine-3'-phosphate
  modified_base 9: mod_base = OTHER; note = 2'-fluoroguanosine-3'-phosphate
  modified_base 10: mod_base = OTHER; note = 2'-fluoroadenosine-3'-phosphate
  modified_base 11: mod_base = OTHER; note = 2'-fluorouridine-3'-phosphate
  modified_base 12: mod_base = OTHER; note = 2'-O-methyladenosine-3'-phosphate
  modified_base 13: mod_base = OTHER; note = 2'-O-methylcytidine-3'-phosphate
  modified_base 14: mod_base = OTHER; note = 2'-O-methyladenosine-3'-phosphate
  modified_base 15: mod_base = OTHER; note = 2'-O-methyladenosine-3'-phosphate
  modified_base 16: mod_base = OTHER; note = 2'-O-methyluridine-3'-phosphate
  modified_base 17: mod_base = OTHER; note = 2'-O-methylguanosine-3'-phosphate
  modified_base 18: mod_base = OTHER; note = 2'-O-methyladenosine-3'-phosphate
  modified_base 19: mod_base = OTHER; note = 2'-O-methyladenosine-3'-phosphorothioate
  modified_base 20: mod_base = OTHER; note = 2'-O-methyluridine-3'-phosphorothioate
  modified_base 21: mod_base = OTHER; note = 2'-O-methyladenosine-3'-phosphate
tgcttgatgatacaatgaata

SEQ ID NO: 1484 - RNA, 21 nt, synthetic construct
  source 1..21: mol_type = other RNA
  modified_base 1: mod_base = OTHER; note = 2'-O-methyladenosine-3'-phosphorothioate
  modified_base 2: mod_base = OTHER; note = 2'-O-methyladenosine-3'-phosphorothioate
  modified_base 3: mod_base = OTHER; note = 2'-O-methylcytidine-3'-phosphate
  modified_base 4: mod_base = OTHER; note = 2'-O-methyluridine-3'-phosphate
  modified_base 5: mod_base = OTHER; note = 2'-O-methylguanosine-3'-phosphate
  modified_base 6: mod_base = OTHER; note 2-amino-9-((2R,3S,4S,5R)-3-(docosyloxy)-4-hydroxy-5-(hydrox ymethyl)tetrahydrofuran-2-yl)-1,9-dihydro-6H-purin-6-one
  modified_base 7: mod_base = OTHER; note = 2'-fluoroguanosine-3'-phosphate
  modified_base 8: mod_base = OTHER; note = 2'-O-methyladenosine-3'-phosphate
  modified_base 9: mod_base = OTHER; note = 2'-fluoroadenosine-3'-phosphate
  modified_base 10: mod_base = OTHER; note = 2'-fluoroadenosine-3'-phosphate
  modified_base 11: mod_base = OTHER; note = 2'-fluoroguanosine-3'-phosphate
  modified_base 12: mod_base = OTHER; note = 2'-O-methyladenosine-3'-phosphate
  modified_base 13: mod_base = OTHER; note = 2'-O-methylcytidine-3'-phosphate
  modified_base 14: mod_base = OTHER; note = 2'-O-methyladenosine-3'-phosphate
  modified_base 15: mod_base = OTHER; note = 2'-O-methyladenosine-3'-phosphate
  modified_base 16: mod_base = OTHER; note = 2'-O-methyluridine-3'-phosphate
  modified_base 17: mod_base = OTHER; note = 2'-O-methyluridine-3'-phosphate
  modified_base 18: mod_base = OTHER; note = 2'-O-methyluridine-3'-phosphate
  modified_base 19: mod_base = OTHER; note = 2'-O-methylguanosine-3'-phosphorothioate
  modified_base 20: mod_base = OTHER; note = 2'-O-methyladenosine-3'-phosphorothioate
  modified_base 21: mod_base = OTHER; note = 2'-O-methyladenosine-3'-phosphate
aactgggaaagacaatttgaa

SEQ ID NO: 1485 - RNA, 21 nt, synthetic construct
  source 1..21: mol_type = other RNA
  modified_base 1: mod_base = OTHER; note = 2'-O-methylcytidine-3'-phosphorothioate
  modified_base 2: mod_base = OTHER; note = 2'-O-methyluridine-3'-phosphorothioate
  modified_base 3: mod_base = OTHER; note = 2'-O-methylcytidine-3'-phosphate
  modified_base 4: mod_base = OTHER; note = 2'-O-methylcytidine-3'-phosphate
  modified_base 5: mod_base = OTHER; note = 2'-O-methyluridine-3'-phosphate
  modified_base 6: mod_base = OTHER; note 1-((2R,3R,4R,5R)-3-(docosyloxy)-4-hydroxy-5-(hydroxymethyl) tetrahydrofuran-2-yl)pyrimidine-2,4(1H,3H)-dione
  modified_base 7: mod_base = OTHER; note = 2'-fluoroadenosine-3'-phosphate
  modified_base 8: mod_base = OTHER; note = 2'-O-methyluridine-3'-phosphate
  modified_base 9: mod_base = OTHER; note = 2'-fluoroadenosine-3'-phosphate
  modified_base 10: mod_base = OTHER; note = 2'-fluorouridine-3'-phosphate
  modified_base 11: mod_base = OTHER; note = 2'-fluoroguanosine-3'-phosphate
  modified_base 12: mod_base = OTHER; note = 2'-O-methyladenosine-3'-phosphate
  modified_base 13: mod_base = OTHER; note = 2'-O-methylcytidine-3'-phosphate
  modified_base 14: mod_base = OTHER; note = 2'-O-methyluridine-3'-phosphate
  modified_base 15: mod_base = OTHER; note = 2'-O-methyladenosine-3'-phosphate
  modified_base 16: mod_base = OTHER; note = 2'-O-methyluridine-3'-phosphate
  modified_base 17: mod_base = OTHER; note = 2'-O-methyluridine-3'-phosphate
  modified_base 18: mod_base = OTHER; note = 2'-O-methyluridine-3'-phosphate
  modified_base 19: mod_base = OTHER; note = 2'-O-methylguanosine-3'-phosphorothioate
  modified_base 20: mod_base = OTHER; note = 2'-O-methyladenosine-3'-phosphorothioate
  modified_base 21: mod_base = OTHER; note = 2'-O-methyladenosine-3'-phosphate
ctccttatatgactatttgaa

SEQ ID NO: 1486 - RNA, 21 nt, synthetic construct
  source 1..21: mol_type = other RNA
  modified_base 1: mod_base = OTHER; note = 2'-O-methyladenosine-3'-phosphorothioate
  modified_base 2: mod_base = OTHER; note = 2'-O-methylguanosine-3'-phosphorothioate
  modified_base 3: mod_base = OTHER; note = 2'-O-methyluridine-3'-phosphate
  modified_base 4: mod_base = OTHER; note = 2'-O-methylcytidine-3'-phosphate
  modified_base 5: mod_base = OTHER; note = 2'-O-methyladenosine-3'-phosphate
  modified_base 6: mod_base = OTHER; note 1-((2R,3R,4R,5R)-3-(docosyloxy)-4-hydroxy-5-(hydroxymethyl) tetrahydrofuran-2-yl)pyrimidine-2,4(1H,3H)-dione
  modified_base 7: mod_base = OTHER; note = 2'-fluoroguanosine-3'-phosphate
  modified_base 8: mod_base = OTHER; note = 2'-O-methylcytidine-3'-phosphate
  modified_base 9: mod_base = OTHER; note = 2'-fluorouridine-3'-phosphate
  modified_base 10: mod_base = OTHER; note = 2'-fluoroadenosine-3'-phosphate
  modified_base 11: mod_base = OTHER; note = 2'-fluoroadenosine-3'-phosphate
  modified_base 12: mod_base = OTHER; note = 2'-O-methylcytidine-3'-phosphate
  modified_base 13: mod_base = OTHER; note = 2'-O-methylcytidine-3'-phosphate
  modified_base 14: mod_base = OTHER; note = 2'-O-methyladenosine-3'-phosphate
  modified_base 15: mod_base = OTHER; note = 2'-O-methyladenosine-3'-phosphate
  modified_base 16: mod_base = OTHER; note = 2'-O-methyluridine-3'-phosphate
  modified_base 17: mod_base = OTHER; note = 2'-O-methylguanosine-3'-phosphate
  modified_base 18: mod_base = OTHER; note = 2'-O-methylguanosine-3'-phosphate
  modified_base 19: mod_base = OTHER; note = 2'-O-methyladenosine-3'-phosphorothioate
  modified_base 20: mod_base = OTHER; note = 2'-O-methyladenosine-3'-phosphorothioate
  modified_base 21: mod_base = OTHER; note = 2'-O-methyladenosine-3'-phosphate
agtcatgctaaccaatggaaa

SEQ ID NO: 1487 - RNA, 21 nt, synthetic construct
  source 1..21: mol_type = other RNA
  modified_base 1: mod_base = OTHER; note = 2'-O-methylcytidine-3'-phosphorothioate
  modified_base 2: mod_base = OTHER; note = 2'-O-methylcytidine-3'-phosphorothioate
  modified_base 3: mod_base = OTHER; note = 2'-O-methyluridine-3'-phosphate
  modified_base 4: mod_base = OTHER; note = 2'-O-methylguanosine-3'-phosphate
  modified_base 5: mod_base = OTHER; note = 2'-O-methyladenosine-3'-phosphate
  modified_base 6: mod_base = OTHER; note (2R,3S,4S,5R)-5-(6-amino-9H-purin-9-yl)-4-(docosyloxy)-2-(h ydroxymethyl)tetrahydrofuran-3-ol
  modified_base 7: mod_base = OTHER; note = 2'-fluoroguanosine-3'-phosphate
  modified_base 8: mod_base = OTHER; note = 2'-O-methyluridine-3'-phosphate
  modified_base 9: mod_base = OTHER; note = 2'-fluorocytidine-3'-phosphate
  modified_base 10: mod_base = OTHER; note = 2'-fluoroadenosine-3'-phosphate
  modified_base 11: mod_base = OTHER; note = 2'-fluorocytidine-3'-phosphate
  modified_base 12: mod_base = OTHER; note = 2'-O-methyladenosine-3'-phosphate
  modified_base 13: mod_base = OTHER; note = 2'-O-methylcytidine-3'-phosphate
  modified_base 14: mod_base = OTHER; note = 2'-O-methyladenosine-3'-phosphate
  modified_base 15: mod_base = OTHER; note = 2'-O-methylguanosine-3'-phosphate
  modified_base 16: mod_base = OTHER; note = 2'-O-methylcytidine-3'-phosphate
  modified_base 17: mod_base = OTHER; note = 2'-O-methyluridine-3'-phosphate
  modified_base 18: mod_base = OTHER; note = 2'-O-methyladenosine-3'-phosphate
  modified_base 19: mod_base = OTHER; note = 2'-O-methyladenosine-3'-phosphorothioate
  modified_base 20: mod_base = OTHER; note = 2'-O-methyluridine-3'-phosphorothioate
  modified_base 21: mod_base = OTHER; note = 2'-O-methyladenosine-3'-phosphate
cctgaagtcacacagctaata

SEQ ID NO: 1488 - RNA, 21 nt, synthetic construct
  source 1..21: mol_type = other RNA
  modified_base 1: mod_base = OTHER; note = 2'-O-methyluridine-3'-phosphorothioate
  modified_base 2: mod_base = OTHER; note = 2'-O-methyluridine-3'-phosphorothioate
  modified_base 3: mod_base = OTHER; note = 2'-O-methylguanosine-3'-phosphate
  modified_base 4: mod_base = OTHER; note = 2'-O-methylcytidine-3'-phosphate
  modified_base 5: mod_base = OTHER; note = 2'-O-methyluridine-3'-phosphate
  modified_base 6: mod_base = OTHER; note 2-amino-9-((2R,3S,4S,5R)-3-(docosyloxy)-4-hydroxy-5-(hydrox ymethyl)tetrahydrofuran-2-yl)-1,9-dihydro-6H-purin-6-one
  modified_base 7: mod_base = OTHER; note = 2'-fluorocytidine-3'-phosphate
  modified_base 8: mod_base = OTHER; note = 2'-O-methyluridine-3'-phosphate
  modified_base 9: mod_base = OTHER; note = 2'-fluoroguanosine-3'-phosphate
  modified_base 10: mod_base = OTHER; note = 2'-fluoroadenosine-3'-phosphate
  modified_base 11: mod_base = OTHER; note = 2'-fluorocytidine-3'-phosphate
  modified_base 12: mod_base = OTHER; note = 2'-O-methyladenosine-3'-phosphate
  modified_base 13: mod_base = OTHER; note = 2'-O-methyladenosine-3'-phosphate
  modified_base 14: mod_base = OTHER; note = 2'-O-methylcytidine-3'-phosphate
  modified_base 15: mod_base = OTHER; note = 2'-O-methyladenosine-3'-phosphate
  modified_base 16: mod_base = OTHER; note = 2'-O-methyladenosine-3'-phosphate
  modified_base 17: mod_base = OTHER; note = 2'-O-methyladenosine-3'-phosphate
  modified_base 18: mod_base = OTHER; note = 2'-O-methylguanosine-3'-phosphate
  modified_base 19: mod_base = OTHER; note = 2'-O-methyladenosine-3'-phosphorothioate
  modified_base 20: mod_base = OTHER; note = 2'-O-methyluridine-3'-phosphorothioate
  modified_base 21: mod_base = OTHER; note = 2'-O-methyladenosine-3'-phosphate
ttgctgctgacaacaaagata

SEQ ID NO: 1489 - RNA, 21 nt, synthetic construct
  source 1..21: mol_type = other RNA
  modified_base 1: mod_base = OTHER; note = 2'-O-methyluridine-3'-phosphorothioate
  modified_base 2: mod_base = OTHER; note = 2'-O-methyladenosine-3'-phosphorothioate
  modified_base 3: mod_base = OTHER; note = 2'-O-methylcytidine-3'-phosphate
  modified_base 4: mod_base = OTHER; note = 2'-O-methyluridine-3'-phosphate
  modified_base 5: mod_base = OTHER; note = 2'-O-methylguanosine-3'-phosphate
  modified_base 6: mod_base = OTHER; note (2R,3S,4S,5R)-5-(6-amino-9H-purin-9-yl)-4-(docosyloxy)-2-(h ydroxymethyl)tetrahydrofuran-3-ol
  modified_base 7: mod_base = OTHER; note = 2'-fluorocytidine-3'-phosphate
  modified_base 8: mod_base = OTHER; note = 2'-O-methyluridine-3'-phosphate
  modified_base 9: mod_base = OTHER; note = 2'-fluorouridine-3'-phosphate
  modified_base 10: mod_base = OTHER; note = 2'-fluorouridine-3'-phosphate
  modified_base 11: mod_base = OTHER; note = 2'-fluoroguanosine-3'-phosphate
  modified_base 12: mod_base = OTHER; note = 2'-O-methylcytidine-3'-phosphate
  modified_base 13: mod_base = OTHER; note = 2'-O-methylcytidine-3'-phosphate
  modified_base 14: mod_base = OTHER; note = 2'-O-methyluridine-3'-phosphate
  modified_base 15: mod_base = OTHER; note = 2'-O-methylguanosine-3'-phosphate
  modified_base 16: mod_base = OTHER; note = 2'-O-methyluridine-3'-phosphate
  modified_base 17: mod_base = OTHER; note = 2'-O-methyladenosine-3'-phosphate
  modified_base 18: mod_base = OTHER; note = 2'-O-methyladenosine-3'-phosphate
  modified_base 19: mod_base = OTHER; note = 2'-O-methyladenosine-3'-phosphorothioate
  modified_base 20: mod_base = OTHER; note = 2'-O-methylguanosine-3'-phosphorothioate
  modified_base 21: mod_base = OTHER; note = 2'-O-methyladenosine-3'-phosphate
tactgactttgcctgtaaaga

SEQ ID NO: 1490 - RNA, 21 nt, synthetic construct
  source 1..21: mol_type = other RNA
  modified_base 1: mod_base = OTHER; note = 2'-O-methyladenosine-3'-phosphorothioate
  modified_base 2: mod_base = OTHER; note = 2'-O-methyladenosine-3'-phosphorothioate
  modified_base 3: mod_base = OTHER; note = 2'-O-methyluridine-3'-phosphate
  modified_base 4: mod_base = OTHER; note = 2'-O-methylcytidine-3'-phosphate
  modified_base 5: mod_base = OTHER; note = 2'-O-methylcytidine-3'-phosphate
  modified_base 6: mod_base = OTHER; note 4-amino-1-((2R,3R,4R,5R)-3-(docosyloxy)-4-hydroxy-5-(hydrox ymethyl)tetrahydrofuran-2-yl)pyrimidin-2(1H)-one
  modified_base 7: mod_base = OTHER; note = 2'-fluorouridine-3'-phosphate
  modified_base 8: mod_base = OTHER; note = 2'-O-methyladenosine-3'-phosphate
  modified_base 9: mod_base = OTHER; note = 2'-fluorouridine-3'-phosphate
  modified_base 10: mod_base = OTHER; note = 2'-fluorouridine-3'-phosphate
  modified_base 11: mod_base = OTHER; note = 2'-fluorouridine-3'-phosphate
  modified_base 12: mod_base = OTHER; note = 2'-O-methyluridine-3'-phosphate
  modified_base 13: mod_base = OTHER; note = 2'-O-methyladenosine-3'-phosphate
  modified_base 14: mod_base = OTHER; note = 2'-O-methyladenosine-3'-phosphate
  modified_base 15: mod_base = OTHER; note = 2'-O-methyladenosine-3'-phosphate
  modified_base 16: mod_base = OTHER; note = 2'-O-methyladenosine-3'-phosphate
  modified_base 17: mod_base = OTHER; note = 2'-O-methyluridine-3'-phosphate
  modified_base 18: mod_base = OTHER; note = 2'-O-methyluridine-3'-phosphate
  modified_base 19: mod_base = OTHER; note = 2'-O-methylcytidine-3'-phosphorothioate
  modified_base 20: mod_base = OTHER; note = 2'-O-methylcytidine-3'-phosphorothioate
  modified_base 21: mod_base = OTHER; note = 2'-O-methyladenosine-3'-phosphate
aatccctattttaaaattcca

SEQ ID NO: 1491 - RNA, 21 nt, synthetic construct
  source 1..21: mol_type = other RNA
  modified_base 1: mod_base = OTHER; note = 2'-O-methylguanosine-3'-phosphorothioate
  modified_base 2: mod_base = OTHER; note = 2'-O-methyluridine-3'-phosphorothioate
  modified_base 3: mod_base = OTHER; note = 2'-O-methylguanosine-3'-phosphate
  modified_base 4: mod_base = OTHER; note = 2'-O-methylcytidine-3'-phosphate
  modified_base 5: mod_base = OTHER; note = 2'-O-methylcytidine-3'-phosphate
  modified_base 6: mod_base = OTHER; note 1-((2R,3R,4R,5R)-3-(docosyloxy)-4-hydroxy-5-(hydroxymethyl) tetrahydrofuran-2-yl)pyrimidine-2,4(1H,3H)-dione
  modified_base 7: mod_base = OTHER; note = 2'-fluorouridine-3'-phosphate
  modified_base 8: mod_base = OTHER; note = 2'-O-methyladenosine-3'-phosphate
  modified_base 9: mod_base = OTHER; note = 2'-fluoroguanosine-3'-phosphate
  modified_base 10: mod_base = OTHER; note = 2'-fluoroguanosine-3'-phosphate
  modified_base 11: mod_base = OTHER; note = 2'-fluoroadenosine-3'-phosphate
  modified_base 12: mod_base = OTHER; note = 2'-O-methylguanosine-3'-phosphate
  modified_base 13: mod_base = OTHER; note = 2'-O-methyladenosine-3'-phosphate
  modified_base 14: mod_base = OTHER; note = 2'-O-methyluridine-3'-phosphate
  modified_base 15: mod_base = OTHER; note = 2'-O-methyluridine-3'-phosphate
  modified_base 16: mod_base = OTHER; note = 2'-O-methyladenosine-3'-phosphate
  modified_base 17: mod_base = OTHER; note = 2'-O-methylcytidine-3'-phosphate
  modified_base 18: mod_base = OTHER; note = 2'-O-methylcytidine-3'-phosphate
  modified_base 19: mod_base = OTHER; note = 2'-O-methylcytidine-3'-phosphorothioate
  modified_base 20: mod_base = OTHER; note = 2'-O-methyluridine-3'-phosphorothioate
  modified_base 21: mod_base = OTHER; note = 2'-O-methyladenosine-3'-phosphate
gtgccttaggagattacccta

SEQ ID NO: 1492 - RNA, 21 nt, synthetic construct
  source 1..21: mol_type = other RNA
  modified_base 1: mod_base = OTHER; note = 2'-O-methylguanosine-3'-phosphorothioate
  modified_base 2: mod_base = OTHER; note = 2'-O-methyladenosine-3'-phosphorothioate
  modified_base 3: mod_base = OTHER; note = 2'-O-methylcytidine-3'-phosphate
  modified_base 4: mod_base = OTHER; note = 2'-O-methyladenosine-3'-phosphate
  modified_base 5: mod_base = OTHER; note = 2'-O-methyladenosine-3'-phosphate
  modified_base 6: mod_base = OTHER; note 1-((2R,3R,4R,5R)-3-(docosyloxy)-4-hydroxy-5-(hydroxymethyl) tetrahydrofuran-2-yl)pyrimidine-2,4(1H,3H)-dione
  modified_base 7: mod_base = OTHER; note = 2'-fluorocytidine-3'-phosphate
  modified_base 8: mod_base = OTHER; note = 2'-O-methyluridine-3'-phosphate
  modified_base 9: mod_base = OTHER; note = 2'-fluoroadenosine-3'-phosphate
  modified_base 10: mod_base = OTHER; note = 2'-fluoroadenosine-3'-phosphate
  modified_base 11: mod_base = OTHER; note = 2'-fluoroadenosine-3'-phosphate
  modified_base 12: mod_base = OTHER; note = 2'-O-methyluridine-3'-phosphate
  modified_base 13: mod_base = OTHER; note = 2'-O-methyladenosine-3'-phosphate
  modified_base 14: mod_base = OTHER; note = 2'-O-methyluridine-3'-phosphate
  modified_base 15: mod_base = OTHER; note = 2'-O-methyladenosine-3'-phosphate
  modified_base 16: mod_base = OTHER; note = 2'-O-methyluridine-3'-phosphate
  modified_base 17: mod_base = OTHER; note = 2'-O-methylcytidine-3'-phosphate
  modified_base 18: mod_base = OTHER; note = 2'-O-methyladenosine-3'-phosphate
  modified_base 19: mod_base = OTHER; note = 2'-O-methyluridine-3'-phosphorothioate
  modified_base 20: mod_base = OTHER; note = 2'-O-methylcytidine-3'-phosphorothioate
  modified_base 21: mod_base = OTHER; note = 2'-O-methyladenosine-3'-phosphate
gacaatctaaatatatcatca

SEQ ID NO: 1493 - RNA, 21 nt, synthetic construct
  source 1..21: mol_type = other RNA
  modified_base 1: mod_base = OTHER; note = 2'-O-methyluridine-3'-phosphorothioate
  modified_base 2: mod_base = OTHER; note = 2'-O-methylguanosine-3'-phosphorothioate
  modified_base 3: mod_base = OTHER; note = 2'-O-methyluridine-3'-phosphate
  modified_base 4: mod_base = OTHER; note = 2'-O-methylguanosine-3'-phosphate
  modified_base 5: mod_base = OTHER; note = 2'-O-methyladenosine-3'-phosphate
  modified_base 6: mod_base = OTHER; note 1-((2R,3R,4R,5R)-3-(docosyloxy)-4-hydroxy-5-(hydroxymethyl) tetrahydrofuran-2-yl)pyrimidine-2,4(1H,3H)-dione
  modified_base 7: mod_base = OTHER; note = 2'-fluoroadenosine-3'-phosphate
  modified_base 8: mod_base = OTHER; note = 2'-O-methyladenosine-3'-phosphate
  modified_base 9: mod_base = OTHER; note = 2'-fluorouridine-3'-phosphate
  modified_base 10: mod_base = OTHER; note = 2'-fluoroguanosine-3'-phosphate
  modified_base 11: mod_base = OTHER; note = 2'-fluoroadenosine-3'-phosphate
  modified_base 12: mod_base = OTHER; note = 2'-O-methyladenosine-3'-phosphate
  modified_base 13: mod_base = OTHER; note = 2'-O-methylcytidine-3'-phosphate
  modified_base 14: mod_base = OTHER; note = 2'-O-methyladenosine-3'-phosphate
  modified_base 15: mod_base = OTHER; note = 2'-O-methylcytidine-3'-phosphate
  modified_base 16: mod_base = OTHER; note = 2'-O-methylcytidine-3'-phosphate
  modified_base 17: mod_base = OTHER; note = 2'-O-methylguanosine-3'-phosphate
  modified_base 18: mod_base = OTHER; note = 2'-O-methyluridine-3'-phosphate
  modified_base 19: mod_base = OTHER; note = 2'-O-methyladenosine-3'-phosphorothioate
  modified_base 20: mod_base = OTHER; note = 2'-O-methyladenosine-3'-phosphorothioate
  modified_base 21: mod_base = OTHER; note = 2'-O-methyladenosine-3'-phosphate
tgtgataatgaacaccgtaaa

SEQ ID NO: 1494 - RNA, 21 nt, synthetic construct
  source 1..21: mol_type = other RNA
  modified_base 1: mod_base = OTHER; note = 2'-O-methyluridine-3'-phosphorothioate
  modified_base 2: mod_base = OTHER; note = 2'-O-methylcytidine-3'-phosphorothioate
  modified_base 3: mod_base = OTHER; note = 2'-O-methyladenosine-3'-phosphate
  modified_base 4: mod_base = OTHER; note = 2'-O-methylcytidine-3'-phosphate
  modified_base 5: mod_base = OTHER; note = 2'-O-methylcytidine-3'-phosphate
  modified_base 6: mod_base = OTHER; note 2-amino-9-((2R,3S,4S,5R)-3-(docosyloxy)-4-hydroxy-5-(hydrox ymethyl)tetrahydrofuran-2-yl)-1,9-dihydro-6H-purin-6-one
  modified_base 7: mod_base = OTHER; note = 2'-fluorouridine-3'-phosphate
  modified_base 8: mod_base = OTHER; note = 2'-O-methyluridine-3'-phosphate
  modified_base 9: mod_base = OTHER; note = 2'-fluoroguanosine-3'-phosphate
  modified_base 10: mod_base = OTHER; note = 2'-fluorouridine-3'-phosphate
  modified_base 11: mod_base = OTHER; note = 2'-fluoroadenosine-3'-phosphate
  modified_base 12: mod_base = OTHER; note = 2'-O-methyladenosine-3'-phosphate
  modified_base 13: mod_base = OTHER; note = 2'-O-methyladenosine-3'-phosphate
  modified_base 14: mod_base = OTHER; note = 2'-O-methylguanosine-3'-phosphate
  modified_base 15: mod_base = OTHER; note = 2'-O-methyladenosine-3'-phosphate
  modified_base 16: mod_base = OTHER; note = 2'-O-methylcytidine-3'-phosphate
  modified_base 17: mod_base = OTHER; note = 2'-O-methyluridine-3'-phosphate
  modified_base 18: mod_base = OTHER; note = 2'-O-methyluridine-3'-phosphate
  modified_base 19: mod_base = OTHER; note = 2'-O-methyluridine-3'-phosphorothioate
  modified_base 20: mod_base = OTHER; note = 2'-O-methyluridine-3'-phosphorothioate
  modified_base 21: mod_base = OTHER; note = 2'-O-methyladenosine-3'-phosphate
tcaccgttgtaaagactttta

SEQ ID NO: 1495 - RNA, 21 nt, synthetic construct
  source 1..21: mol_type = other RNA
  modified_base 1: mod_base = OTHER; note = 2'-O-methyluridine-3'-phosphorothioate
  modified_base 2: mod_base = OTHER; note = 2'-O-methyluridine-3'-phosphorothioate
  modified_base 3: mod_base = OTHER; note = 2'-O-methyladenosine-3'-phosphate
  modified_base 4: mod_base = OTHER; note = 2'-O-methylguanosine-3'-phosphate
  modified_base 5: mod_base = OTHER; note = 2'-O-methyladenosine-3'-phosphate
  modified_base 6: mod_base = OTHER; note 2-amino-9-((2R,3S,4S,5R)-3-(docosyloxy)-4-hydroxy-5-(hydrox ymethyl)tetrahydrofuran-2-yl)-1,9-dihydro-6H-purin-6-one
  modified_base 7: mod_base = OTHER; note = 2'-fluoroadenosine-3'-phosphate
  modified_base 8: mod_base = OTHER; note = 2'-O-methyladenosine-3'-phosphate
  modified_base 9: mod_base = OTHER; note = 2'-fluoroguanosine-3'-phosphate
  modified_base 10: mod_base = OTHER; note = 2'-fluorocytidine-3'-phosphate
  modified_base 11: mod_base = OTHER; note = 2'-fluorouridine-3'-phosphate
  modified_base 12: mod_base = OTHER; note = 2'-O-methyluridine-3'-phosphate
  modified_base 13: mod_base = OTHER; note = 2'-O-methylcytidine-3'-phosphate
  modified_base 14: mod_base = OTHER; note = 2'-O-methylcytidine-3'-phosphate
  modified_base 15: mod_base = OTHER; note = 2'-O-methyluridine-3'-phosphate
  modified_base 16: mod_base = OTHER; note = 2'-O-methylguanosine-3'-phosphate
  modified_base 17: mod_base = OTHER; note = 2'-O-methyladenosine-3'-phosphate
  modified_base 18: mod_base = OTHER; note = 2'-O-methylcytidine-3'-phosphate
  modified_base 19: mod_base = OTHER; note = 2'-O-methyladenosine-3'-phosphorothioate
  modified_base 20: mod_base = OTHER; note = 2'-O-methyluridine-3'-phosphorothioate
  modified_base 21: mod_base = OTHER; note = 2'-O-methyladenosine-3'-phosphate
ttagagaagcttcctgacata

SEQ ID NO: 1496 - RNA, 21 nt, synthetic construct
  source 1..21: mol_type = other RNA
  modified_base 1: mod_base = OTHER; note = 2'-O-methyladenosine-3'-phosphorothioate
  modified_base 2: mod_base = OTHER; note = 2'-O-methyladenosine-3'-phosphorothioate
  modified_base 3: mod_base = OTHER; note = 2'-O-methylcytidine-3'-phosphate
  modified_base 4: mod_base = OTHER; note = 2'-O-methyladenosine-3'-phosphate
  modified_base 5: mod_base = OTHER; note = 2'-O-methylguanosine-3'-phosphate
  modified_base 6: mod_base = OTHER; note 1-((2R,3R,4R,5R)-3-(docosyloxy)-4-hydroxy-5-(hydroxymethyl) tetrahydrofuran-2-yl)pyrimidine-2,4(1H,3H)-dione
  modified_base 7: mod_base = OTHER; note = 2'-fluoroadenosine-3'-phosphate
  modified_base 8: mod_base = OTHER; note = 2'-O-methyladenosine-3'-phosphate
  modified_base 9: mod_base = OTHER; note = 2'-fluoroadenosine-3'-phosphate
  modified_base 10: mod_base = OTHER; note = 2'-fluoroguanosine-3'-phosphate
  modified_base 11: mod_base = OTHER; note = 2'-fluoroadenosine-3'-phosphate
  modified_base 12: mod_base = OTHER; note = 2'-O-methyladenosine-3'-phosphate
  modified_base 13: mod_base = OTHER; note = 2'-O-methyladenosine-3'-phosphate
  modified_base 14: mod_base = OTHER; note = 2'-O-methyluridine-3'-phosphate
  modified_base 15: mod_base = OTHER; note = 2'-O-methylguanosine-3'-phosphate
  modified_base 16: mod_base = OTHER; note = 2'-O-methylcytidine-3'-phosphate
  modified_base 17: mod_base = OTHER; note = 2'-O-methyluridine-3'-phosphate
  modified_base 18: mod_base = OTHER; note = 2'-O-methyladenosine-3'-phosphate
  modified_base 19: mod_base = OTHER; note = 2'-O-methylcytidine-3'-phosphorothioate
  modified_base 20: mod_base = OTHER; note = 2'-O-methyluridine-3'-phosphorothioate
  modified_base 21: mod_base = OTHER; note = 2'-O-methyladenosine-3'-phosphate
aacagtaaagaaatgctacta

SEQ ID NO: 1497 - RNA, 21 nt, synthetic construct
  source 1..21: mol_type = other RNA
  modified_base 1: mod_base = OTHER; note = 2'-O-methyluridine-3'-phosphorothioate
  modified_base 2: mod_base = OTHER; note = 2'-O-methyladenosine-3'-phosphorothioate
  modified_base 3: mod_base = OTHER; note = 2'-O-methyluridine-3'-phosphate
  modified_base 4: mod_base = OTHER; note = 2'-O-methylguanosine-3'-phosphate
  modified_base 5: mod_base = OTHER; note = 2'-O-methyluridine-3'-phosphate
  modified_base 6: mod_base = OTHER; note 1-((2R,3R,4R,5R)-3-(docosyloxy)-4-hydroxy-5-(hydroxymethyl) tetrahydrofuran-2-yl)pyrimidine-2,4(1H,3H)-dione
  modified_base 7: mod_base = OTHER; note = 2'-fluorocytidine-3'-phosphate
  modified_base 8: mod_base = OTHER; note = 2'-O-methyluridine-3'-phosphate
  modified_base 9: mod_base = OTHER; note = 2'-fluoroguanosine-3'-phosphate
  modified_base 10: mod_base = OTHER; note = 2'-fluoroadenosine-3'-phosphate
  modified_base 11: mod_base = OTHER; note = 2'-fluorocytidine-3'-phosphate
  modified_base 12: mod_base = OTHER; note = 2'-O-methyluridine-3'-phosphate
  modified_base 13: mod_base = OTHER; note = 2'-O-methyluridine-3'-phosphate
  modified_base 14: mod_base = OTHER; note = 2'-O-methylguanosine-3'-phosphate
  modified_base 15: mod_base = OTHER; note = 2'-O-methyladenosine-3'-phosphate
  modified_base 16: mod_base = OTHER; note = 2'-O-methylguanosine-3'-phosphate
  modified_base 17: mod_base = OTHER; note = 2'-O-methyladenosine-3'-phosphate
  modified_base 18: mod_base = OTHER; note = 2'-O-methylguanosine-3'-phosphate
  modified_base 19: mod_base = OTHER; note = 2'-O-methyluridine-3'-phosphorothioate
  modified_base 20: mod_base = OTHER; note = 2'-O-methyluridine-3'-phosphorothioate
  modified_base 21: mod_base = OTHER; note = 2'-O-methyladenosine-3'-phosphate
tatgttctgacttgagagtta

SEQ ID NO: 1498 - RNA, 21 nt, synthetic construct
  source 1..21: mol_type = other RNA
  modified_base 1: mod_base = OTHER; note = 2'-O-methyluridine-3'-phosphorothioate
  modified_base 2: mod_base = OTHER; note = 2'-O-methyluridine-3'-phosphorothioate
  modified_base 3: mod_base = OTHER; note = 2'-O-methyladenosine-3'-phosphate
  modified_base 4: mod_base = OTHER; note = 2'-O-methylguanosine-3'-phosphate
  modified_base 5: mod_base = OTHER; note = 2'-O-methyladenosine-3'-phosphate
  modified_base 6: mod_base = OTHER; note 2-amino-9-((2R,3S,4S,5R)-3-(docosyloxy)-4-hydroxy-5-(hydrox ymethyl)tetrahydrofuran-2-yl)-1,9-dihydro-6H-purin-6-one
  modified_base 7: mod_base = OTHER; note = 2'-fluorocytidine-3'-phosphate
  modified_base 8: mod_base = OTHER; note = 2'-O-methyladenosine-3'-phosphate
  modified_base 9: mod_base = OTHER; note = 2'-fluorouridine-3'-phosphate
  modified_base 10: mod_base = OTHER; note = 2'-fluoroguanosine-3'-phosphate
  modified_base 11: mod_base = OTHER; note = 2'-fluorocytidine-3'-phosphate
  modified_base 12: mod_base = OTHER; note = 2'-O-methyluridine-3'-phosphate
  modified_base 13: mod_base = OTHER; note = 2'-O-methyladenosine-3'-phosphate
  modified_base 14: mod_base = OTHER; note = 2'-O-methyluridine-3'-phosphate
  modified_base 15: mod_base = OTHER; note = 2'-O-methylcytidine-3'-phosphate
  modified_base 16: mod_base = OTHER; note = 2'-O-methyluridine-3'-phosphate
  modified_base 17: mod_base = OTHER; note = 2'-O-methyluridine-3'-phosphate
  modified_base 18: mod_base = OTHER; note = 2'-O-methyluridine-3'-phosphate
  modified_base 19: mod_base = OTHER; note = 2'-O-methyladenosine-3'-phosphorothioate
  modified_base 20: mod_base = OTHER; note = 2'-O-methylguanosine-3'-phosphorothioate
  modified_base 21: mod_base = OTHER; note = 2'-O-methyladenosine-3'-phosphate
ttagagcatgctatctttaga

SEQ ID NO: 1499 - RNA, 21 nt, synthetic construct
  source 1..21: mol_type = other RNA
  modified_base 1: mod_base = OTHER; note = 2'-O-methyluridine-3'-phosphorothioate
  modified_base 2: mod_base = OTHER; note = 2'-O-methyladenosine-3'-phosphorothioate
  modified_base 3: mod_base = OTHER; note = 2'-O-methylguanosine-3'-phosphate
  modified_base 4: mod_base = OTHER; note = 2'-O-methyluridine-3'-phosphate
  modified_base 5: mod_base = OTHER; note = 2'-O-methylcytidine-3'-phosphate
  modified_base 6: mod_base = OTHER; note 1-((2R,3R,4R,5R)-3-(docosyloxy)-4-hydroxy-5-(hydroxymethyl) tetrahydrofuran-2-yl)pyrimidine-2,4(1H,3H)-dione
  modified_base 7: mod_base = OTHER; note = 2'-fluorouridine-3'-phosphate
  modified_base 8: mod_base = OTHER; note = 2'-O-methyluridine-3'-phosphate
  modified_base 9: mod_base = OTHER; note = 2'-fluoroguanosine-3'-phosphate
  modified_base 10: mod_base = OTHER; note = 2'-fluoroadenosine-3'-phosphate
  modified_base 11: mod_base = OTHER; note = 2'-fluorouridine-3'-phosphate
  modified_base 12: mod_base = OTHER; note = 2'-O-methyluridine-3'-phosphate
  modified_base 13: mod_base = OTHER; note = 2'-O-methylguanosine-3'-phosphate
  modified_base 14: mod_base = OTHER; note = 2'-O-methyladenosine-3'-phosphate
  modified_base 15: mod_base = OTHER; note = 2'-O-methyladenosine-3'-phosphate
  modified_base 16: mod_base = OTHER; note = 2'-O-methyladenosine-3'-phosphate
  modified_base 17: mod_base = OTHER; note = 2'-O-methyluridine-3'-phosphate
  modified_base 18: mod_base = OTHER; note = 2'-O-methyladenosine-3'-phosphate
  modified_base 19: mod_base = OTHER; note = 2'-O-methyladenosine-3'-phosphorothioate
  modified_base 20: mod_base = OTHER; note = 2'-O-methylguanosine-3'-phosphorothioate
  modified_base 21: mod_base = OTHER; note = 2'-O-methyladenosine-3'-phosphate
tagtctttgattgaaataaga

SEQ ID NO: 1500 - RNA, 21 nt, synthetic construct
  source 1..21: mol_type = other RNA
  modified_base 1: mod_base = OTHER; note = 2'-O-methyluridine-3'-phosphorothioate
  modified_base 2: mod_base = OTHER; note = 2'-O-methyluridine-3'-phosphorothioate
  modified_base 3: mod_base = OTHER; note = 2'-O-methylguanosine-3'-phosphate
  modified_base 4: mod_base = OTHER; note = 2'-O-methylguanosine-3'-phosphate
  modified_base 5: mod_base = OTHER; note = 2'-O-methyluridine-3'-phosphate
  modified_base 6: mod_base = OTHER; note (2R,3S,4S,5R)-5-(6-amino-9H-purin-9-yl)-4-(docosyloxy)-2-(h ydroxymethyl)tetrahydrofuran-3-ol
  modified_base 7: mod_base = OTHER; note = 2'-fluoroadenosine-3'-phosphate
  modified_base 8: mod_base = OTHER; note = 2'-O-methyladenosine-3'-phosphate
  modified_base 9: mod_base = OTHER; note = 2'-fluorocytidine-3'-phosphate
  modified_base 10: mod_base = OTHER; note = 2'-fluoroguanosine-3'-phosphate
  modified_base 11: mod_base = OTHER; note = 2'-fluoroadenosine-3'-phosphate
  modified_base 12: mod_base = OTHER; note = 2'-O-methylguanosine-3'-phosphate
  modified_base 13: mod_base = OTHER; note = 2'-O-methyladenosine-3'-phosphate
  modified_base 14: mod_base = OTHER; note = 2'-O-methyluridine-3'-phosphate
  modified_base 15: mod_base = OTHER; note = 2'-O-methyluridine-3'-phosphate
  modified_base 16: mod_base = OTHER; note = 2'-O-methyluridine-3'-phosphate
  modified_base 17: mod_base = OTHER; note = 2'-O-methyladenosine-3'-phosphate
  modified_base 18: mod_base = OTHER; note = 2'-O-methyladenosine-3'-phosphate
  modified_base 19: mod_base = OTHER; note = 2'-O-methylcytidine-3'-phosphorothioate
  modified_base 20: mod_base = OTHER; note = 2'-O-methyladenosine-3'-phosphorothioate
  modified_base 21: mod_base = OTHER; note = 2'-O-methyladenosine-3'-phosphate
ttggtaaacgagatttaacaa

SEQ ID NO: 1501 - RNA, 21 nt, synthetic construct
  source 1..21: mol_type = other RNA
  modified_base 1: mod_base = OTHER; note = 2'-O-methylguanosine-3'-phosphorothioate
  modified_base 2: mod_base = OTHER; note = 2'-O-methyluridine-3'-phosphorothioate
  modified_base 3: mod_base = OTHER; note = 2'-O-methylcytidine-3'-phosphate
  modified_base 4: mod_base = OTHER; note = 2'-O-methyluridine-3'-phosphate
  modified_base 5: mod_base = OTHER; note = 2'-O-methylguanosine-3'-phosphate
  modified_base 6: mod_base = OTHER; note (2R,3S,4S,5R)-5-(6-amino-9H-purin-9-yl)-4-(docosyloxy)-2-(h ydroxymethyl)tetrahydrofuran-3-ol
  modified_base 7: mod_base = OTHER; note = 2'-fluoroadenosine-3'-phosphate
  modified_base 8: mod_base = OTHER; note = 2'-O-methyladenosine-3'-phosphate
  modified_base 9: mod_base = OTHER; note = 2'-fluoroadenosine-3'-phosphate
  modified_base 10: mod_base = OTHER; note = 2'-fluorouridine-3'-phosphate
  modified_base 11: mod_base = OTHER; note = 2'-fluorouridine-3'-phosphate
  modified_base 12: mod_base = OTHER; note = 2'-O-methylguanosine-3'-phosphate
  modified_base 13: mod_base = OTHER; note = 2'-O-methylcytidine-3'-phosphate
  modified_base 14: mod_base = OTHER; note = 2'-O-methyluridine-3'-phosphate
  modified_base 15: mod_base = OTHER; note = 2'-O-methyluridine-3'-phosphate
  modified_base 16: mod_base = OTHER; note = 2'-O-methyluridine-3'-phosphate
  modified_base 17: mod_base = OTHER; note = 2'-O-methylcytidine-3'-phosphate
  modified_base 18: mod_base = OTHER; note = 2'-O-methyladenosine-3'-phosphate
  modified_base 19: mod_base = OTHER; note = 2'-O-methyluridine-3'-phosphorothioate
  modified_base 20: mod_base = OTHER; note = 2'-O-methyluridine-3'-phosphorothioate
  modified_base 21: mod_base = OTHER; note = 2'-O-methyladenosine-3'-phosphate
gtctgaaaattgctttcatta

SEQ ID NO: 1502 - RNA, 21 nt, synthetic construct
  source 1..21: mol_type = other RNA
  modified_base 1: mod_base = OTHER; note = 2'-O-methyladenosine-3'-phosphorothioate
  modified_base 2: mod_base = OTHER; note = 2'-O-methyluridine-3'-phosphorothioate
  modified_base 3: mod_base = OTHER; note = 2'-O-methylguanosine-3'-phosphate
  modified_base 4: mod_base = OTHER; note = 2'-O-methyladenosine-3'-phosphate
  modified_base 5: mod_base = OTHER; note = 2'-O-methyladenosine-3'-phosphate
  modified_base 6: mod_base = OTHER; note 4-amino-1-((2R,3R,4R,5R)-3-(docosyloxy)-4-hydroxy-5-(hydrox ymethyl)tetrahydrofuran-2-yl)pyrimidin-2(1H)-one
  modified_base 7: mod_base = OTHER; note = 2'-fluorouridine-3'-phosphate
  modified_base 8: mod_base = OTHER; note = 2'-O-methyluridine-3'-phosphate
  modified_base 9: mod_base = OTHER; note = 2'-fluoroguanosine-3'-phosphate
  modified_base 10: mod_base = OTHER; note = 2'-fluorouridine-3'-phosphate
  modified_base 11: mod_base = OTHER; note = 2'-fluorouridine-3'-phosphate
  modified_base 12: mod_base = OTHER; note = 2'-O-methylguanosine-3'-phosphate
  modified_base 13: mod_base = OTHER; note = 2'-O-methylcytidine-3'-phosphate
  modified_base 14: mod_base = OTHER; note = 2'-O-methylcytidine-3'-phosphate
  modified_base 15: mod_base = OTHER; note = 2'-O-methyluridine-3'-phosphate
  modified_base 16: mod_base = OTHER; note = 2'-O-methyluridine-3'-phosphate
  modified_base 17: mod_base = OTHER; note = 2'-O-methylguanosine-3'-phosphate
  modified_base 18: mod_base = OTHER; note = 2'-O-methyluridine-3'-phosphate
  modified_base 19: mod_base = OTHER; note = 2'-O-methyladenosine-3'-phosphorothioate
  modified_base 20: mod_base = OTHER; note = 2'-O-methyladenosine-3'-phosphorothioate
  modified_base 21: mod_base = OTHER; note = 2'-O-methyladenosine-3'-phosphate
atgaacttgttgccttgtaaa

SEQ ID NO: 1503 - RNA, 21 nt, synthetic construct
  source 1..21: mol_type = other RNA
  modified_base 1: mod_base = OTHER; note = 2'-O-methylguanosine-3'-phosphorothioate
  modified_base 2: mod_base = OTHER; note = 2'-O-methylguanosine-3'-phosphorothioate
  modified_base 3: mod_base = OTHER; note = 2'-O-methylguanosine-3'-phosphate
  modified_base 4: mod_base = OTHER; note = 2'-O-methylcytidine-3'-phosphate
  modified_base 5: mod_base = OTHER; note = 2'-O-methyladenosine-3'-phosphate
  modified_base 6: mod_base = OTHER; note (2R,3S,4S,5R)-5-(6-amino-9H-purin-9-yl)-4-(docosyloxy)-2-(h ydroxymethyl)tetrahydrofuran-3-ol
  modified_base 7: mod_base = OTHER; note = 2'-fluorouridine-3'-phosphate
  modified_base 8: mod_base = OTHER; note = 2'-O-methyladenosine-3'-phosphate
  modified_base 9: mod_base = OTHER; note = 2'-fluoroadenosine-3'-phosphate
  modified_base 10: mod_base = OTHER; note = 2'-fluoroadenosine-3'-phosphate
  modified_base 11: mod_base = OTHER; note = 2'-fluorocytidine-3'-phosphate
  modified_base 12: mod_base = OTHER; note = 2'-O-methyluridine-3'-phosphate
  modified_base 13: mod_base = OTHER; note = 2'-O-methylguanosine-3'-phosphate
  modified_base 14: mod_base = OTHER; note = 2'-O-methyluridine-3'-phosphate
  modified_base 15: mod_base = OTHER; note = 2'-O-methyladenosine-3'-phosphate
  modified_base 16: mod_base = OTHER; note = 2'-O-methyluridine-3'-phosphate
  modified_base 17: mod_base = OTHER; note = 2'-O-methylcytidine-3'-phosphate
  modified_base 18: mod_base = OTHER; note = 2'-O-methyladenosine-3'-phosphate
  modified_base 19: mod_base = OTHER; note = 2'-O-methyladenosine-3'-phosphorothioate
  modified_base 20: mod_base = OTHER; note = 2'-O-methyladenosine-3'-phosphorothioate
  modified_base 21: mod_base = OTHER; note = 2'-O-methyladenosine-3'-phosphate
gggcaataaactgtatcaaaa

SEQ ID NO: 1504 - RNA, 21 nt, synthetic construct
  source 1..21: mol_type = other RNA
  modified_base 1: mod_base = OTHER; note = 2'-O-methyladenosine-3'-phosphorothioate
  modified_base 2: mod_base = OTHER; note = 2'-O-methylcytidine-3'-phosphorothioate
  modified_base 3: mod_base = OTHER; note = 2'-O-methyladenosine-3'-phosphate
  modified_base 4: mod_base = OTHER; note = 2'-O-methyluridine-3'-phosphate
  modified_base 5: mod_base = OTHER; note = 2'-O-methylguanosine-3'-phosphate
  modified_base 6: mod_base = OTHER; note 1-((2R,3R,4R,5R)-3-(docosyloxy)-4-hydroxy-5-(hydroxymethyl) tetrahydrofuran-2-yl)pyrimidine-2,4(1H,3H)-dione
  modified_base 7: mod_base = OTHER; note = 2'-fluorouridine-3'-phosphate
  modified_base 8: mod_base = OTHER; note = 2'-O-methyladenosine-3'-phosphate
  modified_base 9: mod_base = OTHER; note = 2'-fluoroguanosine-3'-phosphate
  modified_base 10: mod_base = OTHER; note = 2'-fluorocytidine-3'-phosphate
  modified_base 11: mod_base = OTHER; note = 2'-fluoroadenosine-3'-phosphate
  modified_base 12: mod_base = OTHER; note = 2'-O-methyluridine-3'-phosphate
  modified_base 13: mod_base = OTHER; note = 2'-O-methyladenosine-3'-phosphate
  modified_base 14: mod_base = OTHER; note = 2'-O-methyluridine-3'-phosphate
  modified_base 15: mod_base = OTHER; note = 2'-O-methyladenosine-3'-phosphate
  modified_base 16: mod_base = OTHER; note = 2'-O-methyladenosine-3'-phosphate
  modified_base 17: mod_base = OTHER; note = 2'-O-methyluridine-3'-phosphate
  modified_base 18: mod_base = OTHER; note = 2'-O-methylguanosine-3'-phosphate
  modified_base 19: mod_base = OTHER; note = 2'-O-methyluridine-3'-phosphorothioate
  modified_base 20: mod_base = OTHER; note = 2'-O-methyladenosine-3'-phosphorothioate
  modified_base 21: mod_base = OTHER; note = 2'-O-methyladenosine-3'-phosphate
acatgttagcatataatgtaa

SEQ ID NO: 1505 - RNA, 21 nt, synthetic construct
  source 1..21: mol_type = other RNA
  modified_base 1: mod_base = OTHER; note = 2'-O-methyluridine-3'-phosphorothioate
  modified_base 2: mod_base = OTHER; note = 2'-O-methylguanosine-3'-phosphorothioate
  modified_base 3: mod_base = OTHER; note = 2'-O-methyluridine-3'-phosphate
  modified_base 4: mod_base = OTHER; note = 2'-O-methylguanosine-3'-phosphate
  modified_base 5: mod_base = OTHER; note = 2'-O-methyladenosine-3'-phosphate
  modified_base 6: mod_base = OTHER; note 2-amino-9-((2R,3S,4S,5R)-3-(docosyloxy)-4-hydroxy-5-(hydrox ymethyl)tetrahydrofuran-2-yl)-1,9-dihydro-6H-purin-6-one
  modified_base 7: mod_base = OTHER; note = 2'-fluoroadenosine-3'-phosphate
  modified_base 8: mod_base = OTHER; note = 2'-O-methylguanosine-3'-phosphate
  modified_base 9: mod_base = OTHER; note = 2'-fluorouridine-3'-phosphate
  modified_base 10: mod_base = OTHER; note = 2'-fluoroadenosine-3'-phosphate
  modified_base 11: mod_base = OTHER; note = 2'-fluorouridine-3'-phosphate
  modified_base 12: mod_base = OTHER; note = 2'-O-methyladenosine-3'-phosphate
  modified_base 13: mod_base = OTHER; note = 2'-O-methylguanosine-3'-phosphate
  modified_base 14: mod_base = OTHER; note = 2'-O-methyladenosine-3'-phosphate
  modified_base 15: mod_base = OTHER; note = 2'-O-methyladenosine-3'-phosphate
  modified_base 16: mod_base = OTHER; note = 2'-O-methyluridine-3'-phosphate
  modified_base 17: mod_base = OTHER; note = 2'-O-methyluridine-3'-phosphate
  modified_base 18: mod_base = OTHER; note = 2'-O-methyluridine-3'-phosphate
  modified_base 19: mod_base = OTHER; note = 2'-O-methylcytidine-3'-phosphorothioate
  modified_base 20: mod_base = OTHER; note = 2'-O-methyluridine-3'-phosphorothioate
  modified_base 21: mod_base = OTHER; note = 2'-O-methyladenosine-3'-phosphate
tgtgagagtatagaatttcta

SEQ ID NO: 1506 - RNA, 21 nt, synthetic construct
  source 1..21: mol_type = other RNA
  modified_base 1: mod_base = OTHER; note = 2'-O-methyladenosine-3'-phosphorothioate
  modified_base 2: mod_base = OTHER; note = 2'-O-methyluridine-3'-phosphorothioate
  modified_base 3: mod_base = OTHER; note = 2'-O-methylcytidine-3'-phosphate
  modified_base 4: mod_base = OTHER; note = 2'-O-methylcytidine-3'-phosphate
  modified_base 5: mod_base = OTHER; note = 2'-O-methyluridine-3'-phosphate
  modified_base 6: mod_base = OTHER; note 1-((2R,3R,4R,5R)-3-(docosyloxy)-4-hydroxy-5-(hydroxymethyl) tetrahydrofuran-2-yl)pyrimidine-2,4(1H,3H)-dione
  modified_base 7: mod_base = OTHER; note = 2'-fluorocytidine-3'-phosphate
  modified_base 8: mod_base = OTHER; note = 2'-O-methyladenosine-3'-phosphate
  modified_base 9: mod_base = OTHER; note = 2'-fluorouridine-3'-phosphate
  modified_base 10: mod_base = OTHER; note = 2'-fluorouridine-3'-phosphate
  modified_base 11: mod_base = OTHER; note = 2'-fluorouridine-3'-phosphate
  modified_base 12: mod_base = OTHER; note = 2'-O-methylguanosine-3'-phosphate
  modified_base 13: mod_base = OTHER; note = 2'-O-methylguanosine-3'-phosphate
  modified_base 14: mod_base = OTHER; note = 2'-O-methylcytidine-3'-phosphate
  modified_base 15: mod_base = OTHER; note = 2'-O-methyladenosine-3'-phosphate
  modified_base 16: mod_base = OTHER; note = 2'-O-methylcytidine-3'-phosphate
  modified_base 17: mod_base = OTHER; note = 2'-O-methyluridine-3'-phosphate
  modified_base 18: mod_base = OTHER; note = 2'-O-methyladenosine-3'-phosphate
  modified_base 19: mod_base = OTHER; note = 2'-O-methyluridine-3'-phosphorothioate
  modified_base 20: mod_base = OTHER; note = 2'-O-methyladenosine-3'-phosphorothioate
  modified_base 21: mod_base = OTHER; note = 2'-O-methyladenosine-3'-phosphate
atccttcatttggcactataa

SEQ ID NO: 1507 - RNA, 21 nt, synthetic construct
  source 1..21: mol_type = other RNA
  modified_base 1: mod_base = OTHER; note = 2'-O-methyladenosine-3'-phosphorothioate
  modified_base 2: mod_base = OTHER; note = 2'-O-methylcytidine-3'-phosphorothioate
  modified_base 3: mod_base = OTHER; note = 2'-O-methyladenosine-3'-phosphate
  modified_base 4: mod_base = OTHER; note = 2'-O-methyluridine-3'-phosphate
  modified_base 5: mod_base = OTHER; note = 2'-O-methyluridine-3'-phosphate
  modified_base 6: mod_base = OTHER; note 1-((2R,3R,4R,5R)-3-(docosyloxy)-4-hydroxy-5-(hydroxymethyl) tetrahydrofuran-2-yl)pyrimidine-2,4(1H,3H)-dione
  modified_base 7: mod_base = OTHER; note = 2'-fluoroadenosine-3'-phosphate
  modified_base 8: mod_base = OTHER; note = 2'-O-methylguanosine-3'-phosphate
  modified_base 9: mod_base = OTHER; note = 2'-fluoroadenosine-3'-phosphate
  modified_base 10: mod_base = OTHER; note = 2'-fluoroadenosine-3'-phosphate
  modified_base 11: mod_base = OTHER; note = 2'-fluoroadenosine-3'-phosphate
  modified_base 12: mod_base = OTHER; note = 2'-O-methylguanosine-3'-phosphate
  modified_base 13: mod_base = OTHER; note = 2'-O-methyluridine-3'-phosphate
  modified_base 14: mod_base = OTHER; note = 2'-O-methyladenosine-3'-phosphate
  modified_base 15: mod_base = OTHER; note = 2'-O-methylguanosine-3'-phosphate
  modified_base 16: mod_base = OTHER; note = 2'-O-methylcytidine-3'-phosphate
  modified_base 17: mod_base = OTHER; note = 2'-O-methyluridine-3'-phosphate
  modified_base 18: mod_base = OTHER; note = 2'-O-methyluridine-3'-phosphate
  modified_base 19: mod_base = OTHER; note = 2'-O-methyluridine-3'-phosphorothioate
  modified_base 20: mod_base = OTHER; note = 2'-O-methyladenosine-3'-phosphorothioate
  modified_base 21: mod_base = OTHER; note = 2'-O-methyladenosine-3'-phosphate
acatttagaaagtagctttaa

SEQ ID NO: 1508 - RNA, 21 nt, synthetic construct
  source 1..21: mol_type = other RNA
  modified_base 1: mod_base = OTHER; note = 2'-O-methyladenosine-3'-phosphorothioate
  modified_base 2: mod_base = OTHER; note = 2'-O-methyladenosine-3'-phosphorothioate
  modified_base 3: mod_base = OTHER; note = 2'-O-methylcytidine-3'-phosphate
  modified_base 4: mod_base = OTHER; note = 2'-O-methyluridine-3'-phosphate
  modified_base 5: mod_base = OTHER; note = 2'-O-methylguanosine-3'-phosphate
  modified_base 6: mod_base = OTHER; note 1-((2R,3R,4R,5R)-3-(docosyloxy)-4-hydroxy-5-(hydroxymethyl) tetrahydrofuran-2-yl)pyrimidine-2,4(1H,3H)-dione
  modified_base 7: mod_base = OTHER; note = 2'-fluorouridine-3'-phosphate
  modified_base 8: mod_base = OTHER; note = 2'-O-methylcytidine-3'-phosphate
  modified_base 9: mod_base = OTHER; note = 2'-fluorouridine-3'-phosphate
  modified_base 10: mod_base = OTHER; note = 2'-fluoroadenosine-3'-phosphate
  modified_base 11: mod_base = OTHER; note = 2'-fluorouridine-3'-phosphate
  modified_base 12: mod_base = OTHER; note = 2'-O-methyladenosine-3'-phosphate
  modified_base 13: mod_base = OTHER; note = 2'-O-methyladenosine-3'-phosphate
  modified_base 14: mod_base = OTHER; note = 2'-O-methyladenosine-3'-phosphate
  modified_base 15: mod_base = OTHER; note = 2'-O-methylguanosine-3'-phosphate
  modified_base 16: mod_base = OTHER; note = 2'-O-methylcytidine-3'-phosphate
  modified_base 17: mod_base = OTHER; note = 2'-O-methyladenosine-3'-phosphate
  modified_base 18: mod_base = OTHER; note = 2'-O-methyladenosine-3'-phosphate
  modified_base 19: mod_base = OTHER; note = 2'-O-methyladenosine-3'-phosphorothioate
  modified_base 20: mod_base = OTHER; note = 2'-O-methylguanosine-3'-phosphorothioate
  modified_base 21: mod_base = OTHER; note = 2'-O-methyladenosine-3'-phosphate
aactgttctataaagcaaaga

SEQ ID NO: 1509 - RNA, 21 nt, synthetic construct
  source 1..21: mol_type = other RNA
  modified_base 1: mod_base = OTHER; note = 2'-O-methylcytidine-3'-phosphorothioate
  modified_base 2: mod_base = OTHER; note = 2'-O-methylcytidine-3'-phosphorothioate
  modified_base 3: mod_base = OTHER; note = 2'-O-methyluridine-3'-phosphate
  modified_base 4: mod_base = OTHER; note = 2'-O-methylcytidine-3'-phosphate
  modified_base 5: mod_base = OTHER; note = 2'-O-methylcytidine-3'-phosphate
  modified_base 6: mod_base = OTHER; note (2R,3S,4S,5R)-5-(6-amino-9H-purin-9-yl)-4-(docosyloxy)-2-(h ydroxymethyl)tetrahydrofuran-3-ol
  modified_base 7: mod_base = OTHER; note = 2'-fluoroguanosine-3'-phosphate
  modified_base 8: mod_base = OTHER; note = 2'-O-methyladenosine-3'-phosphate
  modified_base 9: mod_base = OTHER; note = 2'-fluoroguanosine-3'-phosphate
  modified_base 10: mod_base = OTHER; note = 2'-fluoroadenosine-3'-phosphate
  modified_base 11: mod_base = OTHER; note = 2'-fluorouridine-3'-phosphate
  modified_base 12: mod_base = OTHER; note = 2'-O-methylguanosine-3'-phosphate
  modified_base 13: mod_base = OTHER; note = 2'-O-methyladenosine-3'-phosphate
  modified_base 14: mod_base = OTHER; note = 2'-O-methyladenosine-3'-phosphate
  modified_base 15: mod_base = OTHER; note = 2'-O-methyladenosine-3'-phosphate
  modified_base 16: mod_base = OTHER; note = 2'-O-methylguanosine-3'-phosphate
  modified_base 17: mod_base = OTHER; note = 2'-O-methyladenosine-3'-phosphate
  modified_base 18: mod_base = OTHER; note = 2'-O-methyluridine-3'-phosphate
  modified_base 19: mod_base = OTHER; note = 2'-O-methylcytidine-3'-phosphorothioate
  modified_base 20: mod_base = OTHER; note = 2'-O-methyluridine-3'-phosphorothioate
  modified_base 21: mod_base = OTHER; note = 2'-O-methyladenosine-3'-phosphate
cctccagagatgaaagatcta

SEQ ID NO: 1510 - RNA, 21 nt, synthetic construct
  source 1..21: mol_type = other RNA
  modified_base 1: mod_base = OTHER; note = 2'-O-methyluridine-3'-phosphorothioate
  modified_base 2: mod_base = OTHER; note = 2'-O-methyluridine-3'-phosphorothioate
  modified_base 3: mod_base = OTHER; note = 2'-O-methylguanosine-3'-phosphate
  modified_base 4: mod_base = OTHER; note = 2'-O-methyluridine-3'-phosphate
  modified_base 5: mod_base = OTHER; note = 2'-O-methyluridine-3'-phosphate
  modified_base 6: mod_base = OTHER; note 1-((2R,3R,4R,5R)-3-(docosyloxy)-4-hydroxy-5-(hydroxymethyl) tetrahydrofuran-2-yl)pyrimidine-2,4(1H,3H)-dione
  modified_base 7: mod_base = OTHER; note = 2'-fluoroadenosine-3'-phosphate
  modified_base 8: mod_base = OTHER; note = 2'-O-methyladenosine-3'-phosphate
  modified_base 9: mod_base = OTHER; note = 2'-fluorocytidine-3'-phosphate
  modified_base 10: mod_base = OTHER; note = 2'-fluorouridine-3'-phosphate
  modified_base 11: mod_base = OTHER; note = 2'-fluoroadenosine-3'-phosphate
  modified_base 12: mod_base = OTHER; note = 2'-O-methyluridine-3'-phosphate
  modified_base 13: mod_base = OTHER; note = 2'-O-methylguanosine-3'-phosphate
  modified_base 14: mod_base = OTHER; note = 2'-O-methyladenosine-3'-phosphate
  modified_base 15: mod_base = OTHER; note = 2'-O-methylcytidine-3'-phosphate
  modified_base 16: mod_base = OTHER; note = 2'-O-methyluridine-3'-phosphate
  modified_base 17: mod_base = OTHER; note = 2'-O-methylcytidine-3'-phosphate
  modified_base 18: mod_base = OTHER; note = 2'-O-methylcytidine-3'-phosphate
  modified_base 19: mod_base = OTHER; note = 2'-O-methyluridine-3'-phosphorothioate
  modified_base 20: mod_base = OTHER; note = 2'-O-methyladenosine-3'-phosphorothioate
  modified_base 21: mod_base = OTHER; note = 2'-O-methyladenosine-3'-phosphate
ttgtttaactatgactcctaa

SEQ ID NO: 1511 - RNA, 21 nt, synthetic construct
  source 1..21: mol_type = other RNA
  modified_base 1: mod_base = OTHER; note = 2'-O-methylcytidine-3'-phosphorothioate
  modified_base 2: mod_base = OTHER; note = 2'-O-methyluridine-3'-phosphorothioate
  modified_base 3: mod_base = OTHER; note = 2'-O-methylguanosine-3'-phosphate
  modified_base 4: mod_base = OTHER; note = 2'-O-methyluridine-3'-phosphate
  modified_base 5: mod_base = OTHER; note = 2'-O-methyluridine-3'-phosphate
  modified_base 6: mod_base = OTHER; note 1-((2R,3R,4R,5R)-3-(docosyloxy)-4-hydroxy-5-(hydroxymethyl) tetrahydrofuran-2-yl)pyrimidine-2,4(1H,3H)-dione
  modified_base 7: mod_base = OTHER; note = 2'-fluoroguanosine-3'-phosphate
  modified_base 8: mod_base = OTHER; note = 2'-O-methyladenosine-3'-phosphate
  modified_base 9: mod_base = OTHER; note = 2'-fluorocytidine-3'-phosphate
  modified_base 10: mod_base = OTHER; note = 2'-fluoroadenosine-3'-phosphate
  modified_base 11: mod_base = OTHER; note = 2'-fluoroadenosine-3'-phosphate
  modified_base 12: mod_base = OTHER; note = 2'-O-methyluridine-3'-phosphate
  modified_base 13: mod_base = OTHER; note = 2'-O-methylguanosine-3'-phosphate
  modified_base 14: mod_base = OTHER; note = 2'-O-methylcytidine-3'-phosphate
  modified_base 15: mod_base = OTHER; note = 2'-O-methyluridine-3'-phosphate
  modified_base 16: mod_base = OTHER; note = 2'-O-methyluridine-3'-phosphate
  modified_base 17: mod_base = OTHER; note = 2'-O-methyluridine-3'-phosphate
  modified_base 18: mod_base = OTHER; note = 2'-O-methylguanosine-3'-phosphate
  modified_base 19: mod_base = OTHER; note = 2'-O-methyluridine-3'-phosphorothioate
  modified_base 20: mod_base = OTHER; note = 2'-O-methyluridine-3'-phosphorothioate
  modified_base 21: mod_base = OTHER; note = 2'-O-methyladenosine-3'-phosphate
ctgtttgacaatgctttgtta

SEQ ID NO: 1512 - RNA, 21 nt, synthetic construct
  source 1..21: mol_type = other RNA
  modified_base 1: mod_base = OTHER; note = 2'-O-methyluridine-3'-phosphorothioate
  modified_base 2: mod_base = OTHER; note = 2'-O-methylguanosine-3'-phosphorothioate
  modified_base 3: mod_base = OTHER; note = 2'-O-methyluridine-3'-phosphate
  modified_base 4: mod_base = OTHER; note = 2'-O-methylcytidine-3'-phosphate
  modified_base 5: mod_base = OTHER; note = 2'-O-methylcytidine-3'-phosphate
  modified_base 6: mod_base = OTHER; note 1-((2R,3R,4R,5R)-3-(docosyloxy)-4-hydroxy-5-(hydroxymethyl) tetrahydrofuran-2-yl)pyrimidine-2,4(1H,3H)-dione
  modified_base 7: mod_base = OTHER; note = 2'-fluoroadenosine-3'-phosphate
  modified_base 8: mod_base = OTHER; note = 2'-O-methyladenosine-3'-phosphate
  modified_base 9: mod_base = OTHER; note = 2'-fluoroadenosine-3'-phosphate
  modified_base 10: mod_base = OTHER; note = 2'-fluoroadenosine-3'-phosphate
  modified_base 11: mod_base = OTHER; note = 2'-fluoroguanosine-3'-phosphate
  modified_base 12: mod_base = OTHER; note = 2'-O-methyladenosine-3'-phosphate
  modified_base 13: mod_base = OTHER; note = 2'-O-methyladenosine-3'-phosphate
  modified_base 14: mod_base = OTHER; note = 2'-O-methyladenosine-3'-phosphate
  modified_base 15: mod_base = OTHER; note = 2'-O-methyluridine-3'-phosphate
  modified_base 16: mod_base = OTHER; note = 2'-O-methyluridine-3'-phosphate
  modified_base 17: mod_base = OTHER; note = 2'-O-methyluridine-3'-phosphate
  modified_base 18: mod_base = OTHER; note = 2'-O-methyluridine-3'-phosphate
  modified_base 19: mod_base = OTHER; note = 2'-O-methyluridine-3'-phosphorothioate
  modified_base 20: mod_base = OTHER; note = 2'-O-methylcytidine-3'-phosphorothioate
  modified_base 21: mod_base = OTHER; note = 2'-O-methyladenosine-3'-phosphate
tgtcctaaaagaaatttttca

SEQ ID NO: 1513 - RNA, 21 nt, synthetic construct
  source 1..21: mol_type = other RNA
  modified_base 1: mod_base = OTHER; note = 2'-O-methyladenosine-3'-phosphorothioate
  modified_base 2: mod_base = OTHER; note = 2'-O-methylcytidine-3'-phosphorothioate
  modified_base 3: mod_base = OTHER; note = 2'-O-methyladenosine-3'-phosphate
  modified_base 4: mod_base = OTHER; note = 2'-O-methylguanosine-3'-phosphate
  modified_base 5: mod_base = OTHER; note = 2'-O-methyladenosine-3'-phosphate
  modified_base 6: mod_base = OTHER; note 1-((2R,3R,4R,5R)-3-(docosyloxy)-4-hydroxy-5-(hydroxymethyl) tetrahydrofuran-2-yl)pyrimidine-2,4(1H,3H)-dione
  modified_base 7: mod_base = OTHER; note = 2'-fluorouridine-3'-phosphate
  modified_base 8: mod_base = OTHER; note = 2'-O-methylguanosine-3'-phosphate
  modified_base 9: mod_base = OTHER; note = 2'-fluoroadenosine-3'-phosphate
  modified_base 10: mod_base = OTHER; note = 2'-fluoroadenosine-3'-phosphate
  modified_base 11: mod_base = OTHER; note = 2'-fluorocytidine-3'-phosphate
  modified_base 12: mod_base = OTHER; note = 2'-O-methyladenosine-3'-phosphate
  modified_base 13: mod_base = OTHER; note = 2'-O-methyladenosine-3'-phosphate
  modified_base 14: mod_base = OTHER; note = 2'-O-methyladenosine-3'-phosphate
  modified_base 15: mod_base = OTHER; note = 2'-O-methylguanosine-3'-phosphate
  modified_base 16: mod_base = OTHER; note = 2'-O-methyladenosine-3'-phosphate
  modified_base 17: mod_base = OTHER; note = 2'-O-methyladenosine-3'-phosphate
  modified_base 18: mod_base = OTHER; note = 2'-O-methylcytidine-3'-phosphate
  modified_base 19: mod_base = OTHER; note = 2'-O-methyluridine-3'-phosphorothioate
  modified_base 20: mod_base = OTHER; note = 2'-O-methyluridine-3'-phosphorothioate
  modified_base 21: mod_base = OTHER; note = 2'-O-methyladenosine-3'-phosphate
acagattgaacaaagaactta

SEQ ID NO: 1514 - RNA, 21 nt, synthetic construct
  source 1..21: mol_type = other RNA
  modified_base 1: mod_base = OTHER; note = 2'-O-methylguanosine-3'-phosphorothioate
  modified_base 2: mod_base = OTHER; note = 2'-O-methyluridine-3'-phosphorothioate
  modified_base 3: mod_base = OTHER; note = 2'-O-methyluridine-3'-phosphate
  modified_base 4: mod_base = OTHER; note = 2'-O-methyluridine-3'-phosphate
  modified_base 5: mod_base = OTHER; note = 2'-O-methyladenosine-3'-phosphate
  modified_base 6: mod_base = OTHER; note (2R,3S,4S,5R)-5-(6-amino-9H-purin-9-yl)-4-(docosyloxy)-2-(h ydroxymethyl)tetrahydrofuran-3-ol
  modified_base 7: mod_base = OTHER; note = 2'-fluorocytidine-3'-phosphate
  modified_base 8: mod_base = OTHER; note = 2'-O-methylcytidine-3'-phosphate
  modified_base 9: mod_base = OTHER; note = 2'-fluorouridine-3'-phosphate
  modified_base 10: mod_base = OTHER; note = 2'-fluoroguanosine-3'-phosphate
  modified_base 11: mod_base = OTHER; note = 2'-fluorouridine-3'-phosphate
  modified_base 12: mod_base = OTHER; note = 2'-O-methylcytidine-3'-phosphate
  modified_base 13: mod_base = OTHER; note = 2'-O-methylcytidine-3'-phosphate
  modified_base 14: mod_base = OTHER; note = 2'-O-methyladenosine-3'-phosphate
  modified_base 15: mod_base = OTHER; note = 2'-O-methyladenosine-3'-phosphate
  modified_base 16: mod_base = OTHER; note = 2'-O-methyladenosine-3'-phosphate
  modified_base 17: mod_base = OTHER; note = 2'-O-methylcytidine-3'-phosphate
  modified_base 18: mod_base = OTHER; note = 2'-O-methyluridine-3'-phosphate
  modified_base 19: mod_base = OTHER; note = 2'-O-methyluridine-3'-phosphorothioate
  modified_base 20: mod_base = OTHER; note = 2'-O-methylcytidine-3'-phosphorothioate
  modified_base 21: mod_base = OTHER; note = 2'-O-methyladenosine-3'-phosphate
gtttaacctgtccaaacttca

SEQ ID NO: 1515 - RNA, 21 nt, synthetic construct
  source 1..21: mol_type = other RNA
  modified_base 1: mod_base = OTHER; note = 2'-O-methylcytidine-3'-phosphorothioate
  modified_base 2: mod_base = OTHER; note = 2'-O-methyladenosine-3'-phosphorothioate
  modified_base 3: mod_base = OTHER; note = 2'-O-methyladenosine-3'-phosphate
  modified_base 4: mod_base = OTHER; note = 2'-O-methyladenosine-3'-phosphate
  modified_base 5: mod_base = OTHER; note = 2'-O-methyladenosine-3'-phosphate
  modified_base 6: mod_base = OTHER; note 1-((2R,3R,4R,5R)-3-(docosyloxy)-4-hydroxy-5-(hydroxymethyl) tetrahydrofuran-2-yl)pyrimidine-2,4(1H,3H)-dione
  modified_base 7: mod_base = OTHER; note = 2'-fluoroguanosine-3'-phosphate
  modified_base 8: mod_base = OTHER; note = 2'-O-methyluridine-3'-phosphate
  modified_base 9: mod_base = OTHER; note = 2'-fluorouridine-3'-phosphate
  modified_base 10: mod_base = OTHER; note = 2'-fluorouridine-3'-phosphate
  modified_base 11: mod_base = OTHER; note = 2'-fluoroadenosine-3'-phosphate
  modified_base 12: mod_base = OTHER; note = 2'-O-methyladenosine-3'-phosphate
  modified_base 13: mod_base = OTHER; note = 2'-O-methylcytidine-3'-phosphate
  modified_base 14: mod_base = OTHER; note = 2'-O-methyluridine-3'-phosphate
  modified_base 15: mod_base = OTHER; note = 2'-O-methyluridine-3'-phosphate
  modified_base 16: mod_base = OTHER; note = 2'-O-methyluridine-3'-phosphate
  modified_base 17: mod_base = OTHER; note = 2'-O-methyladenosine-3'-phosphate
  modified_base 18: mod_base = OTHER; note = 2'-O-methylcytidine-3'-phosphate
  modified_base 19: mod_base = OTHER; note = 2'-O-methylcytidine-3'-phosphorothioate
  modified_base 20: mod_base = OTHER; note = 2'-O-methyladenosine-3'-phosphorothioate
  modified_base 21: mod_base = OTHER; note = 2'-O-methyladenosine-3'-phosphate
caaaatgtttaactttaccaa

SEQ ID NO: 1516 - RNA, 21 nt, synthetic construct
  source 1..21: mol_type = other RNA
  modified_base 1: mod_base = OTHER; note = 2'-O-methyluridine-3'-phosphorothioate
  modified_base 2: mod_base = OTHER; note = 2'-O-methylcytidine-3'-phosphorothioate
  modified_base 3: mod_base = OTHER; note = 2'-O-methylcytidine-3'-phosphate
  modified_base 4: mod_base = OTHER; note = 2'-O-methylcytidine-3'-phosphate
  modified_base 5: mod_base = OTHER; note = 2'-O-methyladenosine-3'-phosphate
  modified_base 6: mod_base = OTHER; note 1-((2R,3R,4R,5R)-3-(docosyloxy)-4-hydroxy-5-(hydroxymethyl) tetrahydrofuran-2-yl)pyrimidine-2,4(1H,3H)-dione
  modified_base 7: mod_base = OTHER; note = 2'-fluorouridine-3'-phosphate
  modified_base 8: mod_base = OTHER; note = 2'-O-methylguanosine-3'-phosphate
  modified_base 9: mod_base = OTHER; note = 2'-fluorouridine-3'-phosphate
  modified_base 10: mod_base = OTHER; note = 2'-fluoroguanosine-3'-phosphate
  modified_base 11: mod_base = OTHER; note = 2'-fluorouridine-3'-phosphate
  modified_base 12: mod_base = OTHER; note = 2'-O-methyladenosine-3'-phosphate
  modified_base 13: mod_base = OTHER; note = 2'-O-methyladenosine-3'-phosphate
  modified_base 14: mod_base = OTHER; note = 2'-O-methyluridine-3'-phosphate
  modified_base 15: mod_base = OTHER; note = 2'-O-methyladenosine-3'-phosphate
  modified_base 16: mod_base = OTHER; note = 2'-O-methyluridine-3'-phosphate
  modified_base 17: mod_base = OTHER; note = 2'-O-methyluridine-3'-phosphate
  modified_base 18: mod_base = OTHER; note = 2'-O-methyluridine-3'-phosphate
  modified_base 19: mod_base = OTHER; note = 2'-O-methyladenosine-3'-phosphorothioate
  modified_base 20: mod_base = OTHER; note = 2'-O-methyluridine-3'-phosphorothioate
  modified_base 21: mod_base = OTHER; note = 2'-O-methyladenosine-3'-phosphate
tcccattgtgtaatatttata

SEQ ID NO: 1517 - RNA, 21 nt, synthetic construct
  source 1..21: mol_type = other RNA
  modified_base 1: mod_base = OTHER; note = 2'-O-methylguanosine-3'-phosphorothioate
  modified_base 2: mod_base = OTHER; note = 2'-O-methyluridine-3'-phosphorothioate
  modified_base 3: mod_base = OTHER; note = 2'-O-methyluridine-3'-phosphate
  modified_base 4: mod_base = OTHER; note = 2'-O-methylguanosine-3'-phosphate
  modified_base 5: mod_base = OTHER; note = 2'-O-methylguanosine-3'-phosphate
  modified_base 6: mod_base = OTHER; note 2-amino-9-((2R,3S,4S,5R)-3-(docosyloxy)-4-hydroxy-5-(hydrox ymethyl)tetrahydrofuran-2-yl)-1,9-dihydro-6H-purin-6-one
  modified_base 7: mod_base = OTHER; note = 2'-fluorouridine-3'-phosphate
  modified_base 8: mod_base = OTHER; note = 2'-O-methyladenosine-3'-phosphate
  modified_base 9: mod_base = OTHER; note = 2'-fluoroadenosine-3'-phosphate
  modified_base 10: mod_base = OTHER; note = 2'-fluoroadenosine-3'-phosphate
  modified_base 11: mod_base = OTHER; note = 2'-fluorouridine-3'-phosphate
  modified_base 12: mod_base = OTHER; note = 2'-O-methyladenosine-3'-phosphate
  modified_base 13: mod_base = OTHER; note = 2'-O-methyluridine-3'-phosphate
  modified_base 14: mod_base = OTHER; note = 2'-O-methylguanosine-3'-phosphate
  modified_base 15: mod_base = OTHER; note = 2'-O-methylcytidine-3'-phosphate
  modified_base 16: mod_base = OTHER; note = 2'-O-methyluridine-3'-phosphate
  modified_base 17: mod_base = OTHER; note = 2'-O-methyluridine-3'-phosphate
  modified_base 18: mod_base = OTHER; note = 2'-O-methyladenosine-3'-phosphate
  modified_base 19: mod_base = OTHER; note = 2'-O-methyluridine-3'-phosphorothioate
  modified_base 20: mod_base = OTHER; note = 2'-O-methyluridine-3'-phosphorothioate
  modified_base 21: mod_base = OTHER; note = 2'-O-methyladenosine-3'-phosphate
gttgggtaaatatgcttatta

SEQ ID NO: 1518 - RNA, 21 nt, synthetic construct
  source 1..21: mol_type = other RNA
  modified_base 1: mod_base = OTHER; note = 2'-O-methylcytidine-3'-phosphorothioate
  modified_base 2: mod_base = OTHER; note = 2'-O-methyladenosine-3'-phosphorothioate
  modified_base 3: mod_base = OTHER; note = 2'-O-methylguanosine-3'-phosphate
  modified_base 4: mod_base = OTHER; note = 2'-O-methylguanosine-3'-phosphate
  modified_base 5: mod_base = OTHER; note = 2'-O-methylguanosine-3'-phosphate
  modified_base 6: mod_base = OTHER; note 1-((2R,3R,4R,5R)-3-(docosyloxy)-4-hydroxy-5-(hydroxymethyl) tetrahydrofuran-2-yl)pyrimidine-2,4(1H,3H)-dione
  modified_base 7: mod_base = OTHER; note = 2'-fluorouridine-3'-phosphate
  modified_base 8: mod_base = OTHER; note = 2'-O-methylguanosine-3'-phosphate
  modified_base 9: mod_base = OTHER; note = 2'-fluorouridine-3'-phosphate
  modified_base 10: mod_base = OTHER; note = 2'-fluorocytidine-3'-phosphate
  modified_base 11: mod_base = OTHER; note = 2'-fluorouridine-3'-phosphate
  modified_base 12: mod_base = OTHER; note = 2'-O-methyluridine-3'-phosphate
  modified_base 13: mod_base = OTHER; note = 2'-O-methyluridine-3'-phosphate
  modified_base 14: mod_base = OTHER; note = 2'-O-methylguanosine-3'-phosphate
  modified_base 15: mod_base = OTHER; note = 2'-O-methyladenosine-3'-phosphate
  modified_base 16: mod_base = OTHER; note = 2'-O-methylguanosine-3'-phosphate
  modified_base 17: mod_base = OTHER; note = 2'-O-methyluridine-3'-phosphate
  modified_base 18: mod_base = OTHER; note = 2'-O-methylcytidine-3'-phosphate
  modified_base 19: mod_base = OTHER; note = 2'-O-methyluridine-3'-phosphorothioate
  modified_base 20: mod_base = OTHER; note = 2'-O-methylguanosine-3'-phosphorothioate
  modified_base 21: mod_base = OTHER; note = 2'-O-methyladenosine-3'-phosphate
cagggttgtctttgagtctga

SEQ ID NO: 1519 - RNA, 21 nt, synthetic construct
  source 1..21: mol_type = other RNA
  modified_base 1: mod_base = OTHER; note = 2'-O-methylguanosine-3'-phosphorothioate
  modified_base 2: mod_base = OTHER; note = 2'-O-methylcytidine-3'-phosphorothioate
  modified_base 3: mod_base = OTHER; note = 2'-O-methyluridine-3'-phosphate
  modified_base 4: mod_base = OTHER; note = 2'-O-methyladenosine-3'-phosphate
  modified_base 5: mod_base = OTHER; note = 2'-O-methyladenosine-3'-phosphate
  modified_base 6: mod_base = OTHER; note (2R,3S,4S,5R)-5-(6-amino-9H-purin-9-yl)-4-(docosyloxy)-2-(h ydroxymethyl)tetrahydrofuran-3-ol
  modified_base 7: mod_base = OTHER; note = 2'-fluoroadenosine-3'-phosphate
  modified_base 8: mod_base = OTHER; note = 2'-O-methyluridine-3'-phosphate
  modified_base 9: mod_base = OTHER; note = 2'-fluorocytidine-3'-phosphate
  modified_base 10: mod_base = OTHER; note = 2'-fluorocytidine-3'-phosphate
  modified_base 11: mod_base = OTHER; note = 2'-fluoroadenosine-3'-phosphate
  modified_base 12: mod_base = OTHER; note = 2'-O-methyladenosine-3'-phosphate
  modified_base 13: mod_base = OTHER; note = 2'-O-methylcytidine-3'-phosphate
  modified_base 14: mod_base = OTHER; note = 2'-O-methyluridine-3'-phosphate
  modified_base 15: mod_base = OTHER; note = 2'-O-methylguanosine-3'-phosphate
  modified_base 16: mod_base = OTHER; note = 2'-O-methylcytidine-3'-phosphate
  modified_base 17: mod_base = OTHER; note = 2'-O-methyladenosine-3'-phosphate
  modified_base 18: mod_base = OTHER; note = 2'-O-methyladenosine-3'-phosphate
  modified_base 19: mod_base = OTHER; note = 2'-O-methyluridine-3'-phosphorothioate
  modified_base 20: mod_base = OTHER; note = 2'-O-methyluridine-3'-phosphorothioate
  modified_base 21: mod_base = OTHER; note = 2'-O-methyladenosine-3'-phosphate
gctaaaatccaactgcaatta

SEQ ID NO: 1520 - RNA, 21 nt, synthetic construct
  source 1..21: mol_type = other RNA
  modified_base 1: mod_base = OTHER; note = 2'-O-methylcytidine-3'-phosphorothioate
  modified_base 2: mod_base = OTHER; note = 2'-O-methyladenosine-3'-phosphorothioate
  modified_base 3: mod_base = OTHER; note = 2'-O-methylguanosine-3'-phosphate
  modified_base 4: mod_base = OTHER; note = 2'-O-methylguanosine-3'-phosphate
  modified_base 5: mod_base = OTHER; note = 2'-O-methyladenosine-3'-phosphate
  modified_base 6: mod_base = OTHER; note 4-amino-1-((2R,3R,4R,5R)-3-(docosyloxy)-4-hydroxy-5-(hydrox ymethyl)tetrahydrofuran-2-yl)pyrimidin-2(1H)-one
  modified_base 7: mod_base = OTHER; note = 2'-fluorouridine-3'-phosphate
  modified_base 8: mod_base = OTHER; note = 2'-O-methylguanosine-3'-phosphate
  modified_base 9: mod_base = OTHER; note = 2'-fluoroadenosine-3'-phosphate
  modified_base 10: mod_base = OTHER; note = 2'-fluoroadenosine-3'-phosphate
  modified_base 11: mod_base = OTHER; note = 2'-fluoroguanosine-3'-phosphate
  modified_base 12: mod_base = OTHER; note = 2'-O-methyluridine-3'-phosphate
  modified_base 13: mod_base = OTHER; note = 2'-O-methylguanosine-3'-phosphate
  modified_base 14: mod_base = OTHER; note = 2'-O-methyluridine-3'-phosphate
  modified_base 15: mod_base = OTHER; note = 2'-O-methylguanosine-3'-phosphate
  modified_base 16: mod_base = OTHER; note = 2'-O-methyluridine-3'-phosphate
  modified_base 17: mod_base = OTHER; note = 2'-O-methyladenosine-3'-phosphate
  modified_base 18: mod_base = OTHER; note = 2'-O-methyluridine-3'-phosphate
  modified_base 19: mod_base = OTHER; note = 2'-O-methylguanosine-3'-phosphorothioate
  modified_base 20: mod_base = OTHER; note = 2'-O-methyluridine-3'-phosphorothioate
  modified_base 21: mod_base = OTHER; note = 2'-O-methyladenosine-3'-phosphate
caggactgaagtgtgtatgta

SEQ ID NO: 1521 - RNA, 21 nt, synthetic construct
  source 1..21: mol_type = other RNA
  modified_base 1: mod_base = OTHER; note = 2'-O-methylguanosine-3'-phosphorothioate
  modified_base 2: mod_base = OTHER; note = 2'-O-methyladenosine-3'-phosphorothioate
  modified_base 3: mod_base = OTHER; note = 2'-O-methylguanosine-3'-phosphate
  modified_base 4: mod_base = OTHER; note = 2'-O-methyluridine-3'-phosphate
  modified_base 5: mod_base = OTHER; note = 2'-O-methyladenosine-3'-phosphate
  modified_base 6: mod_base = OTHER; note 4-amino-1-((2R,3R,4R,5R)-3-(docosyloxy)-4-hydroxy-5-(hydrox ymethyl)tetrahydrofuran-2-yl)pyrimidin-2(1H)-one
  modified_base 7: mod_base = OTHER; note = 2'-fluorocytidine-3'-phosphate
  modified_base 8: mod_base = OTHER; note = 2'-O-methyladenosine-3'-phosphate
  modified_base 9: mod_base = OTHER; note = 2'-fluoroadenosine-3'-phosphate
  modified_base 10: mod_base = OTHER; note = 2'-fluorouridine-3'-phosphate
  modified_base 11: mod_base = OTHER; note = 2'-fluorouridine-3'-phosphate
  modified_base 12: mod_base = OTHER; note = 2'-O-methylguanosine-3'-phosphate
  modified_base 13: mod_base = OTHER; note = 2'-O-methylcytidine-3'-phosphate
  modified_base 14: mod_base = OTHER; note = 2'-O-methylcytidine-3'-phosphate
  modified_base 15: mod_base = OTHER; note = 2'-O-methyluridine-3'-phosphate
  modified_base 16: mod_base = OTHER; note = 2'-O-methyluridine-3'-phosphate
  modified_base 17: mod_base = OTHER; note = 2'-O-methyladenosine-3'-phosphate
  modified_base 18: mod_base = OTHER; note = 2'-O-methyluridine-3'-phosphate
  modified_base 19: mod_base = OTHER; note = 2'-O-methyluridine-3'-phosphorothioate
  modified_base 20: mod_base = OTHER; note = 2'-O-methyladenosine-3'-phosphorothioate
  modified_base 21: mod_base = OTHER; note = 2'-O-methyladenosine-3'-phosphate
gagtaccaattgccttattaa

SEQ ID NO: 1522 - RNA, 21 nt, synthetic construct
  source 1..21: mol_type = other RNA
  modified_base 1: mod_base = OTHER; note = 2'-O-methyladenosine-3'-phosphorothioate
  modified_base 2: mod_base = OTHER; note = 2'-O-methyladenosine-3'-phosphorothioate
  modified_base 3: mod_base = OTHER; note = 2'-O-methylguanosine-3'-phosphate
  modified_base 4: mod_base = OTHER; note = 2'-O-methyluridine-3'-phosphate
  modified_base 5: mod_base = OTHER; note = 2'-O-methylguanosine-3'-phosphate
  modified_base 6: mod_base = OTHER; note 4-amino-1-((2R,3R,4R,5R)-3-(docosyloxy)-4-hydroxy-5-(hydrox ymethyl)tetrahydrofuran-2-yl)pyrimidin-2(1H)-one
  modified_base 7: mod_base = OTHER; note = 2'-fluorocytidine-3'-phosphate
  modified_base 8: mod_base = OTHER; note = 2'-O-methyluridine-3'-phosphate
  modified_base 9: mod_base = OTHER; note = 2'-fluoroadenosine-3'-phosphate
  modified_base 10: mod_base = OTHER; note = 2'-fluorouridine-3'-phosphate
  modified_base 11: mod_base = OTHER; note = 2'-fluoroguanosine-3'-phosphate
  modified_base 12: mod_base = OTHER; note = 2'-O-methyluridine-3'-phosphate
  modified_base 13: mod_base = OTHER; note = 2'-O-methylguanosine-3'-phosphate
  modified_base 14: mod_base = OTHER; note = 2'-O-methyladenosine-3'-phosphate
  modified_base 15: mod_base = OTHER; note = 2'-O-methyladenosine-3'-phosphate
  modified_base 16: mod_base = OTHER; note = 2'-O-methylguanosine-3'-phosphate
  modified_base 17: mod_base = OTHER; note = 2'-O-methyluridine-3'-phosphate
  modified_base 18: mod_base = OTHER; note = 2'-O-methylguanosine-3'-phosphate
  modified_base 19: mod_base = OTHER; note = 2'-O-methyladenosine-3'-phosphorothioate
  modified_base 20: mod_base = OTHER; note = 2'-O-methyluridine-3'-phosphorothioate
  modified_base 21: mod_base = OTHER; note = 2'-O-methyladenosine-3'-phosphate
aagtgcctatgtgaagtgata

SEQ ID NO: 1523 - RNA, 21 nt, synthetic construct
  source 1..21: mol_type = other RNA
  modified_base 1: mod_base = OTHER; note = 2'-O-methyluridine-3'-phosphorothioate
  modified_base 2: mod_base = OTHER; note = 2'-O-methyladenosine-3'-phosphorothioate
  modified_base 3: mod_base = OTHER; note = 2'-O-methyladenosine-3'-phosphate
  modified_base 4: mod_base = OTHER; note = 2'-O-methylcytidine-3'-phosphate
  modified_base 5: mod_base = OTHER; note = 2'-O-methyladenosine-3'-phosphate
  modified_base 6: mod_base = OTHER; note (2R,3S,4S,5R)-5-(6-amino-9H-purin-9-yl)-4-(docosyloxy)-2-(h ydroxymethyl)tetrahydrofuran-3-ol
  modified_base 7: mod_base = OTHER; note = 2'-fluorouridine-3'-phosphate
  modified_base 8: mod_base = OTHER; note = 2'-O-methyladenosine-3'-phosphate
  modified_base 9: mod_base = OTHER; note = 2'-fluoroadenosine-3'-phosphate
  modified_base 10: mod_base = OTHER; note = 2'-fluorouridine-3'-phosphate
  modified_base 11: mod_base = OTHER; note = 2'-fluoroadenosine-3'-phosphate
  modified_base 12: mod_base = OTHER; note = 2'-O-methylguanosine-3'-phosphate
  modified_base 13: mod_base = OTHER; note = 2'-O-methyladenosine-3'-phosphate
  modified_base 14: mod_base = OTHER; note = 2'-O-methyladenosine-3'-phosphate
  modified_base 15: mod_base = OTHER; note = 2'-O-methylcytidine-3'-phosphate
  modified_base 16: mod_base = OTHER; note = 2'-O-methyluridine-3'-phosphate
  modified_base 17: mod_base = OTHER; note = 2'-O-methylguanosine-3'-phosphate
  modified_base 18: mod_base = OTHER; note = 2'-O-methylcytidine-3'-phosphate
  modified_base 19: mod_base = OTHER; note = 2'-O-methylcytidine-3'-phosphorothioate
  modified_base 20: mod_base = OTHER; note = 2'-O-methyladenosine-3'-phosphorothioate
  modified_base 21: mod_base = OTHER; note = 2'-O-methyladenosine-3'-phosphate
taacaataatagaactgccaa

SEQ ID NO: 1524 - RNA, 21 nt, synthetic construct
  source 1..21: mol_type = other RNA
  modified_base 1: mod_base = OTHER; note = 2'-O-methylguanosine-3'-phosphorothioate
  modified_base 2: mod_base = OTHER; note = 2'-O-methylcytidine-3'-phosphorothioate
  modified_base 3: mod_base = OTHER; note = 2'-O-methyluridine-3'-phosphate
  modified_base 4: mod_base = OTHER; note = 2'-O-methylguanosine-3'-phosphate
  modified_base 5: mod_base = OTHER; note = 2'-O-methyluridine-3'-phosphate
  modified_base 6: mod_base = OTHER; note 1-((2R,3R,4R,5R)-3-(docosyloxy)-4-hydroxy-5-(hydroxymethyl) tetrahydrofuran-2-yl)pyrimidine-2,4(1H,3H)-dione
  modified_base 7: mod_base = OTHER; note = 2'-fluorocytidine-3'-phosphate
  modified_base 8: mod_base = OTHER; note = 2'-O-methylcytidine-3'-phosphate
  modified_base 9: mod_base = OTHER; note = 2'-fluoroadenosine-3'-phosphate
  modified_base 10: mod_base = OTHER; note = 2'-fluorouridine-3'-phosphate
  modified_base 11: mod_base = OTHER; note = 2'-fluoroadenosine-3'-phosphate
  modified_base 12: mod_base = OTHER; note = 2'-O-methylcytidine-3'-phosphate
  modified_base 13: mod_base = OTHER; note = 2'-O-methylcytidine-3'-phosphate
  modified_base 14: mod_base = OTHER; note = 2'-O-methyladenosine-3'-phosphate
  modified_base 15: mod_base = OTHER; note = 2'-O-methyluridine-3'-phosphate
  modified_base 16: mod_base = OTHER; note = 2'-O-methyluridine-3'-phosphate
  modified_base 17: mod_base = OTHER; note = 2'-O-methylguanosine-3'-phosphate
  modified_base 18: mod_base = OTHER; note = 2'-O-methylcytidine-3'-phosphate
  modified_base 19: mod_base = OTHER; note = 2'-O-methyluridine-3'-phosphorothioate
  modified_base 20: mod_base = OTHER; note = 2'-O-methyluridine-3'-phosphorothioate
  modified_base 21: mod_base = OTHER; note = 2'-O-methyladenosine-3'-phosphate
gctgttccataccattgctta

SEQ ID NO: 1525 - RNA, 21 nt, synthetic construct
  source 1..21: mol_type = other RNA
  modified_base 1: mod_base = OTHER; note = 2'-O-methyluridine-3'-phosphorothioate
  modified_base 2: mod_base = OTHER; note = 2'-O-methyladenosine-3'-phosphorothioate
  modified_base 3: mod_base = OTHER; note = 2'-O-methylguanosine-3'-phosphate
  modified_base 4: mod_base = OTHER; note = 2'-O-methyladenosine-3'-phosphate
  modified_base 5: mod_base = OTHER; note = 2'-O-methylcytidine-3'-phosphate
  modified_base 6: mod_base = OTHER; note 1-((2R,3R,4R,5R)-3-(docosyloxy)-4-hydroxy-5-(hydroxymethyl) tetrahydrofuran-2-yl)pyrimidine-2,4(1H,3H)-dione
  modified_base 7: mod_base = OTHER; note = 2'-fluoroguanosine-3'-phosphate
  modified_base 8: mod_base = OTHER; note = 2'-O-methylguanosine-3'-phosphate
  modified_base 9: mod_base = OTHER; note = 2'-fluoroadenosine-3'-phosphate
  modified_base 10: mod_base = OTHER; note = 2'-fluoroguanosine-3'-phosphate
  modified_base 11: mod_base = OTHER; note = 2'-fluoroadenosine-3'-phosphate
  modified_base 12: mod_base = OTHER; note = 2'-O-methyladenosine-3'-phosphate
  modified_base 13: mod_base = OTHER; note = 2'-O-methylguanosine-3'-phosphate
  modified_base 14: mod_base = OTHER; note = 2'-O-methyladenosine-3'-phosphate
  modified_base 15: mod_base = OTHER; note = 2'-O-methyluridine-3'-phosphate
  modified_base 16: mod_base = OTHER; note = 2'-O-methyluridine-3'-phosphate
  modified_base 17: mod_base = OTHER; note = 2'-O-methyladenosine-3'-phosphate
  modified_base 18: mod_base = OTHER; note = 2'-O-methyluridine-3'-phosphate
  modified_base 19: mod_base = OTHER; note = 2'-O-methyluridine-3'-phosphorothioate
  modified_base 20: mod_base = OTHER; note = 2'-O-methylcytidine-3'-phosphorothioate
  modified_base 21: mod_base = OTHER; note = 2'-O-methyladenosine-3'-phosphate
tagactggagaagattattca

SEQ ID NO: 1526 - RNA, 21 nt, synthetic construct
  source 1..21: mol_type = other RNA
  modified_base 1: mod_base = OTHER; note = 2'-O-methyluridine-3'-phosphorothioate
  modified_base 2: mod_base = OTHER; note = 2'-O-methyluridine-3'-phosphorothioate
  modified_base 3: mod_base = OTHER; note = 2'-O-methylcytidine-3'-phosphate
  modified_base 4: mod_base = OTHER; note = 2'-O-methylcytidine-3'-phosphate
  modified_base 5: mod_base = OTHER; note = 2'-O-methyladenosine-3'-phosphate
  modified_base 6: mod_base = OTHER; note (2R,3S,4S,5R)-5-(6-amino-9H-purin-9-yl)-4-(docosyloxy)-2-(h ydroxymethyl)tetrahydrofuran-3-ol
  modified_base 7: mod_base = OTHER; note = 2'-fluorocytidine-3'-phosphate
  modified_base 8: mod_base = OTHER; note = 2'-O-methyladenosine-3'-phosphate
  modified_base 9: mod_base = OTHER; note = 2'-fluoroguanosine-3'-phosphate
  modified_base 10: mod_base = OTHER; note = 2'-fluorocytidine-3'-phosphate
  modified_base 11: mod_base = OTHER; note = 2'-fluoroadenosine-3'-phosphate
  modified_base 12: mod_base = OTHER; note = 2'-O-methyluridine-3'-phosphate
  modified_base 13: mod_base = OTHER; note = 2'-O-methylcytidine-3'-phosphate
  modified_base 14: mod_base = OTHER; note = 2'-O-methyladenosine-3'-phosphate
  modified_base 15: mod_base = OTHER; note = 2'-O-methylcytidine-3'-phosphate
  modified_base 16: mod_base = OTHER; note = 2'-O-methylcytidine-3'-phosphate
  modified_base 17: mod_base = OTHER; note = 2'-O-methyladenosine-3'-phosphate
  modified_base 18: mod_base = OTHER; note = 2'-O-methyladenosine-3'-phosphate
  modified_base 19: mod_base = OTHER; note = 2'-O-methyladenosine-3'-phosphorothioate
  modified_base 20: mod_base = OTHER; note = 2'-O-methyluridine-3'-phosphorothioate
  modified_base 21: mod_base = OTHER; note = 2'-O-methyladenosine-3'-phosphate
ttccaacagcatcaccaaata

SEQ ID NO: 1527 - RNA, 21 nt, synthetic construct
  source 1..21: mol_type = other RNA
  modified_base 1: mod_base = OTHER; note = 2'-O-methyluridine-3'-phosphorothioate
  modified_base 2: mod_base = OTHER; note = 2'-O-methyladenosine-3'-phosphorothioate
  modified_base 3: mod_base = OTHER; note = 2'-O-methyladenosine-3'-phosphate
  modified_base 4: mod_base = OTHER; note = 2'-O-methyluridine-3'-phosphate
  modified_base 5: mod_base = OTHER; note = 2'-O-methyluridine-3'-phosphate
  modified_base 6: mod_base = OTHER; note 2-amino-9-((2R,3S,4S,5R)-3-(docosyloxy)-4-hydroxy-5-(hydrox ymethyl)tetrahydrofuran-2-yl)-1,9-dihydro-6H-purin-6-one
  modified_base 7: mod_base = OTHER; note = 2'-fluoroguanosine-3'-phosphate
  modified_base 8: mod_base = OTHER; note = 2'-O-methyluridine-3'-phosphate
  modified_base 9: mod_base = OTHER; note = 2'-fluoroadenosine-3'-phosphate
  modified_base 10: mod_base = OTHER; note = 2'-fluorocytidine-3'-phosphate
  modified_base 11: mod_base = OTHER; note = 2'-fluoroadenosine-3'-phosphate
  modified_base 12: mod_base = OTHER; note = 2'-O-methylguanosine-3'-phosphate
  modified_base 13: mod_base = OTHER; note = 2'-O-methyladenosine-3'-phosphate
  modified_base 14: mod_base = OTHER; note = 2'-O-methyluridine-3'-phosphate
  modified_base 15: mod_base = OTHER; note = 2'-O-methyluridine-3'-phosphate
  modified_base 16: mod_base = OTHER; note = 2'-O-methylcytidine-3'-phosphate
  modified_base 17: mod_base = OTHER; note = 2'-O-methyluridine-3'-phosphate
  modified_base 18: mod_base = OTHER; note = 2'-O-methylguanosine-3'-phosphate
  modified_base 19: mod_base = OTHER; note = 2'-O-methyluridine-3'-phosphorothioate
  modified_base 20: mod_base = OTHER; note = 2'-O-methyluridine-3'-phosphorothioate
  modified_base 21: mod_base = OTHER; note = 2'-O-methyladenosine-3'-phosphate
taattggtacagattctgtta

SEQ ID NO: 1528 - RNA, 21 nt, synthetic construct
  source 1..21: mol_type = other RNA
  modified_base 1: mod_base = OTHER; note = 2'-O-methylguanosine-3'-phosphorothioate
  modified_base 2: mod_base = OTHER; note = 2'-O-methyladenosine-3'-phosphorothioate
  modified_base 3: mod_base = OTHER; note = 2'-O-methylguanosine-3'-phosphate
  modified_base 4: mod_base = OTHER; note = 2'-O-methyladenosine-3'-phosphate
  modified_base 5: mod_base = OTHER; note = 2'-O-methyladenosine-3'-phosphate
  modified_base 6: mod_base = OTHER; note (2R,3S,4S,5R)-5-(6-amino-9H-purin-9-yl)-4-(docosyloxy)-2-(h ydroxymethyl)tetrahydrofuran-3-ol
  modified_base 7: mod_base = OTHER; note = 2'-fluorocytidine-3'-phosphate
  modified_base 8: mod_base = OTHER; note = 2'-O-methyladenosine-3'-phosphate
  modified_base 9: mod_base = OTHER; note = 2'-fluorouridine-3'-phosphate
  modified_base 10: mod_base = OTHER; note = 2'-fluorouridine-3'-phosphate
  modified_base 11: mod_base = OTHER; note = 2'-fluoroadenosine-3'-phosphate
  modified_base 12: mod_base = OTHER; note = 2'-O-methyluridine-3'-phosphate
  modified_base 13: mod_base = OTHER; note = 2'-O-methyluridine-3'-phosphate
  modified_base 14: mod_base = OTHER; note = 2'-O-methyluridine-3'-phosphate
  modified_base 15: mod_base = OTHER; note = 2'-O-methylguanosine-3'-phosphate
  modified_base 16: mod_base = OTHER; note = 2'-O-methyluridine-3'-phosphate
  modified_base 17: mod_base = OTHER; note = 2'-O-methyluridine-3'-phosphate
  modified_base 18: mod_base = OTHER; note = 2'-O-methylguanosine-3'-phosphate
  modified_base 19: mod_base = OTHER; note = 2'-O-methyluridine-3'-phosphorothioate
  modified_base 20: mod_base = OTHER; note = 2'-O-methylcytidine-3'-phosphorothioate
  modified_base 21: mod_base = OTHER; note = 2'-O-methyladenosine-3'-phosphate
gagaaacattatttgttgtca

SEQ ID NO: 1529 - RNA, 21 nt, synthetic construct
  source 1..21: mol_type = other RNA
  modified_base 1: mod_base = OTHER; note = 2'-O-methylcytidine-3'-phosphorothioate
  modified_base 2: mod_base = OTHER; note = 2'-O-methylguanosine-3'-phosphorothioate
  modified_base 3: mod_base = OTHER; note = 2'-O-methylcytidine-3'-phosphate
  modified_base 4: mod_base = OTHER; note = 2'-O-methyluridine-3'-phosphate
  modified_base 5: mod_base = OTHER; note = 2'-O-methylcytidine-3'-phosphate
  modified_base 6: mod_base = OTHER; note 1-((2R,3R,4R,5R)-3-(docosyloxy)-4-hydroxy-5-(hydroxymethyl) tetrahydrofuran-2-yl)pyrimidine-2,4(1H,3H)-dione
  modified_base 7: mod_base = OTHER; note = 2'-fluorocytidine-3'-phosphate
  modified_base 8: mod_base = OTHER; note = 2'-O-methyladenosine-3'-phosphate
  modified_base 9: mod_base = OTHER; note = 2'-fluoroadenosine-3'-phosphate
  modified_base 10: mod_base = OTHER; note = 2'-fluorouridine-3'-phosphate
  modified_base 11: mod_base = OTHER; note = 2'-fluorouridine-3'-phosphate
  modified_base 12: mod_base = OTHER; note = 2'-O-methylguanosine-3'-phosphate
  modified_base 13: mod_base = OTHER; note = 2'-O-methylcytidine-3'-phosphate
  modified_base 14: mod_base = OTHER; note = 2'-O-methyluridine-3'-phosphate
  modified_base 15: mod_base = OTHER; note = 2'-O-methyladenosine-3'-phosphate
  modified_base 16: mod_base = OTHER; note = 2'-O-methylguanosine-3'-phosphate
  modified_base 17: mod_base = OTHER; note = 2'-O-methyluridine-3'-phosphate
  modified_base 18: mod_base = OTHER; note = 2'-O-methylguanosine-3'-phosphate
  modified_base 19: mod_base = OTHER; note = 2'-O-methylguanosine-3'-phosphorothioate
  modified_base 20: mod_base = OTHER; note = 2'-O-methyluridine-3'-phosphorothioate
  modified_base 21: mod_base = OTHER; note = 2'-O-methyladenosine-3'-phosphate
cgctctcaattgctagtggta

SEQ ID NO: 1530 - RNA, 21 nt, synthetic construct
  source 1..21: mol_type = other RNA
  modified_base 1: mod_base = OTHER; note = 2'-O-methylcytidine-3'-phosphorothioate
  modified_base 2: mod_base = OTHER; note = 2'-O-methylguanosine-3'-phosphorothioate
  modified_base 3: mod_base = OTHER; note = 2'-O-methylguanosine-3'-phosphate
  modified_base 4: mod_base = OTHER; note = 2'-O-methyluridine-3'-phosphate
  modified_base 5: mod_base = OTHER; note = 2'-O-methyladenosine-3'-phosphate
  modified_base 6: mod_base = OTHER; note 1-((2R,3R,4R,5R)-3-(docosyloxy)-4-hydroxy-5-(hydroxymethyl) tetrahydrofuran-2-yl)pyrimidine-2,4(1H,3H)-dione
  modified_base 7: mod_base = OTHER; note = 2'-fluorocytidine-3'-phosphate
  modified_base 8: mod_base = OTHER; note = 2'-O-methyladenosine-3'-phosphate
  modified_base 9: mod_base = OTHER; note = 2'-fluoroguanosine-3'-phosphate
  modified_base 10: mod_base = OTHER; note = 2'-fluoroadenosine-3'-phosphate
  modified_base 11: mod_base = OTHER; note = 2'-fluoroadenosine-3'-phosphate
  modified_base 12: mod_base = OTHER; note = 2'-O-methyladenosine-3'-phosphate
  modified_base 13: mod_base = OTHER; note = 2'-O-methylcytidine-3'-phosphate
  modified_base 14: mod_base = OTHER; note = 2'-O-methyladenosine-3'-phosphate
  modified_base 15: mod_base = OTHER; note = 2'-O-methylguanosine-3'-phosphate
  modified_base 16: mod_base = OTHER; note = 2'-O-methylcytidine-3'-phosphate
  modified_base 17: mod_base = OTHER; note = 2'-O-methyladenosine-3'-phosphate
  modified_base 18: mod_base = OTHER; note = 2'-O-methyladenosine-3'-phosphate
  modified_base 19: mod_base = OTHER; note = 2'-O-methyladenosine-3'-phosphorothioate
  modified_base 20: mod_base = OTHER; note = 2'-O-methyluridine-3'-phosphorothioate
  modified_base 21: mod_base = OTHER; note = 2'-O-methyladenosine-3'-phosphate
cggtatcagaaacagcaaata

SEQ ID NO: 1531 - RNA, 21 nt, synthetic construct
  source 1..21: mol_type = other RNA
  modified_base 1: mod_base = OTHER; note = 2'-O-methylcytidine-3'-phosphorothioate
  modified_base 2: mod_base = OTHER; note = 2'-O-methylcytidine-3'-phosphorothioate
  modified_base 3: mod_base = OTHER; note = 2'-O-methylcytidine-3'-phosphate
  modified_base 4: mod_base = OTHER; note = 2'-O-methyladenosine-3'-phosphate
  modified_base 5: mod_base = OTHER; note = 2'-O-methylguanosine-3'-phosphate
  modified_base 6: mod_base = OTHER; note (2R,3S,4S,5R)-5-(6-amino-9H-purin-9-yl)-4-(docosyloxy)-2-(h ydroxymethyl)tetrahydrofuran-3-ol
  modified_base 7: mod_base = OTHER; note = 2'-fluorocytidine-3'-phosphate
  modified_base 8: mod_base = OTHER; note = 2'-O-methyladenosine-3'-phosphate
  modified_base 9: mod_base = OTHER; note = 2'-fluorouridine-3'-phosphate
  modified_base 10: mod_base = OTHER; note = 2'-fluoroadenosine-3'-phosphate
  modified_base 11: mod_base = OTHER; note = 2'-fluoroadenosine-3'-phosphate
  modified_base 12: mod_base = OTHER; note = 2'-O-methyluridine-3'-phosphate
  modified_base 13: mod_base = OTHER; note = 2'-O-methyluridine-3'-phosphate
  modified_base 14: mod_base = OTHER; note = 2'-O-methyluridine-3'-phosphate
  modified_base 15: mod_base = OTHER; note = 2'-O-methyluridine-3'-phosphate
  modified_base 16: mod_base = OTHER; note = 2'-O-methyladenosine-3'-phosphate
  modified_base 17: mod_base = OTHER; note = 2'-O-methyluridine-3'-phosphate
  modified_base 18: mod_base = OTHER; note = 2'-O-methyladenosine-3'-phosphate
  modified_base 19: mod_base = OTHER; note = 2'-O-methyluridine-3'-phosphorothioate
  modified_base 20: mod_base = OTHER; note = 2'-O-methyluridine-3'-phosphorothioate
  modified_base 21: mod_base = OTHER; note = 2'-O-methyladenosine-3'-phosphate
cccagacataattttatatta

SEQ ID NO: 1532 - RNA, 21 nt, synthetic construct
  source 1..21: mol_type = other RNA
  modified_base 1: mod_base = OTHER; note = 2'-O-methyluridine-3'-phosphorothioate
  modified_base 2: mod_base = OTHER; note = 2'-O-methyladenosine-3'-phosphorothioate
  modified_base 3: mod_base = OTHER; note = 2'-O-methylguanosine-3'-phosphate
  modified_base 4: mod_base = OTHER; note = 2'-O-methyluridine-3'-phosphate
  modified_base 5: mod_base = OTHER; note = 2'-O-methyladenosine-3'-phosphate
  modified_base 6: mod_base = OTHER; note 4-amino-1-((2R,3R,4R,5R)-3-(docosyloxy)-4-hydroxy-5-(hydrox ymethyl)tetrahydrofuran-2-yl)pyrimidin-2(1H)-one
  modified_base 7: mod_base = OTHER; note = 2'-fluoroadenosine-3'-phosphate
  modified_base 8: mod_base = OTHER; note = 2'-O-methyluridine-3'-phosphate
  modified_base 9: mod_base = OTHER; note = 2'-fluorouridine-3'-phosphate
  modified_base 10: mod_base = OTHER; note = 2'-fluorouridine-3'-phosphate
  modified_base 11: mod_base = OTHER; note = 2'-fluorouridine-3'-phosphate
  modified_base 12: mod_base = OTHER; note = 2'-O-methylguanosine-3'-phosphate
  modified_base 13: mod_base = OTHER; note = 2'-O-methyladenosine-3'-phosphate
  modified_base 14: mod_base = OTHER; note = 2'-O-methylguanosine-3'-phosphate
  modified_base 15: mod_base = OTHER; note = 2'-O-methylguanosine-3'-phosphate
  modified_base 16: mod_base = OTHER; note = 2'-O-methyluridine-3'-phosphate
  modified_base 17: mod_base = OTHER; note = 2'-O-methyladenosine-3'-phosphate
  modified_base 18: mod_base = OTHER; note = 2'-O-methyluridine-3'-phosphate
  modified_base 19: mod_base = OTHER; note = 2'-O-methyluridine-3'-phosphorothioate
  modified_base 20: mod_base = OTHER; note = 2'-O-methyluridine-3'-phosphorothioate
  modified_base 21: mod_base = OTHER; note = 2'-O-methyladenosine-3'-phosphate
tagtacattttgaggtattta

SEQ ID NO: 1533 - RNA, 21 nt, synthetic construct
  source 1..21: mol_type = other RNA
  modified_base 1: mod_base = OTHER; note = 2'-O-methyladenosine-3'-phosphorothioate
  modified_base 2: mod_base = OTHER; note = 2'-O-methyladenosine-3'-phosphorothioate
  modified_base 3: mod_base = OTHER; note = 2'-O-methyladenosine-3'-phosphate
  modified_base 4: mod_base = OTHER; note = 2'-O-methyluridine-3'-phosphate
  modified_base 5: mod_base = OTHER; note = 2'-O-methylguanosine-3'-phosphate
  modified_base 6: mod_base = OTHER; note 4-amino-1-((2R,3R,4R,5R)-3-(docosyloxy)-4-hydroxy-5-(hydrox ymethyl)tetrahydrofuran-2-yl)pyrimidin-2(1H)-one
  modified_base 7: mod_base = OTHER; note = 2'-fluorouridine-3'-phosphate
  modified_base 8: mod_base = OTHER; note = 2'-O-methyladenosine-3'-phosphate
  modified_base 9: mod_base = OTHER; note = 2'-fluorouridine-3'-phosphate
  modified_base 10: mod_base = OTHER; note = 2'-fluorouridine-3'-phosphate
  modified_base 11: mod_base = OTHER; note = 2'-fluoroguanosine-3'-phosphate
  modified_base 12: mod_base = OTHER; note = 2'-O-methyladenosine-3'-phosphate
  modified_base 13: mod_base = OTHER; note = 2'-O-methyluridine-3'-phosphate
  modified_base 14: mod_base = OTHER; note = 2'-O-methyladenosine-3'-phosphate
  modified_base 15: mod_base = OTHER; note = 2'-O-methyladenosine-3'-phosphate
  modified_base 16: mod_base = OTHER; note = 2'-O-methylcytidine-3'-phosphate
  modified_base 17: mod_base = OTHER; note = 2'-O-methyladenosine-3'-phosphate
  modified_base 18: mod_base = OTHER; note = 2'-O-methylguanosine-3'-phosphate
  modified_base 19: mod_base = OTHER; note = 2'-O-methyluridine-3'-phosphorothioate
  modified_base 20: mod_base = OTHER; note = 2'-O-methyladenosine-3'-phosphorothioate
  modified_base 21: mod_base = OTHER; note = 2'-O-methyladenosine-3'-phosphate
aaatgctattgataacagtaa

SEQ ID NO: 1534 - RNA, 21 nt, synthetic construct
  source 1..21: mol_type = other RNA
  modified_base 1: mod_base = OTHER; note = 2'-O-methyluridine-3'-phosphorothioate
  modified_base 2: mod_base = OTHER; note = 2'-O-methyladenosine-3'-phosphorothioate
  modified_base 3: mod_base = OTHER; note = 2'-O-methylguanosine-3'-phosphate
  modified_base 4: mod_base = OTHER; note = 2'-O-methylcytidine-3'-phosphate
  modified_base 5: mod_base = OTHER; note = 2'-O-methyluridine-3'-phosphate
  modified_base 6: mod_base = OTHER; note 2-amino-9-((2R,3S,4S,5R)-3-(docosyloxy)-4-hydroxy-5-(hydrox ymethyl)tetrahydrofuran-2-yl)-1,9-dihydro-6H-purin-6-one
  modified_base 7: mod_base = OTHER; note = 2'-fluoroadenosine-3'-phosphate
  modified_base 8: mod_base = OTHER; note = 2'-O-methyladenosine-3'-phosphate
  modified_base 9: mod_base = OTHER; note = 2'-fluorouridine-3'-phosphate
  modified_base 10: mod_base = OTHER; note = 2'-fluorouridine-3'-phosphate
  modified_base 11: mod_base = OTHER; note = 2'-fluorouridine-3'-phosphate
  modified_base 12: mod_base = OTHER; note = 2'-O-methylguanosine-3'-phosphate
  modified_base 13: mod_base = OTHER; note = 2'-O-methylguanosine-3'-phosphate
  modified_base 14: mod_base = OTHER; note = 2'-O-methylguanosine-3'-phosphate
  modified_base 15: mod_base = OTHER; note = 2'-O-methyladenosine-3'-phosphate
  modified_base 16: mod_base = OTHER; note = 2'-O-methylcytidine-3'-phosphate
  modified_base 17: mod_base = OTHER; note = 2'-O-methyluridine-3'-phosphate
  modified_base 18: mod_base = OTHER; note = 2'-O-methyladenosine-3'-phosphate
  modified_base 19: mod_base = OTHER; note = 2'-O-methyluridine-3'-phosphorothioate
  modified_base 20: mod_base = OTHER; note = 2'-O-methylguanosine-3'-phosphorothioate
  modified_base 21: mod_base = OTHER; note = 2'-O-methyladenosine-3'-phosphate
tagctgaatttgggactatga

SEQ ID NO: 1535 - RNA, 21 nt, synthetic construct
  source 1..21: mol_type = other RNA
  modified_base 1: mod_base = OTHER; note = 2'-O-methyladenosine-3'-phosphorothioate
  modified_base 2: mod_base = OTHER; note = 2'-O-methyluridine-3'-phosphorothioate
  modified_base 3: mod_base = OTHER; note = 2'-O-methyluridine-3'-phosphate
  modified_base 4: mod_base = OTHER; note = 2'-O-methylguanosine-3'-phosphate
  modified_base 5: mod_base = OTHER; note = 2'-O-methyluridine-3'-phosphate
  modified_base 6: mod_base = OTHER; note 2-amino-9-((2R,3S,4S,5R)-3-(docosyloxy)-4-hydroxy-5-(hydrox ymethyl)tetrahydrofuran-2-yl)-1,9-dihydro-6H-purin-6-one
  modified_base 7: mod_base = OTHER; note = 2'-fluoroguanosine-3'-phosphate
  modified_base 8: mod_base = OTHER; note = 2'-O-methyluridine-3'-phosphate
  modified_base 9: mod_base = OTHER; note = 2'-fluorouridine-3'-phosphate
  modified_base 10: mod_base = OTHER; note = 2'-fluorouridine-3'-phosphate
  modified_base 11: mod_base = OTHER; note = 2'-fluorouridine-3'-phosphate
  modified_base 12: mod_base = OTHER; note = 2'-O-methylcytidine-3'-phosphate
  modified_base 13: mod_base = OTHER; note = 2'-O-methyladenosine-3'-phosphate
  modified_base 14: mod_base = OTHER; note = 2'-O-methyladenosine-3'-phosphate
  modified_base 15: mod_base = OTHER; note = 2'-O-methyladenosine-3'-phosphate
  modified_base 16: mod_base = OTHER; note = 2'-O-methylguanosine-3'-phosphate
  modified_base 17: mod_base = OTHER; note = 2'-O-methyladenosine-3'-phosphate
  modified_base 18: mod_base = OTHER; note = 2'-O-methyluridine-3'-phosphate
  modified_base 19: mod_base = OTHER; note = 2'-O-methyladenosine-3'-phosphorothioate
  modified_base 20: mod_base = OTHER; note = 2'-O-methyluridine-3'-phosphorothioate
  modified_base 21: mod_base = OTHER; note = 2'-O-methyladenosine-3'-phosphate
attgtggttttcaaagatata

SEQ ID NO: 1536 - RNA, 21 nt, synthetic construct
  source 1..21: mol_type = other RNA
  modified_base 1: mod_base = OTHER; note = 2'-O-methylcytidine-3'-phosphorothioate
  modified_base 2: mod_base = OTHER; note = 2'-O-methylcytidine-3'-phosphorothioate
  modified_base 3: mod_base = OTHER; note = 2'-O-methyluridine-3'-phosphate
  modified_base 4: mod_base = OTHER; note = 2'-O-methylguanosine-3'-phosphate
  modified_base 5: mod_base = OTHER; note = 2'-O-methylguanosine-3'-phosphate
  modified_base 6: mod_base = OTHER; note 1-((2R,3R,4R,5R)-3-(docosyloxy)-4-hydroxy-5-(hydroxymethyl) tetrahydrofuran-2-yl)pyrimidine-2,4(1H,3H)-dione
  modified_base 7: mod_base = OTHER; note = 2'-fluorouridine-3'-phosphate
  modified_base 8: mod_base = OTHER; note = 2'-O-methylguanosine-3'-phosphate
  modified_base 9: mod_base = OTHER; note = 2'-fluorocytidine-3'-phosphate
  modified_base 10: mod_base = OTHER; note = 2'-fluoroadenosine-3'-phosphate
  modified_base 11: mod_base = OTHER; note = 2'-fluoroguanosine-3'-phosphate
  modified_base 12: mod_base = OTHER; note = 2'-O-methyluridine-3'-phosphate
  modified_base 13: mod_base = OTHER; note = 2'-O-methyladenosine-3'-phosphate
  modified_base 14: mod_base = OTHER; note = 2'-O-methyluridine-3'-phosphate
  modified_base 15: mod_base = OTHER; note = 2'-O-methylcytidine-3'-phosphate
  modified_base 16: mod_base = OTHER; note = 2'-O-methyluridine-3'-phosphate
  modified_base 17: mod_base = OTHER; note = 2'-O-methylguanosine-3'-phosphate
  modified_base 18: mod_base = OTHER; note = 2'-O-methyladenosine-3'-phosphate
  modified_base 19: mod_base = OTHER; note = 2'-O-methyladenosine-3'-phosphorothioate
  modified_base 20: mod_base = OTHER; note = 2'-O-methyladenosine-3'-phosphorothioate
  modified_base 21: mod_base = OTHER; note = 2'-O-methyladenosine-3'-phosphate
cctggttgcagtatctgaaaa

SEQ ID NO: 1537 - RNA, 21 nt, synthetic construct
  source 1..21: mol_type = other RNA
  modified_base 1: mod_base = OTHER; note = 2'-O-methyluridine-3'-phosphorothioate
  modified_base 2: mod_base = OTHER; note = 2'-O-methyladenosine-3'-phosphorothioate
  modified_base 3: mod_base = OTHER; note = 2'-O-methylguanosine-3'-phosphate
  modified_base 4: mod_base = OTHER; note = 2'-O-methyladenosine-3'-phosphate
  modified_base 5: mod_base = OTHER; note = 2'-O-methyladenosine-3'-phosphate
  modified_base 6: mod_base = OTHER; note 1-((2R,3R,4R,5R)-3-(docosyloxy)-4-hydroxy-5-(hydroxymethyl) tetrahydrofuran-2-yl)pyrimidine-2,4(1H,3H)-dione
  modified_base 7: mod_base = OTHER; note = 2'-fluoroguanosine-3'-phosphate
  modified_base 8: mod_base = OTHER; note = 2'-O-methylguanosine-3'-phosphate
  modified_base 9: mod_base = OTHER; note = 2'-fluorouridine-3'-phosphate
  modified_base 10: mod_base = OTHER; note = 2'-fluorouridine-3'-phosphate
  modified_base 11: mod_base = OTHER; note = 2'-fluoroguanosine-3'-phosphate
  modified_base 12: mod_base = OTHER; note = 2'-O-methyluridine-3'-phosphate
  modified_base 13: mod_base = OTHER; note = 2'-O-methyluridine-3'-phosphate
  modified_base 14: mod_base = OTHER; note = 2'-O-methylguanosine-3'-phosphate
  modified_base 15: mod_base = OTHER; note = 2'-O-methyladenosine-3'-phosphate
  modified_base 16: mod_base = OTHER; note = 2'-O-methylguanosine-3'-phosphate
  modified_base 17: mod_base = OTHER; note = 2'-O-methylcytidine-3'-phosphate
  modified_base 18: mod_base = OTHER; note = 2'-O-methyluridine-3'-phosphate
  modified_base 19: mod_base = OTHER; note = 2'-O-methyladenosine-3'-phosphorothioate
  modified_base 20: mod_base = OTHER; note = 2'-O-methyladenosine-3'-phosphorothioate
  modified_base 21: mod_base = OTHER; note = 2'-O-methyladenosine-3'-phosphate
tagaatggttgttgagctaaa

SEQ ID NO: 1538 - RNA, 21 nt, synthetic construct
  source 1..21: mol_type = other RNA
  modified_base 1: mod_base = OTHER; note = 2'-O-methylcytidine-3'-phosphorothioate
  modified_base 2: mod_base = OTHER; note = 2'-O-methyluridine-3'-phosphorothioate
  modified_base 3: mod_base = OTHER; note = 2'-O-methylguanosine-3'-phosphate
  modified_base 4: mod_base = OTHER; note = 2'-O-methylguanosine-3'-phosphate
  modified_base 5: mod_base = OTHER; note = 2'-O-methylcytidine-3'-phosphate
  modified_base 6: mod_base = OTHER; note 4-amino-1-((2R,3R,4R,5R)-3-(docosyloxy)-4-hydroxy-5-(hydrox ymethyl)tetrahydrofuran-2-yl)pyrimidin-2(1H)-one
  modified_base 7: mod_base = OTHER; note = 2'-fluoroadenosine-3'-phosphate
  modified_base 8: mod_base = OTHER; note = 2'-O-methyluridine-3'-phosphate
  modified_base 9: mod_base = OTHER; note = 2'-fluorocytidine-3'-phosphate
  modified_base 10: mod_base = OTHER; note = 2'-fluoroadenosine-3'-phosphate
  modified_base 11: mod_base = OTHER; note = 2'-fluorouridine-3'-phosphate
  modified_base 12: mod_base = OTHER; note = 2'-O-methyluridine-3'-phosphate
  modified_base 13: mod_base = OTHER; note = 2'-O-methyladenosine-3'-phosphate
  modified_base 14: mod_base = OTHER; note = 2'-O-methyluridine-3'-phosphate
  modified_base 15: mod_base = OTHER; note = 2'-O-methyluridine-3'-phosphate
  modified_base 16: mod_base = OTHER; note = 2'-O-methyladenosine-3'-phosphate
  modified_base 17: mod_base = OTHER; note = 2'-O-methylcytidine-3'-phosphate
  modified_base 18: mod_base = OTHER; note = 2'-O-methyluridine-3'-phosphate
  modified_base 19: mod_base = OTHER; note = 2'-O-methylguanosine-3'-phosphorothioate
  modified_base 20: mod_base = OTHER; note = 2'-O-methyluridine-3'-phosphorothioate
  modified_base 21: mod_base = OTHER; note = 2'-O-methyladenosine-3'-phosphate
ctggccatcattattactgta

SEQ ID NO: 1539 - RNA, 21 nt, synthetic construct
  source 1..21: mol_type = other RNA
  modified_base 1: mod_base = OTHER; note = 2'-O-methyluridine-3'-phosphorothioate
  modified_base 2: mod_base = OTHER; note = 2'-O-methyluridine-3'-phosphorothioate
  modified_base 3: mod_base = OTHER; note = 2'-O-methylguanosine-3'-phosphate
  modified_base 4: mod_base = OTHER; note = 2'-O-methyladenosine-3'-phosphate
  modified_base 5: mod_base = OTHER; note = 2'-O-methylcytidine-3'-phosphate
  modified_base 6: mod_base = OTHER; note (2R,3S,4S,5R)-5-(6-amino-9H-purin-9-yl)-4-(docosyloxy)-2-(h ydroxymethyl)tetrahydrofuran-3-ol
  modified_base 7: mod_base = OTHER; note = 2'-fluoroguanosine-3'-phosphate
  modified_base 8: mod_base = OTHER; note = 2'-O-methyladenosine-3'-phosphate
  modified_base 9: mod_base = OTHER; note = 2'-fluorouridine-3'-phosphate
  modified_base 10: mod_base = OTHER; note = 2'-fluoroadenosine-3'-phosphate
  modified_base 11: mod_base = OTHER; note = 2'-fluoroadenosine-3'-phosphate
  modified_base 12: mod_base = OTHER; note = 2'-O-methyladenosine-3'-phosphate
  modified_base 13: mod_base = OTHER; note = 2'-O-methyladenosine-3'-phosphate
  modified_base 14: mod_base = OTHER; note = 2'-O-methyluridine-3'-phosphate
  modified_base 15: mod_base = OTHER; note = 2'-O-methyladenosine-3'-phosphate
  modified_base 16: mod_base = OTHER; note = 2'-O-methylcytidine-3'-phosphate
  modified_base 17: mod_base = OTHER; note = 2'-O-methylguanosine-3'-phosphate
  modified_base 18: mod_base = OTHER; note = 2'-O-methyladenosine-3'-phosphate
  modified_base 19: mod_base = OTHER; note = 2'-O-methyladenosine-3'-phosphorothioate
  modified_base 20: mod_base = OTHER; note = 2'-O-methylguanosine-3'-phosphorothioate
  modified_base 21: mod_base = OTHER; note = 2'-O-methyladenosine-3'-phosphate
ttgacagataaaatacgaaga

SEQ ID NO: 1540 - RNA, 21 nt, synthetic construct
  source 1..21: mol_type = other RNA
  modified_base 1: mod_base = OTHER; note = 2'-O-methyluridine-3'-phosphorothioate
  modified_base 2: mod_base = OTHER; note = 2'-O-methylcytidine-3'-phosphorothioate
  modified_base 3: mod_base = OTHER; note = 2'-O-methyladenosine-3'-phosphate
  modified_base 4: mod_base = OTHER; note = 2'-O-methylcytidine-3'-phosphate
  modified_base 5: mod_base = OTHER; note = 2'-O-methyladenosine-3'-phosphate
  modified_base 6: mod_base = OTHER; note (2R,3S,4S,5R)-5-(6-amino-9H-purin-9-yl)-4-(docosyloxy)-2-(h ydroxymethyl)tetrahydrofuran-3-ol
  modified_base 7: mod_base = OTHER; note = 2'-fluoroadenosine-3'-phosphate
  modified_base 8: mod_base = OTHER; note = 2'-O-methylcytidine-3'-phosphate
  modified_base 9: mod_base = OTHER; note = 2'-fluoroadenosine-3'-phosphate
  modified_base 10: mod_base = OTHER; note = 2'-fluorocytidine-3'-phosphate
  modified_base 11: mod_base = OTHER; note = 2'-fluoroadenosine-3'-phosphate
  modified_base 12: mod_base = OTHER; note = 2'-O-methyluridine-3'-phosphate
  modified_base 13: mod_base = OTHER; note = 2'-O-methylcytidine-3'-phosphate
  modified_base 14: mod_base = OTHER; note = 2'-O-methyladenosine-3'-phosphate
  modified_base 15: mod_base = OTHER; note = 2'-O-methyluridine-3'-phosphate
  modified_base 16: mod_base = OTHER; note = 2'-O-methyluridine-3'-phosphate
  modified_base 17: mod_base = OTHER; note = 2'-O-methyladenosine-3'-phosphate
  modified_base 18: mod_base = OTHER; note = 2'-O-methylcytidine-3'-phosphate
  modified_base 19: mod_base = OTHER; note = 2'-O-methyladenosine-3'-phosphorothioate
  modified_base 20: mod_base = OTHER; note = 2'-O-methyladenosine-3'-phosphorothioate
  modified_base 21: mod_base = OTHER; note = 2'-O-methyladenosine-3'-phosphate
tcacaaacacatcattacaaa

SEQ ID NO: 1541 - RNA, 21 nt, synthetic construct
  source 1..21: mol_type = other RNA
  modified_base 1: mod_base = OTHER; note = 2'-O-methylcytidine-3'-phosphorothioate
  modified_base 2: mod_base = OTHER; note = 2'-O-methylcytidine-3'-phosphorothioate
  modified_base 3: mod_base = OTHER; note = 2'-O-methyladenosine-3'-phosphate
  modified_base 4: mod_base = OTHER; note = 2'-O-methyluridine-3'-phosphate
  modified_base 5: mod_base = OTHER; note = 2'-O-methylguanosine-3'-phosphate
  modified_base 6: mod_base = OTHER; note (2R,3S,4S,5R)-5-(6-amino-9H-purin-9-yl)-4-(docosyloxy)-2-(h ydroxymethyl)tetrahydrofuran-3-ol
  modified_base 7: mod_base = OTHER; note = 2'-fluorouridine-3'-phosphate
  modified_base 8: mod_base = OTHER; note = 2'-O-methyluridine-3'-phosphate
  modified_base 9: mod_base = OTHER; note = 2'-fluoroguanosine-3'-phosphate
  modified_base 10: mod_base = OTHER; note = 2'-fluorouridine-3'-phosphate
  modified_base 11: mod_base = OTHER; note = 2'-fluoroadenosine-3'-phosphate
  modified_base 12: mod_base = OTHER; note = 2'-O-methyluridine-3'-phosphate
  modified_base 13: mod_base = OTHER; note = 2'-O-methylguanosine-3'-phosphate
  modified_base 14: mod_base = OTHER; note = 2'-O-methyladenosine-3'-phosphate
  modified_base 15: mod_base = OTHER; note = 2'-O-methyladenosine-3'-phosphate
  modified_base 16: mod_base = OTHER; note = 2'-O-methyladenosine-3'-phosphate
  modified_base 17: mod_base = OTHER; note = 2'-O-methyladenosine-3'-phosphate
  modified_base 18: mod_base = OTHER; note = 2'-O-methyluridine-3'-phosphate
  modified_base 19: mod_base = OTHER; note = 2'-O-methyladenosine-3'-phosphorothioate
  modified_base 20: mod_base = OTHER; note = 2'-O-methylguanosine-3'-phosphorothioate
  modified_base 21: mod_base = OTHER; note = 2'-O-methyladenosine-3'-phosphate
ccatgattgtatgaaaataga

SEQ ID NO: 1542 - RNA, 21 nt, synthetic construct
  source 1..21: mol_type = other RNA
  modified_base 1: mod_base = OTHER; note = 2'-O-methylcytidine-3'-phosphorothioate
  modified_base 2: mod_base = OTHER; note = 2'-O-methyladenosine-3'-phosphorothioate
  modified_base 3: mod_base = OTHER; note = 2'-O-methylcytidine-3'-phosphate
  modified_base 4: mod_base = OTHER; note = 2'-O-methyladenosine-3'-phosphate
  modified_base 5: mod_base = OTHER; note = 2'-O-methylguanosine-3'-phosphate
  modified_base 6: mod_base = OTHER; note (2R,3S,4S,5R)-5-(6-amino-9H-purin-9-yl)-4-(docosyloxy)-2-(h ydroxymethyl)tetrahydrofuran-3-ol
  modified_base 7: mod_base = OTHER; note = 2'-fluoroguanosine-3'-phosphate
  modified_base 8: mod_base = OTHER; note = 2'-O-methyluridine-3'-phosphate
  modified_base 9: mod_base = OTHER; note = 2'-fluoroadenosine-3'-phosphate
  modified_base 10: mod_base = OTHER; note = 2'-fluoroadenosine-3'-phosphate
  modified_base 11: mod_base = OTHER; note = 2'-fluorouridine-3'-phosphate
  modified_base 12: mod_base = OTHER; note = 2'-O-methylguanosine-3'-phosphate
  modified_base 13: mod_base = OTHER; note = 2'-O-methyladenosine-3'-phosphate
  modified_base 14: mod_base = OTHER; note = 2'-O-methyladenosine-3'-phosphate
  modified_base 15: mod_base = OTHER; note = 2'-O-methyluridine-3'-phosphate
  modified_base 16: mod_base = OTHER; note = 2'-O-methyladenosine-3'-phosphate
  modified_base 17: mod_base = OTHER; note = 2'-O-methyluridine-3'-phosphate
  modified_base 18: mod_base = OTHER; note = 2'-O-methyluridine-3'-phosphate
  modified_base 19: mod_base = OTHER; note = 2'-O-methyluridine-3'-phosphorothioate
  modified_base 20: mod_base = OTHER; note = 2'-O-methyladenosine-3'-phosphorothioate
  modified_base 21: mod_base = OTHER; note = 2'-O-methyladenosine-3'-phosphate
cacagagtaatgaatatttaa

SEQ ID NO: 1543 - RNA, 21 nt, synthetic construct
  source 1..21: mol_type = other RNA
  modified_base 1: mod_base = OTHER; note = 2'-O-methyladenosine-3'-phosphorothioate
  modified_base 2: mod_base = OTHER; note = 2'-O-methylguanosine-3'-phosphorothioate
  modified_base 3: mod_base = OTHER; note = 2'-O-methylcytidine-3'-phosphate
  modified_base 4: mod_base = OTHER; note = 2'-O-methyluridine-3'-phosphate
  modified_base 5: mod_base = OTHER; note = 2'-O-methylguanosine-3'-phosphate
  modified_base 6: mod_base = OTHER; note 4-amino-1-((2R,3R,4R,5R)-3-(docosyloxy)-4-hydroxy-5-(hydrox ymethyl)tetrahydrofuran-2-yl)pyrimidin-2(1H)-one
  modified_base 7: mod_base = OTHER; note = 2'-fluorouridine-3'-phosphate
  modified_base 8: mod_base = OTHER; note = 2'-O-methyluridine-3'-phosphate
  modified_base 9: mod_base = OTHER; note = 2'-fluoroadenosine-3'-phosphate
  modified_base 10: mod_base = OTHER; note = 2'-fluoroguanosine-3'-phosphate
  modified_base 11: mod_base = OTHER; note = 2'-fluorouridine-3'-phosphate
  modified_base 12: mod_base = OTHER; note = 2'-O-methylguanosine-3'-phosphate
  modified_base 13: mod_base = OTHER; note = 2'-O-methylguanosine-3'-phosphate
  modified_base 14: mod_base = OTHER; note = 2'-O-methyladenosine-3'-phosphate
  modified_base 15: mod_base = OTHER; note = 2'-O-methyladenosine-3'-phosphate
  modified_base 16: mod_base = OTHER; note = 2'-O-methylguanosine-3'-phosphate
  modified_base 17: mod_base = OTHER; note = 2'-O-methyladenosine-3'-phosphate
  modified_base 18: mod_base = OTHER; note = 2'-O-methyluridine-3'-phosphate
  modified_base 19: mod_base = OTHER; note = 2'-O-methylguanosine-3'-phosphorothioate
  modified_base 20: mod_base = OTHER; note = 2'-O-methyluridine-3'-phosphorothioate
  modified_base 21: mod_base = OTHER; note = 2'-O-methyladenosine-3'-phosphate
agctgcttagtggaagatgta

SEQ ID NO: 1544 - RNA, 21 nt, synthetic construct
  source 1..21: mol_type = other RNA
  modified_base 1: mod_base = OTHER; note = 2'-O-methyluridine-3'-phosphorothioate
  modified_base 2: mod_base = OTHER; note = 2'-O-methyladenosine-3'-phosphorothioate
  modified_base 3: mod_base = OTHER; note = 2'-O-methylguanosine-3'-phosphate
  modified_base 4: mod_base = OTHER; note = 2'-O-methylcytidine-3'-phosphate
  modified_base 5: mod_base = OTHER; note = 2'-O-methyluridine-3'-phosphate
  modified_base 6: mod_base = OTHER; note 4-amino-1-((2R,3R,4R,5R)-3-(docosyloxy)-4-hydroxy-5-(hydrox ymethyl)tetrahydrofuran-2-yl)pyrimidin-2(1H)-one
  modified_base 7: mod_base = OTHER; note = 2'-fluorouridine-3'-phosphate
  modified_base 8: mod_base = OTHER; note = 2'-O-methylguanosine-3'-phosphate
  modified_base 9: mod_base = OTHER; note = 2'-fluorouridine-3'-phosphate
  modified_base 10: mod_base = OTHER; note = 2'-fluoroguanosine-3'-phosphate
  modified_base 11: mod_base = OTHER; note = 2'-fluorouridine-3'-phosphate
  modified_base 12: mod_base = OTHER; note = 2'-O-methylguanosine-3'-phosphate
  modified_base 13: mod_base = OTHER; note = 2'-O-methylcytidine-3'-phosphate
  modified_base 14: mod_base = OTHER; note = 2'-O-methyluridine-3'-phosphate
  modified_base 15: mod_base = OTHER; note = 2'-O-methylguanosine-3'-phosphate
  modified_base 16: mod_base = OTHER; note = 2'-O-methyladenosine-3'-phosphate
  modified_base 17: mod_base = OTHER; note = 2'-O-methyluridine-3'-phosphate
  modified_base 18: mod_base = OTHER; note = 2'-O-methyladenosine-3'-phosphate
  modified_base 19: mod_base = OTHER; note = 2'-O-methylcytidine-3'-phosphorothioate
  modified_base 20: mod_base = OTHER; note = 2'-O-methylcytidine-3'-phosphorothioate
  modified_base 21: mod_base = OTHER; note = 2'-O-methyladenosine-3'-phosphate
tagctctgtgtgctgatacca

SEQ ID NO: 1545 - RNA, 21 nt, synthetic construct
  source 1..21: mol_type = other RNA
  modified_base 1: mod_base = OTHER; note = 2'-O-methylcytidine-3'-phosphorothioate
  modified_base 2: mod_base = OTHER; note = 2'-O-methyladenosine-3'-phosphorothioate
  modified_base 3: mod_base = OTHER; note = 2'-O-methyluridine-3'-phosphate
  modified_base 4: mod_base = OTHER; note = 2'-O-methyluridine-3'-phosphate
  modified_base 5: mod_base = OTHER; note = 2'-O-methylcytidine-3'-phosphate
  modified_base 6: mod_base = OTHER; note 2-amino-9-((2R,3S,4S,5R)-3-(docosyloxy)-4-hydroxy-5-(hydrox ymethyl)tetrahydrofuran-2-yl)-1,9-dihydro-6H-purin-6-one
  modified_base 7: mod_base = OTHER; note = 2'-fluoroadenosine-3'-phosphate
  modified_base 8: mod_base = OTHER; note = 2'-O-methylguanosine-3'-phosphate
  modified_base 9: mod_base = OTHER; note = 2'-fluoroadenosine-3'-phosphate
  modified_base 10: mod_base = OTHER; note = 2'-fluoroguanosine-3'-phosphate
  modified_base 11: mod_base = OTHER; note = 2'-fluoroadenosine-3'-phosphate
  modified_base 12: mod_base = OTHER; note = 2'-O-methyladenosine-3'-phosphate
  modified_base 13: mod_base = OTHER; note = 2'-O-methyluridine-3'-phosphate
  modified_base 14: mod_base = OTHER; note = 2'-O-methyladenosine-3'-phosphate
  modified_base 15: mod_base = OTHER; note = 2'-O-methyluridine-3'-phosphate
  modified_base 16: mod_base = OTHER; note = 2'-O-methylguanosine-3'-phosphate
  modified_base 17: mod_base = OTHER; note = 2'-O-methyladenosine-3'-phosphate
  modified_base 18: mod_base = OTHER; note = 2'-O-methylguanosine-3'-phosphate
  modified_base 19: mod_base = OTHER; note = 2'-O-methylcytidine-3'-phosphorothioate
  modified_base 20: mod_base = OTHER; note = 2'-O-methyluridine-3'-phosphorothioate
  modified_base 21: mod_base = OTHER; note = 2'-O-methyladenosine-3'-phosphate
cattcgagagaatatgagcta

SEQ ID NO: 1546 - RNA, 21 nt, synthetic construct
  source 1..21: mol_type = other RNA
  modified_base 1: mod_base = OTHER; note = 2'-O-methyladenosine-3'-phosphorothioate
  modified_base 2: mod_base = OTHER; note = 2'-O-methyluridine-3'-phosphorothioate
  modified_base 3: mod_base = OTHER; note = 2'-O-methylguanosine-3'-phosphate
  modified_base 4: mod_base = OTHER; note = 2'-O-methylcytidine-3'-phosphate
  modified_base 5: mod_base = OTHER; note = 2'-O-methyladenosine-3'-phosphate
  modified_base 6: mod_base = OTHER; note 1-((2R,3R,4R,5R)-3-(docosyloxy)-4-hydroxy-5-(hydroxymethyl) tetrahydrofuran-2-yl)pyrimidine-2,4(1H,3H)-dione
  modified_base 7: mod_base = OTHER; note = 2'-fluorouridine-3'-phosphate
  modified_base 8: mod_base = OTHER; note = 2'-O-methyluridine-3'-phosphate
  modified_base 9: mod_base = OTHER; note = 2'-fluorouridine-3'-phosphate
  modified_base 10: mod_base = OTHER; note = 2'-fluorocytidine-3'-phosphate
  modified_base 11: mod_base = OTHER; note = 2'-fluorouridine-3'-phosphate
  modified_base 12: mod_base = OTHER; note = 2'-O-methylguanosine-3'-phosphate
  modified_base 13: mod_base = OTHER; note = 2'-O-methyladenosine-3'-phosphate
  modified_base 14: mod_base = OTHER; note = 2'-O-methyladenosine-3'-phosphate
  modified_base 15: mod_base = OTHER; note = 2'-O-methyladenosine-3'-phosphate
  modified_base 16: mod_base = OTHER; note = 2'-O-methyladenosine-3'-phosphate
  modified_base 17: mod_base = OTHER; note = 2'-O-methyluridine-3'-phosphate
  modified_base 18: mod_base = OTHER; note = 2'-O-methylguanosine-3'-phosphate
  modified_base 19: mod_base = OTHER; note = 2'-O-methyluridine-3'-phosphorothioate
  modified_base 20: mod_base = OTHER; note = 2'-O-methyladenosine-3'-phosphorothioate
  modified_base 21: mod_base = OTHER; note = 2'-O-methyladenosine-3'-phosphate
atgcattttctgaaaatgtaa

SEQ ID NO: 1547 - RNA, 21 nt, synthetic construct
  source 1..21: mol_type = other RNA
  modified_base 1: mod_base = OTHER; note = 2'-O-methylguanosine-3'-phosphorothioate
  modified_base 2: mod_base = OTHER; note = 2'-O-methyluridine-3'-phosphorothioate
  modified_base 3: mod_base = OTHER; note = 2'-O-methyluridine-3'-phosphate
  modified_base 4: mod_base = OTHER; note = 2'-O-methyluridine-3'-phosphate
  modified_base 5: mod_base = OTHER; note = 2'-O-methylcytidine-3'-phosphate
  modified_base 6: mod_base = OTHER; note 2-amino-9-((2R,3S,4S,5R)-3-(docosyloxy)-4-hydroxy-5-(hydrox ymethyl)tetrahydrofuran-2-yl)-1,9-dihydro-6H-purin-6-one
  modified_base 7: mod_base = OTHER; note = 2'-fluoroadenosine-3'-phosphate
  modified_base 8: mod_base = OTHER; note = 2'-O-methylcytidine-3'-phosphate
  modified_base 9: mod_base = OTHER; note = 2'-fluorocytidine-3'-phosphate
  modified_base 10: mod_base = OTHER; note = 2'-fluoroadenosine-3'-phosphate
  modified_base 11: mod_base = OTHER; note = 2'-fluoroadenosine-3'-phosphate
  modified_base 12: mod_base = OTHER; note = 2'-O-methylguanosine-3'-phosphate
  modified_base 13: mod_base = OTHER; note = 2'-O-methyluridine-3'-phosphate
  modified_base 14: mod_base = OTHER; note = 2'-O-methyladenosine-3'-phosphate
  modified_base 15: mod_base = OTHER; note = 2'-O-methyluridine-3'-phosphate
  modified_base 16: mod_base = OTHER; note = 2'-O-methylcytidine-3'-phosphate
  modified_base 17: mod_base = OTHER; note = 2'-O-methylcytidine-3'-phosphate
  modified_base 18: mod_base = OTHER; note = 2'-O-methylcytidine-3'-phosphate
  modified_base 19: mod_base = OTHER; note = 2'-O-methyladenosine-3'-phosphorothioate
  modified_base 20: mod_base = OTHER; note = 2'-O-methyladenosine-3'-phosphorothioate
  modified_base 21: mod_base = OTHER; note = 2'-O-methyladenosine-3'-phosphate
gtttcgaccaagtatcccaaa

SEQ ID NO: 1548 - RNA, 21 nt, synthetic construct
  source 1..21: mol_type = other RNA
  modified_base 1: mod_base = OTHER; note = 2'-O-methyluridine-3'-phosphorothioate
  modified_base 2: mod_base = OTHER; note = 2'-O-methylcytidine-3'-phosphorothioate
  modified_base 3: mod_base = OTHER; note = 2'-O-methyluridine-3'-phosphate
  modified_base 4: mod_base = OTHER; note = 2'-O-methyluridine-3'-phosphate
  modified_base 5: mod_base = OTHER; note = 2'-O-methylguanosine-3'-phosphate
  modified_base 6: mod_base = OTHER; note 4-amino-1-((2R,3R,4R,5R)-3-(docosyloxy)-4-hydroxy-5-(hydrox ymethyl)tetrahydrofuran-2-yl)pyrimidin-2(1H)-one
  modified_base 7: mod_base = OTHER; note = 2'-fluorouridine-3'-phosphate
  modified_base 8: mod_base = OTHER; note = 2'-O-methyluridine-3'-phosphate
  modified_base 9: mod_base = OTHER; note = 2'-fluoroguanosine-3'-phosphate
  modified_base 10: mod_base = OTHER; note = 2'-fluorocytidine-3'-phosphate
  modified_base 11: mod_base = OTHER; note = 2'-fluorocytidine-3'-phosphate
  modified_base 12: mod_base = OTHER; note = 2'-O-methyladenosine-3'-phosphate
  modified_base 13: mod_base = OTHER; note = 2'-O-methylcytidine-3'-phosphate
  modified_base 14: mod_base = OTHER; note = 2'-O-methyladenosine-3'-phosphate
  modified_base 15: mod_base = OTHER; note = 2'-O-methyladenosine-3'-phosphate
  modified_base 16: mod_base = OTHER; note = 2'-O-methyluridine-3'-phosphate
  modified_base 17: mod_base = OTHER; note = 2'-O-methyladenosine-3'-phosphate
  modified_base 18: mod_base = OTHER; note = 2'-O-methyluridine-3'-phosphate
  modified_base 19: mod_base = OTHER; note = 2'-O-methylcytidine-3'-phosphorothioate
  modified_base 20: mod_base = OTHER; note = 2'-O-methylguanosine-3'-phosphorothioate
  modified_base 21: mod_base = OTHER; note = 2'-O-methyladenosine-3'-phosphate
tcttgcttgccacaatatcga

SEQ ID NO: 1549 - RNA, 21 nt, synthetic construct
  source 1..21: mol_type = other RNA
  modified_base 1: mod_base = OTHER; note = 2'-O-methylguanosine-3'-phosphorothioate
  modified_base 2: mod_base = OTHER; note = 2'-O-methylguanosine-3'-phosphorothioate
  modified_base 3: mod_base = OTHER; note = 2'-O-methylguanosine-3'-phosphate
  modified_base 4: mod_base = OTHER; note = 2'-O-methyluridine-3'-phosphate
  modified_base 5: mod_base = OTHER; note = 2'-O-methyladenosine-3'-phosphate
  modified_base 6: mod_base = OTHER; note 4-amino-1-((2R,3R,4R,5R)-3-(docosyloxy)-4-hydroxy-5-(hydrox ymethyl)tetrahydrofuran-2-yl)pyrimidin-2(1H)-one
  modified_base 7: mod_base = OTHER; note = 2'-fluoroadenosine-3'-phosphate
  modified_base 8: mod_base = OTHER; note = 2'-O-methyladenosine-3'-phosphate
  modified_base 9: mod_base = OTHER; note = 2'-fluoroguanosine-3'-phosphate
  modified_base 10: mod_base = OTHER; note = 2'-fluoroadenosine-3'-phosphate
  modified_base 11: mod_base = OTHER; note = 2'-fluoroguanosine-3'-phosphate
  modified_base 12: mod_base = OTHER; note = 2'-O-methylguanosine-3'-phosphate
  modified_base 13: mod_base = OTHER; note = 2'-O-methylguanosine-3'-phosphate
  modified_base 14: mod_base = OTHER; note = 2'-O-methyladenosine-3'-phosphate
  modified_base 15: mod_base = OTHER; note = 2'-O-methyladenosine-3'-phosphate
  modified_base 16: mod_base = OTHER; note = 2'-O-methyluridine-3'-phosphate
  modified_base 17: mod_base = OTHER; note = 2'-O-methyladenosine-3'-phosphate
  modified_base 18: mod_base = OTHER; note = 2'-O-methylcytidine-3'-phosphate
  modified_base 19: mod_base = OTHER; note = 2'-O-methyladenosine-3'-phosphorothioate
  modified_base 20: mod_base = OTHER; note = 2'-O-methyladenosine-3'-phosphorothioate
  modified_base 21: mod_base = OTHER; note = 2'-O-methyladenosine-3'-phosphate
gggtacaagagggaatacaaa

SEQ ID NO: 1550 - RNA, 21 nt, synthetic construct
  source 1..21: mol_type = other RNA
  modified_base 1: mod_base = OTHER; note = 2'-O-methylguanosine-3'-phosphorothioate
  modified_base 2: mod_base = OTHER; note = 2'-O-methylguanosine-3'-phosphorothioate
  modified_base 3: mod_base = OTHER; note = 2'-O-methyluridine-3'-phosphate
  modified_base 4: mod_base = OTHER; note = 2'-O-methylguanosine-3'-phosphate
  modified_base 5: mod_base = OTHER; note = 2'-O-methyladenosine-3'-phosphate
  modified_base 6: mod_base = OTHER; note 1-((2R,3R,4R,5R)-3-(docosyloxy)-4-hydroxy-5-(hydroxymethyl) tetrahydrofuran-2-yl)pyrimidine-2,4(1H,3H)-dione
  modified_base 7: mod_base = OTHER; note = 2'-fluorocytidine-3'-phosphate
  modified_base 8: mod_base = OTHER; note = 2'-O-methyladenosine-3'-phosphate
  modified_base 9: mod_base = OTHER; note = 2'-fluoroadenosine-3'-phosphate
  modified_base 10: mod_base = OTHER; note = 2'-fluoroadenosine-3'-phosphate
  modified_base 11: mod_base = OTHER; note = 2'-fluorouridine-3'-phosphate
  modified_base 12: mod_base = OTHER; note = 2'-O-methylcytidine-3'-phosphate
  modified_base 13: mod_base = OTHER; note = 2'-O-methylcytidine-3'-phosphate
  modified_base 14: mod_base = OTHER; note = 2'-O-methyluridine-3'-phosphate
  modified_base 15: mod_base = OTHER; note = 2'-O-methylguanosine-3'-phosphate
  modified_base 16: mod_base = OTHER; note = 2'-O-methyluridine-3'-phosphate
  modified_base 17: mod_base = OTHER; note = 2'-O-methylguanosine-3'-phosphate
  modified_base 18: mod_base = OTHER; note = 2'-O-methyluridine-3'-phosphate
  modified_base 19: mod_base = OTHER; note = 2'-O-methylcytidine-3'-phosphorothioate
  modified_base 20: mod_base = OTHER; note = 2'-O-methyluridine-3'-phosphorothioate
  modified_base 21: mod_base = OTHER; note = 2'-O-methyladenosine-3'-phosphate
ggtgatcaaatcctgtgtcta

SEQ ID NO: 1551 - RNA, 21 nt, synthetic construct
  source 1..21: mol_type = other RNA
  modified_base 1: mod_base = OTHER; note = 2'-O-methylcytidine-3'-phosphorothioate
  modified_base 2: mod_base = OTHER; note = 2'-O-methyladenosine-3'-phosphorothioate
  modified_base 3: mod_base = OTHER; note = 2'-O-methylguanosine-3'-phosphate
  modified_base 4: mod_base = OTHER; note = 2'-O-methyluridine-3'-phosphate
  modified_base 5: mod_base = OTHER; note = 2'-O-methylguanosine-3'-phosphate
  modified_base 6: mod_base = OTHER; note 2-amino-9-((2R,3S,4S,5R)-3-(docosyloxy)-4-hydroxy-5-(hydrox ymethyl)tetrahydrofuran-2-yl)-1,9-dihydro-6H-purin-6-one
  modified_base 7: mod_base = OTHER; note = 2'-fluoroguanosine-3'-phosphate
  modified_base 8: mod_base = OTHER; note = 2'-O-methyluridine-3'-phosphate
  modified_base 9: mod_base = OTHER; note = 2'-fluorouridine-3'-phosphate
  modified_base 10: mod_base = OTHER; note = 2'-fluorouridine-3'-phosphate
  modified_base 11: mod_base = OTHER; note = 2'-fluorocytidine-3'-phosphate
  modified_base 12: mod_base = OTHER; note = 2'-O-methyluridine-3'-phosphate
  modified_base 13: mod_base = OTHER; note = 2'-O-methyladenosine-3'-phosphate
  modified_base 14: mod_base = OTHER; note = 2'-O-methylguanosine-3'-phosphate
  modified_base 15: mod_base = OTHER; note = 2'-O-methylguanosine-3'-phosphate
  modified_base 16: mod_base = OTHER; note = 2'-O-methyladenosine-3'-phosphate
  modified_base 17: mod_base = OTHER; note = 2'-O-methyluridine-3'-phosphate
  modified_base 18: mod_base = OTHER; note = 2'-O-methyladenosine-3'-phosphate
  modified_base 19: mod_base = OTHER; note = 2'-O-methylguanosine-3'-phosphorothioate
  modified_base 20: mod_base = OTHER; note = 2'-O-methylguanosine-3'-phosphorothioate
  modified_base 21: mod_base = OTHER; note = 2'-O-methyladenosine-3'-phosphate
cagtgggtttctaggatagga

SEQ ID NO: 1552 - RNA, 21 nt, synthetic construct
  source 1..21: mol_type = other RNA
  modified_base 1: mod_base = OTHER; note = 2'-O-methyladenosine-3'-phosphorothioate
  modified_base 2: mod_base = OTHER; note = 2'-O-methyladenosine-3'-phosphorothioate
  modified_base 3: mod_base = OTHER; note = 2'-O-methylcytidine-3'-phosphate
  modified_base 4: mod_base = OTHER; note = 2'-O-methyluridine-3'-phosphate
  modified_base 5: mod_base = OTHER; note = 2'-O-methyladenosine-3'-phosphate
  modified_base 6: mod_base = OTHER; note (2R,3S,4S,5R)-5-(6-amino-9H-purin-9-yl)-4-(docosyloxy)-2-(h ydroxymethyl)tetrahydrofuran-3-ol
  modified_base 7: mod_base = OTHER; note = 2'-fluoroguanosine-3'-phosphate
  modified_base 8: mod_base = OTHER; note = 2'-O-methyluridine-3'-phosphate
  modified_base 9: mod_base = OTHER; note = 2'-fluoroadenosine-3'-phosphate
  modified_base 10: mod_base = OTHER; note = 2'-fluorouridine-3'-phosphate
  modified_base 11: mod_base = OTHER; note = 2'-fluorouridine-3'-phosphate
  modified_base 12: mod_base = OTHER; note = 2'-O-methyluridine-3'-phosphate
  modified_base 13: mod_base = OTHER; note = 2'-O-methyluridine-3'-phosphate
  modified_base 14: mod_base = OTHER; note = 2'-O-methyluridine-3'-phosphate
  modified_base 15: mod_base = OTHER; note = 2'-O-methyladenosine-3'-phosphate
  modified_base 16: mod_base = OTHER; note = 2'-O-methyladenosine-3'-phosphate
  modified_base 17: mod_base = OTHER; note = 2'-O-methylguanosine-3'-phosphate
  modified_base 18: mod_base = OTHER; note = 2'-O-methylguanosine-3'-phosphate
  modified_base 19: mod_base = OTHER; note = 2'-O-methyladenosine-3'-phosphorothioate
  modified_base 20: mod_base = OTHER; note = 2'-O-methylcytidine-3'-phosphorothioate
  modified_base 21: mod_base = OTHER; note = 2'-O-methyladenosine-3'-phosphate
aactaagtatttttaaggaca

SEQ ID NO: 1553 - RNA, 21 nt, synthetic construct
  source 1..21: mol_type = other RNA
  modified_base 1: mod_base = OTHER; note = 2'-O-methylcytidine-3'-phosphorothioate
  modified_base 2: mod_base = OTHER; note = 2'-O-methyladenosine-3'-phosphorothioate
  modified_base 3: mod_base = OTHER; note = 2'-O-methyluridine-3'-phosphate
  modified_base 4: mod_base = OTHER; note = 2'-O-methyladenosine-3'-phosphate
  modified_base 5: mod_base = OTHER; note = 2'-O-methyladenosine-3'-phosphate
  modified_base 6: mod_base = OTHER; note 1-((2R,3R,4R,5R)-3-(docosyloxy)-4-hydroxy-5-(hydroxymethyl) tetrahydrofuran-2-yl)pyrimidine-2,4(1H,3H)-dione
  modified_base 7: mod_base = OTHER; note = 2'-fluoroguanosine-3'-phosphate
  modified_base 8: mod_base = OTHER; note = 2'-O-methyluridine-3'-phosphate
  modified_base 9: mod_base = OTHER; note = 2'-fluoroguanosine-3'-phosphate
  modified_base 10: mod_base = OTHER; note = 2'-fluoroadenosine-3'-phosphate
  modified_base 11: mod_base = OTHER; note = 2'-fluorouridine-3'-phosphate
  modified_base 12: mod_base = OTHER; note = 2'-O-methyluridine-3'-phosphate
  modified_base 13: mod_base = OTHER; note = 2'-O-methylguanosine-3'-phosphate
  modified_base 14: mod_base = OTHER; note = 2'-O-methyluridine-3'-phosphate
  modified_base 15: mod_base = OTHER; note = 2'-O-methyluridine-3'-phosphate
  modified_base 16: mod_base = OTHER; note = 2'-O-methyladenosine-3'-phosphate
  modified_base 17: mod_base = OTHER; note = 2'-O-methyladenosine-3'-phosphate
  modified_base 18: mod_base = OTHER; note = 2'-O-methyladenosine-3'-phosphate
  modified_base 19: mod_base = OTHER; note = 2'-O-methyluridine-3'-phosphorothioate
  modified_base 20: mod_base = OTHER; note = 2'-O-methyluridine-3'-phosphorothioate
  modified_base 21: mod_base = OTHER; note = 2'-O-methyladenosine-3'-phosphate
cataatgtgattgttaaatta

SEQ ID NO: 1554 - RNA, 21 nt, synthetic construct
  source 1..21: mol_type = other RNA
  modified_base 1: mod_base = OTHER; note = 2'-O-methylguanosine-3'-phosphorothioate
  modified_base 2: mod_base = OTHER; note = 2'-O-methyladenosine-3'-phosphorothioate
  modified_base 3: mod_base = OTHER; note = 2'-O-methylguanosine-3'-phosphate
  modified_base 4: mod_base = OTHER; note = 2'-O-methyladenosine-3'-phosphate
  modified_base 5: mod_base = OTHER; note = 2'-O-methyladenosine-3'-phosphate
  modified_base 6: mod_base = OTHER; note 2-amino-9-((2R,3S,4S,5R)-3-(docosyloxy)-4-hydroxy-5-(hydrox ymethyl)tetrahydrofuran-2-yl)-1,9-dihydro-6H-purin-6-one
  modified_base 7: mod_base = OTHER; note = 2'-fluoroadenosine-3'-phosphate
  modified_base 8: mod_base = OTHER; note = 2'-O-methyladenosine-3'-phosphate
  modified_base 9: mod_base = OTHER; note = 2'-fluorouridine-3'-phosphate
  modified_base 10: mod_base = OTHER; note = 2'-fluorouridine-3'-phosphate
  modified_base 11: mod_base = OTHER; note = 2'-fluoroadenosine-3'-phosphate
  modified_base 12: mod_base = OTHER; note = 2'-O-methyladenosine-3'-phosphate
  modified_base 13: mod_base = OTHER; note = 2'-O-methylguanosine-3'-phosphate
  modified_base 14: mod_base = OTHER; note = 2'-O-methyladenosine-3'-phosphate
  modified_base 15: mod_base = OTHER; note = 2'-O-methyladenosine-3'-phosphate
  modified_base 16: mod_base = OTHER; note = 2'-O-methyladenosine-3'-phosphate
  modified_base 17: mod_base = OTHER; note = 2'-O-methyladenosine-3'-phosphate
  modified_base 18: mod_base = OTHER; note = 2'-O-methylcytidine-3'-phosphate
  modified_base 19: mod_base = OTHER; note = 2'-O-methyluridine-3'-phosphorothioate
  modified_base 20: mod_base = OTHER; note = 2'-O-methylcytidine-3'-phosphorothioate
  modified_base 21: mod_base = OTHER; note = 2'-O-methyladenosine-3'-phosphate
gagaagaattaagaaaactca

SEQ ID NO: 1555 - RNA, 21 nt, synthetic construct
  source 1..21: mol_type = other RNA
  modified_base 1: mod_base = OTHER; note = 2'-O-methylguanosine-3'-phosphorothioate
  modified_base 2: mod_base = OTHER; note = 2'-O-methyladenosine-3'-phosphorothioate
  modified_base 3: mod_base = OTHER; note = 2'-O-methyladenosine-3'-phosphate
  modified_base 4: mod_base = OTHER; note = 2'-O-methylguanosine-3'-phosphate
  modified_base 5: mod_base = OTHER; note = 2'-O-methyladenosine-3'-phosphate
  modified_base 6: mod_base = OTHER; note 2-amino-9-((2R,3S,4S,5R)-3-(docosyloxy)-4-hydroxy-5-(hydrox ymethyl)tetrahydrofuran-2-yl)-1,9-dihydro-6H-purin-6-one
  modified_base 7: mod_base = OTHER; note = 2'-fluoroadenosine-3'-phosphate
  modified_base 8: mod_base = OTHER; note = 2'-O-methyladenosine-3'-phosphate
  modified_base 9: mod_base = OTHER; note = 2'-fluoroadenosine-3'-phosphate
  modified_base 10: mod_base = OTHER; note = 2'-fluorouridine-3'-phosphate
  modified_base 11: mod_base = OTHER; note = 2'-fluorouridine-3'-phosphate
  modified_base 12: mod_base = OTHER; note = 2'-O-methylguanosine-3'-phosphate
  modified_base 13: mod_base = OTHER; note = 2'-O-methyladenosine-3'-phosphate
  modified_base 14: mod_base = OTHER; note = 2'-O-methyluridine-3'-phosphate
  modified_base 15: mod_base = OTHER; note = 2'-O-methyluridine-3'-phosphate
  modified_base 16: mod_base = OTHER; note = 2'-O-methylguanosine-3'-phosphate
  modified_base 17: mod_base = OTHER; note = 2'-O-methyluridine-3'-phosphate
  modified_base 18: mod_base = OTHER; note = 2'-O-methyluridine-3'-phosphate
  modified_base 19: mod_base = OTHER; note = 2'-O-methyluridine-3'-phosphorothioate
  modified_base 20: mod_base = OTHER; note = 2'-O-methyladenosine-3'-phosphorothioate
  modified_base 21: mod_base = OTHER; note = 2'-O-methyladenosine-3'-phosphate
gaagagaaattgattgtttaa

SEQ ID NO: 1556 - RNA, 21 nt, synthetic construct
  source 1..21: mol_type = other RNA
  modified_base 1: mod_base = OTHER; note = 2'-O-methyladenosine-3'-phosphorothioate
  modified_base 2: mod_base = OTHER; note = 2'-O-methylguanosine-3'-phosphorothioate
  modified_base 3: mod_base = OTHER; note = 2'-O-methyluridine-3'-phosphate
  modified_base 4: mod_base = OTHER; note = 2'-O-methylguanosine-3'-phosphate
  modified_base 5: mod_base = OTHER; note = 2'-O-methyluridine-3'-phosphate
  modified_base 6: mod_base = OTHER; note 2-amino-9-((2R,3S,4S,5R)-3-(docosyloxy)-4-hydroxy-5-(hydrox ymethyl)tetrahydrofuran-2-yl)-1,9-dihydro-6H-purin-6-one
  modified_base 7: mod_base = OTHER; note = 2'-fluoroadenosine-3'-phosphate
  modified_base 8: mod_base = OTHER; note = 2'-O-methyladenosine-3'-phosphate
  modified_base 9: mod_base = OTHER; note = 2'-fluoroadenosine-3'-phosphate
  modified_base 10: mod_base = OTHER; note = 2'-fluorocytidine-3'-phosphate
  modified_base 11: mod_base = OTHER; note = 2'-fluorouridine-3'-phosphate
  modified_base 12: mod_base = OTHER; note = 2'-O-methyluridine-3'-phosphate
  modified_base 13: mod_base = OTHER; note = 2'-O-methylguanosine-3'-phosphate
  modified_base 14: mod_base = OTHER; note = 2'-O-methyluridine-3'-phosphate
  modified_base 15: mod_base = OTHER; note = 2'-O-methylguanosine-3'-phosphate
  modified_base 16: mod_base = OTHER; note = 2'-O-methylcytidine-3'-phosphate
  modified_base 17: mod_base = OTHER; note = 2'-O-methylcytidine-3'-phosphate
  modified_base 18: mod_base = OTHER; note = 2'-O-methyladenosine-3'-phosphate
  modified_base 19: mod_base = OTHER; note = 2'-O-methyluridine-3'-phosphorothioate
  modified_base 20: mod_base = OTHER; note = 2'-O-methyladenosine-3'-phosphorothioate
  modified_base 21: mod_base = OTHER; note = 2'-O-methyladenosine-3'-phosphate
agtgtgaaacttgtgccataa

SEQ ID NO: 1557 - RNA, 21 nt, synthetic construct
  source 1..21: mol_type = other RNA
  modified_base 1: mod_base = OTHER; note = 2'-O-methylcytidine-3'-phosphorothioate
  modified_base 2: mod_base = OTHER; note = 2'-O-methyluridine-3'-phosphorothioate
  modified_base 3: mod_base = OTHER; note = 2'-O-methylguanosine-3'-phosphate
  modified_base 4: mod_base = OTHER; note = 2'-O-methyladenosine-3'-phosphate
  modified_base 5: mod_base = OTHER; note = 2'-O-methylguanosine-3'-phosphate
  modified_base 6: mod_base = OTHER; note (2R,3S,4S,5R)-5-(6-amino-9H-purin-9-yl)-4-(docosyloxy)-2-(h ydroxymethyl)tetrahydrofuran-3-ol
  modified_base 7: mod_base = OTHER; note = 2'-fluorocytidine-3'-phosphate
  modified_base 8: mod_base = OTHER; note = 2'-O-methyladenosine-3'-phosphate
  modified_base 9: mod_base = OTHER; note = 2'-fluorocytidine-3'-phosphate
  modified_base 10: mod_base = OTHER; note = 2'-fluorouridine-3'-phosphate
  modified_base 11: mod_base = OTHER; note = 2'-fluoroguanosine-3'-phosphate
  modified_base 12: mod_base = OTHER; note = 2'-O-methyladenosine-3'-phosphate
  modified_base 13: mod_base = OTHER; note = 2'-O-methylguanosine-3'-phosphate
  modified_base 14: mod_base = OTHER; note = 2'-O-methyladenosine-3'-phosphate
  modified_base 15: mod_base = OTHER; note = 2'-O-methyladenosine-3'-phosphate
  modified_base 16: mod_base = OTHER; note = 2'-O-methyladenosine-3'-phosphate
  modified_base 17: mod_base = OTHER; note = 2'-O-methyluridine-3'-phosphate
  modified_base 18: mod_base = OTHER; note = 2'-O-methylguanosine-3'-phosphate
  modified_base 19: mod_base = OTHER; note = 2'-O-methyluridine-3'-phosphorothioate
  modified_base 20: mod_base = OTHER; note = 2'-O-methylcytidine-3'-phosphorothioate
  modified_base 21: mod_base = OTHER; note = 2'-O-methyladenosine-3'-phosphate
ctgagacactgagaaatgtca

SEQ ID NO: 1558 - RNA, 21 nt, synthetic construct
  source 1..21: mol_type = other RNA
  modified_base 1: mod_base = OTHER; note = 2'-O-methyluridine-3'-phosphorothioate
  modified_base 2: mod_base = OTHER; note = 2'-O-methylguanosine-3'-phosphorothioate
  modified_base 3: mod_base = OTHER; note = 2'-O-methylguanosine-3'-phosphate
  modified_base 4: mod_base = OTHER; note = 2'-O-methylcytidine-3'-phosphate
  modified_base 5: mod_base = OTHER; note = 2'-O-methyluridine-3'-phosphate
  modified_base 6: mod_base = OTHER; note 1-((2R,3R,4R,5R)-3-(docosyloxy)-4-hydroxy-5-(hydroxymethyl) tetrahydrofuran-2-yl)pyrimidine-2,4(1H,3H)-dione
  modified_base 7: mod_base = OTHER; note = 2'-fluoroadenosine-3'-phosphate
  modified_base 8: mod_base = OTHER; note = 2'-O-methyluridine-3'-phosphate
  modified_base 9: mod_base = OTHER; note = 2'-fluoroadenosine-3'-phosphate
  modified_base 10: mod_base = OTHER; note = 2'-fluorouridine-3'-phosphate
  modified_base 11: mod_base = OTHER; note = 2'-fluoroguanosine-3'-phosphate
  modified_base 12: mod_base = OTHER; note = 2'-O-methyluridine-3'-phosphate
  modified_base 13: mod_base = OTHER; note = 2'-O-methylguanosine-3'-phosphate
  modified_base 14: mod_base = OTHER; note = 2'-O-methyluridine-3'-phosphate
  modified_base 15: mod_base = OTHER; note = 2'-O-methyluridine-3'-phosphate
  modified_base 16: mod_base = OTHER; note = 2'-O-methyluridine-3'-phosphate
  modified_base 17: mod_base = OTHER; note = 2'-O-methyladenosine-3'-phosphate
  modified_base 18: mod_base = OTHER; note = 2'-O-methyladenosine-3'-phosphate
  modified_base 19: mod_base = OTHER; note = 2'-O-methyladenosine-3'-phosphorothioate
  modified_base 20: mod_base = OTHER; note = 2'-O-methylguanosine-3'-phosphorothioate
  modified_base 21: mod_base = OTHER; note = 2'-O-methyladenosine-3'-phosphate
tggcttatatgtgtttaaaga

SEQ ID NO: 1559 - RNA, 21 nt, synthetic construct
  source 1..21: mol_type = other RNA
  modified_base 1: mod_base = OTHER; note = 2'-O-methyluridine-3'-phosphorothioate
  modified_base 2: mod_base = OTHER; note = 2'-O-methylguanosine-3'-phosphorothioate
  modified_base 3: mod_base = OTHER; note = 2'-O-methylcytidine-3'-phosphate
  modified_base 4: mod_base = OTHER; note = 2'-O-methyladenosine-3'-phosphate
  modified_base 5: mod_base = OTHER; note = 2'-O-methyluridine-3'-phosphate
  modified_base 6: mod_base = OTHER; note 1-((2R,3R,4R,5R)-3-(docosyloxy)-4-hydroxy-5-(hydroxymethyl) tetrahydrofuran-2-yl)pyrimidine-2,4(1H,3H)-dione
  modified_base 7: mod_base = OTHER; note = 2'-fluorouridine-3'-phosphate
  modified_base 8: mod_base = OTHER; note = 2'-O-methyluridine-3'-phosphate
  modified_base 9: mod_base = OTHER; note = 2'-fluoroguanosine-3'-phosphate
  modified_base 10: mod_base = OTHER; note = 2'-fluoroadenosine-3'-phosphate
  modified_base 11: mod_base = OTHER; note = 2'-fluorocytidine-3'-phosphate
  modified_base 12: mod_base = OTHER; note = 2'-O-methyladenosine-3'-phosphate
  modified_base 13: mod_base = OTHER; note = 2'-O-methyluridine-3'-phosphate
  modified_base 14: mod_base = OTHER; note = 2'-O-methyluridine-3'-phosphate
  modified_base 15: mod_base = OTHER; note = 2'-O-methylguanosine-3'-phosphate
  modified_base 16: mod_base = OTHER; note = 2'-O-methylcytidine-3'-phosphate
  modified_base 17: mod_base = OTHER; note = 2'-O-methyladenosine-3'-phosphate
  modified_base 18: mod_base = OTHER; note = 2'-O-methyladenosine-3'-phosphate
  modified_base 19: mod_base = OTHER; note = 2'-O-methyladenosine-3'-phosphorothioate
  modified_base 20: mod_base = OTHER; note = 2'-O-methyladenosine-3'-phosphorothioate
  modified_base 21: mod_base = OTHER; note = 2'-O-methyladenosine-3'-phosphate
tgcattttgacattgcaaaaa

SEQ ID NO: 1560 - RNA, 21 nt, synthetic construct
  source 1..21: mol_type = other RNA
  modified_base 1: mod_base = OTHER; note = 2'-O-methyluridine-3'-phosphorothioate
  modified_base 2: mod_base = OTHER; note = 2'-O-methyluridine-3'-phosphorothioate
  modified_base 3: mod_base = OTHER; note = 2'-O-methyladenosine-3'-phosphate
  modified_base 4: mod_base = OTHER; note = 2'-O-methylguanosine-3'-phosphate
  modified_base 5: mod_base = OTHER; note = 2'-O-methylguanosine-3'-phosphate
  modified_base 6: mod_base = OTHER; note 1-((2R,3R,4R,5R)-3-(docosyloxy)-4-hydroxy-5-(hydroxymethyl) tetrahydrofuran-2-yl)pyrimidine-2,4(1H,3H)-dione
  modified_base 7: mod_base = OTHER; note = 2'-fluorouridine-3'-phosphate
  modified_base 8: mod_base = OTHER; note = 2'-O-methyladenosine-3'-phosphate
  modified_base 9: mod_base = OTHER; note = 2'-fluoroguanosine-3'-phosphate
  modified_base 10: mod_base = OTHER; note = 2'-fluoroadenosine-3'-phosphate
  modified_base 11: mod_base = OTHER; note = 2'-fluoroadenosine-3'-phosphate
  modified_base 12: mod_base = OTHER; note = 2'-O-methylguanosine-3'-phosphate
  modified_base 13: mod_base = OTHER; note = 2'-O-methyluridine-3'-phosphate
  modified_base 14: mod_base = OTHER; note = 2'-O-methyluridine-3'-phosphate
  modified_base 15: mod_base = OTHER; note = 2'-O-methylcytidine-3'-phosphate
  modified_base 16: mod_base = OTHER; note = 2'-O-methylcytidine-3'-phosphate
  modified_base 17: mod_base = OTHER; note = 2'-O-methyladenosine-3'-phosphate
  modified_base 18: mod_base = OTHER; note = 2'-O-methylguanosine-3'-phosphate
  modified_base 19: mod_base = OTHER; note = 2'-O-methyladenosine-3'-phosphorothioate
  modified_base 20: mod_base = OTHER; note = 2'-O-methyladenosine-3'-phosphorothioate
  modified_base 21: mod_base = OTHER; note = 2'-O-methyladenosine-3'-phosphate
ttaggttagaagttccagaaa

SEQ ID NO: 1561 - RNA, 21 nt, synthetic construct
  source 1..21: mol_type = other RNA
  modified_base 1: mod_base = OTHER; note = 2'-O-methyluridine-3'-phosphorothioate
  modified_base 2: mod_base = OTHER; note = 2'-O-methylguanosine-3'-phosphorothioate
  modified_base 3: mod_base = OTHER; note = 2'-O-methylcytidine-3'-phosphate
  modified_base 4: mod_base = OTHER; note = 2'-O-methylguanosine-3'-phosphate
  modified_base 5: mod_base = OTHER; note = 2'-O-methyladenosine-3'-phosphate
  modified_base 6: mod_base = OTHER; note 4-amino-1-((2R,3R,4R,5R)-3-(docosyloxy)-4-hydroxy-5-(hydrox ymethyl)tetrahydrofuran-2-yl)pyrimidin-2(1H)-one
  modified_base 7: mod_base = OTHER; note = 2'-fluoroadenosine-3'-phosphate
  modified_base 8: mod_base = OTHER; note = 2'-O-methyluridine-3'-phosphate
  modified_base 9: mod_base = OTHER; note = 2'-fluoroguanosine-3'-phosphate
  modified_base 10: mod_base = OTHER; note = 2'-fluoroadenosine-3'-phosphate
  modified_base 11: mod_base = OTHER; note = 2'-fluoroadenosine-3'-phosphate
  modified_base 12: mod_base = OTHER; note = 2'-O-methyladenosine-3'-phosphate
  modified_base 13: mod_base = OTHER; note = 2'-O-methyladenosine-3'-phosphate
  modified_base 14: mod_base = OTHER; note = 2'-O-methylcytidine-3'-phosphate
  modified_base 15: mod_base = OTHER; note = 2'-O-methyladenosine-3'-phosphate
  modified_base 16: mod_base = OTHER; note = 2'-O-methyluridine-3'-phosphate
  modified_base 17: mod_base = OTHER; note = 2'-O-methylcytidine-3'-phosphate
  modified_base 18: mod_base = OTHER; note = 2'-O-methylcytidine-3'-phosphate
  modified_base 19: mod_base = OTHER; note = 2'-O-methyluridine-3'-phosphorothioate
  modified_base 20: mod_base = OTHER; note = 2'-O-methyluridine-3'-phosphorothioate
  modified_base 21: mod_base = OTHER; note = 2'-O-methyladenosine-3'-phosphate
tgcgacatgaaaacatcctta

SEQ ID NO: 1562 - RNA, 21 nt, synthetic construct
  source 1..21: mol_type = other RNA
  modified_base 1: mod_base = OTHER; note = 2'-O-methylguanosine-3'-phosphorothioate
  modified_base 2: mod_base = OTHER; note = 2'-O-methyladenosine-3'-phosphorothioate
  modified_base 3: mod_base = OTHER; note = 2'-O-methylguanosine-3'-phosphate
  modified_base 4: mod_base = OTHER; note = 2'-O-methyladenosine-3'-phosphate
  modified_base 5: mod_base = OTHER; note = 2'-O-methylguanosine-3'-phosphate
  modified_base 6: mod_base = OTHER; note 2-amino-9-((2R,3S,4S,5R)-3-(docosyloxy)-4-hydroxy-5-(hydrox ymethyl)tetrahydrofuran-2-yl)-1,9-dihydro-6H-purin-6-one
  modified_base 7: mod_base = OTHER; note = 2'-fluoroadenosine-3'-phosphate
  modified_base 8: mod_base = OTHER; note = 2'-O-methyluridine-3'-phosphate
  modified_base 9: mod_base = OTHER; note = 2'-fluorouridine-3'-phosphate
  modified_base 10: mod_base = OTHER; note = 2'-fluorouridine-3'-phosphate
  modified_base 11: mod_base = OTHER; note = 2'-fluorouridine-3'-phosphate
  modified_base 12: mod_base = OTHER; note = 2'-O-methyluridine-3'-phosphate
  modified_base 13: mod_base = OTHER; note = 2'-O-methyluridine-3'-phosphate
  modified_base 14: mod_base = OTHER; note = 2'-O-methyladenosine-3'-phosphate
  modified_base 15: mod_base = OTHER; note = 2'-O-methylcytidine-3'-phosphate
  modified_base 16: mod_base = OTHER; note = 2'-O-methylcytidine-3'-phosphate
  modified_base 17: mod_base = OTHER; note = 2'-O-methyladenosine-3'-phosphate
  modified_base 18: mod_base = OTHER; note = 2'-O-methyluridine-3'-phosphate
  modified_base 19: mod_base = OTHER; note = 2'-O-methylcytidine-3'-phosphorothioate
  modified_base 20: mod_base = OTHER; note = 2'-O-methyluridine-3'-phosphorothioate
  modified_base 21: mod_base = OTHER; note = 2'-O-methyladenosine-3'-phosphate
gagaggattttttaccatcta

SEQ ID NO: 1563 - RNA, 21 nt, synthetic construct
  source 1..21: mol_type = other RNA
  modified_base 1: mod_base = OTHER; note = 2'-O-methylguanosine-3'-phosphorothioate
  modified_base 2: mod_base = OTHER; note = 2'-O-methyladenosine-3'-phosphorothioate
  modified_base 3: mod_base = OTHER; note = 2'-O-methyladenosine-3'-phosphate
  modified_base 4: mod_base = OTHER; note = 2'-O-methylguanosine-3'-phosphate
  modified_base 5: mod_base = OTHER; note = 2'-O-methylguanosine-3'-phosphate
  modified_base 6: mod_base = OTHER; note 1-((2R,3R,4R,5R)-3-(docosyloxy)-4-hydroxy-5-(hydroxymethyl) tetrahydrofuran-2-yl)pyrimidine-2,4(1H,3H)-dione
  modified_base 7: mod_base = OTHER; note = 2'-fluoroguanosine-3'-phosphate
  modified_base 8: mod_base = OTHER; note = 2'-O-methyladenosine-3'-phosphate
  modified_base 9: mod_base = OTHER; note = 2'-fluoroadenosine-3'-phosphate
  modified_base 10: mod_base = OTHER; note = 2'-fluoroguanosine-3'-phosphate
  modified_base 11: mod_base = OTHER; note = 2'-fluoroadenosine-3'-phosphate
  modified_base 12: mod_base = OTHER; note = 2'-O-methylguanosine-3'-phosphate
  modified_base 13: mod_base = OTHER; note = 2'-O-methyladenosine-3'-phosphate
  modified_base 14: mod_base = OTHER; note = 2'-O-methyladenosine-3'-phosphate
  modified_base 15: mod_base = OTHER; note = 2'-O-methyluridine-3'-phosphate
  modified_base 16: mod_base = OTHER; note = 2'-O-methyluridine-3'-phosphate
  modified_base 17: mod_base = OTHER; note = 2'-O-methyluridine-3'-phosphate
  modified_base 18: mod_base = OTHER; note = 2'-O-methylcytidine-3'-phosphate
  modified_base 19: mod_base = OTHER; note = 2'-O-methyladenosine-3'-phosphorothioate
  modified_base 20: mod_base = OTHER; note = 2'-O-methyladenosine-3'-phosphorothioate
  modified_base 21: mod_base = OTHER; note = 2'-O-methyladenosine-3'-phosphate
gaaggtgaagagaatttcaaa

SEQ ID NO: 1564 - RNA, 21 nt, synthetic construct
  source 1..21: mol_type = other RNA
  modified_base 1: mod_base = OTHER; note = 2'-O-methyluridine-3'-phosphorothioate
  modified_base 2: mod_base = OTHER; note = 2'-O-methylguanosine-3'-phosphorothioate
  modified_base 3: mod_base = OTHER; note = 2'-O-methylguanosine-3'-phosphate
  modified_base 4: mod_base = OTHER; note = 2'-O-methyluridine-3'-phosphate
  modified_base 5: mod_base = OTHER; note = 2'-O-methyladenosine-3'-phosphate
  modified_base 6: mod_base = OTHER; note 1-((2R,3R,4R,5R)-3-(docosyloxy)-4-hydroxy-5-(hydroxymethyl) tetrahydrofuran-2-yl)pyrimidine-2,4(1H,3H)-dione
  modified_base 7: mod_base = OTHER; note = 2'-fluorocytidine-3'-phosphate
  modified_base 8: mod_base = OTHER; note = 2'-O-methyluridine-3'-phosphate
  modified_base 9: mod_base = OTHER; note = 2'-fluoroguanosine-3'-phosphate
  modified_base 10: mod_base = OTHER; note = 2'-fluoroadenosine-3'-phosphate
  modified_base 11: mod_base = OTHER; note = 2'-fluoroadenosine-3'-phosphate
  modified_base 12: mod_base = OTHER; note = 2'-O-methyluridine-3'-phosphate
  modified_base 13: mod_base = OTHER; note = 2'-O-methyladenosine-3'-phosphate
  modified_base 14: mod_base = OTHER; note = 2'-O-methyluridine-3'-phosphate
  modified_base 15: mod_base = OTHER; note = 2'-O-methylcytidine-3'-phosphate
  modified_base 16: mod_base = OTHER; note = 2'-O-methyladenosine-3'-phosphate
  modified_base 17: mod_base = OTHER; note = 2'-O-methyluridine-3'-phosphate
  modified_base 18: mod_base = OTHER; note = 2'-O-methylguanosine-3'-phosphate
  modified_base 19: mod_base = OTHER; note = 2'-O-methyladenosine-3'-phosphorothioate
  modified_base 20: mod_base = OTHER; note = 2'-O-methyladenosine-3'-phosphorothioate
  modified_base 21: mod_base = OTHER; note = 2'-O-methyladenosine-3'-phosphate
tggtatctgaatatcatgaaa

SEQ ID NO: 1565 - RNA, 21 nt, synthetic construct
  source 1..21: mol_type = other RNA
  modified_base 1: mod_base = OTHER; note = 2'-O-methyluridine-3'-phosphorothioate
  modified_base 2: mod_base = OTHER; note = 2'-O-methylguanosine-3'-phosphorothioate
  modified_base 3: mod_base = OTHER; note = 2'-O-methyluridine-3'-phosphate
  modified_base 4: mod_base = OTHER; note = 2'-O-methyluridine-3'-phosphate
  modified_base 5: mod_base = OTHER; note = 2'-O-methylguanosine-3'-phosphate
  modified_base 6: mod_base = OTHER; note 2-amino-9-((2R,3S,4S,5R)-3-(docosyloxy)-4-hydroxy-5-(hydrox ymethyl)tetrahydrofuran-2-yl)-1,9-dihydro-6H-purin-6-one
  modified_base 7: mod_base = OTHER; note = 2'-fluorouridine-3'-phosphate
  modified_base 8: mod_base = OTHER; note = 2'-O-methyluridine-3'-phosphate
  modified_base 9: mod_base = OTHER; note = 2'-fluorouridine-3'-phosphate
  modified_base 10: mod_base = OTHER; note = 2'-fluoroadenosine-3'-phosphate
  modified_base 11: mod_base = OTHER; note = 2'-fluoroadenosine-3'-phosphate
  modified_base 12: mod_base = OTHER; note = 2'-O-methyluridine-3'-phosphate
  modified_base 13: mod_base = OTHER; note = 2'-O-methyluridine-3'-phosphate
  modified_base 14: mod_base = OTHER; note = 2'-O-methyluridine-3'-phosphate
  modified_base 15: mod_base = OTHER; note = 2'-O-methyluridine-3'-phosphate
  modified_base 16: mod_base = OTHER; note = 2'-O-methyluridine-3'-phosphate
  modified_base 17: mod_base = OTHER; note = 2'-O-methylcytidine-3'-phosphate
  modified_base 18: mod_base = OTHER; note = 2'-O-methyladenosine-3'-phosphate
  modified_base 19: mod_base = OTHER; note = 2'-O-methyladenosine-3'-phosphorothioate
  modified_base 20: mod_base = OTHER; note = 2'-O-methylcytidine-3'-phosphorothioate
  modified_base 21: mod_base = OTHER; note = 2'-O-methyladenosine-3'-phosphate
tgttggtttaatttttcaaca

SEQ ID NO: 1566 - RNA, 21 nt, synthetic construct
  source 1..21: mol_type = other RNA
  modified_base 1: mod_base = OTHER; note = 2'-O-methyluridine-3'-phosphorothioate
  modified_base 2: mod_base = OTHER; note = 2'-O-methyladenosine-3'-phosphorothioate
  modified_base 3: mod_base = OTHER; note = 2'-O-methylguanosine-3'-phosphate
  modified_base 4: mod_base = OTHER; note = 2'-O-methyluridine-3'-phosphate
  modified_base 5: mod_base = OTHER; note = 2'-O-methyluridine-3'-phosphate
  modified_base 6: mod_base = OTHER; note 2-amino-9-((2R,3S,4S,5R)-3-(docosyloxy)-4-hydroxy-5-(hydrox ymethyl)tetrahydrofuran-2-yl)-1,9-dihydro-6H-purin-6-one
  modified_base 7: mod_base = OTHER; note = 2'-fluorouridine-3'-phosphate
  modified_base 8: mod_base = OTHER; note = 2'-O-methyladenosine-3'-phosphate
  modified_base 9: mod_base = OTHER; note = 2'-fluoroadenosine-3'-phosphate
  modified_base 10: mod_base = OTHER; note = 2'-fluorouridine-3'-phosphate
  modified_base 11: mod_base = OTHER; note = 2'-fluorouridine-3'-phosphate
  modified_base 12: mod_base = OTHER; note = 2'-O-methyluridine-3'-phosphate
  modified_base 13: mod_base = OTHER; note = 2'-O-methyladenosine-3'-phosphate
  modified_base 14: mod_base = OTHER; note = 2'-O-methyladenosine-3'-phosphate
  modified_base 15: mod_base = OTHER; note = 2'-O-methyladenosine-3'-phosphate
  modified_base 16: mod_base = OTHER; note = 2'-O-methyluridine-3'-phosphate
  modified_base 17: mod_base = OTHER; note = 2'-O-methylguanosine-3'-phosphate
  modified_base 18: mod_base = OTHER; note = 2'-O-methyluridine-3'-phosphate
  modified_base 19: mod_base = OTHER; note = 2'-O-methylguanosine-3'-phosphorothioate
  modified_base 20: mod_base = OTHER; note = 2'-O-methylguanosine-3'-phosphorothioate
  modified_base 21: mod_base = OTHER; note = 2'-O-methyladenosine-3'-phosphate
tagttgtaatttaaatgtgga

SEQ ID NO: 1567 - RNA, 21 nt, synthetic construct
  source 1..21: mol_type = other RNA
  modified_base 1: mod_base = OTHER; note = 2'-O-methylguanosine-3'-phosphorothioate
  modified_base 2: mod_base = OTHER; note = 2'-O-methyluridine-3'-phosphorothioate
  modified_base 3: mod_base = OTHER; note = 2'-O-methylguanosine-3'-phosphate
  modified_base 4: mod_base = OTHER; note = 2'-O-methyladenosine-3'-phosphate
  modified_base 5: mod_base = OTHER; note = 2'-O-methyladenosine-3'-phosphate
  modified_base 6: mod_base = OTHER; note 1-((2R,3R,4R,5R)-3-(docosyloxy)-4-hydroxy-5-(hydroxymethyl) tetrahydrofuran-2-yl)pyrimidine-2,4(1H,3H)-dione
  modified_base 7: mod_base = OTHER; note = 2'-fluoroguanosine-3'-phosphate
  modified_base 8: mod_base = OTHER; note = 2'-O-methyluridine-3'-phosphate
  modified_base 9: mod_base = OTHER; note = 2'-fluorouridine-3'-phosphate
  modified_base 10: mod_base = OTHER; note = 2'-fluorouridine-3'-phosphate
  modified_base 11: mod_base = OTHER; note = 2'-fluorouridine-3'-phosphate
  modified_base 12: mod_base = OTHER; note = 2'-O-methyluridine-3'-phosphate
  modified_base 13: mod_base = OTHER; note = 2'-O-methylguanosine-3'-phosphate
  modified_base 14: mod_base = OTHER; note = 2'-O-methylcytidine-3'-phosphate
  modified_base 15: mod_base = OTHER; note = 2'-O-methylcytidine-3'-phosphate
  modified_base 16: mod_base = OTHER; note = 2'-O-methyladenosine-3'-phosphate
  modified_base 17: mod_base = OTHER; note = 2'-O-methyluridine-3'-phosphate
  modified_base 18: mod_base = OTHER; note = 2'-O-methyluridine-3'-phosphate
  modified_base 19: mod_base = OTHER; note = 2'-O-methyluridine-3'-phosphorothioate
  modified_base 20: mod_base = OTHER; note = 2'-O-methyluridine-3'-phosphorothioate
  modified_base 21: mod_base = OTHER; note = 2'-O-methyladenosine-3'-phosphate
gtgaatgtttttgccatttta

SEQ ID NO: 1568 - RNA, 21 nt, synthetic construct
  source 1..21: mol_type = other RNA
  modified_base 1: mod_base = OTHER; note = 2'-O-methylcytidine-3'-phosphorothioate
  modified_base 2: mod_base = OTHER; note = 2'-O-methyladenosine-3'-phosphorothioate
  modified_base 3: mod_base = OTHER; note = 2'-O-methylguanosine-3'-phosphate
  modified_base 4: mod_base = OTHER; note = 2'-O-methyladenosine-3'-phosphate
  modified_base 5: mod_base = OTHER; note = 2'-O-methylguanosine-3'-phosphate
  modified_base 6: mod_base = OTHER; note (2R,3S,4S,5R)-5-(6-amino-9H-purin-9-yl)-4-(docosyloxy)-2-(h ydroxymethyl)tetrahydrofuran-3-ol
  modified_base 7: mod_base = OTHER; note = 2'-fluorouridine-3'-phosphate
  modified_base 8: mod_base = OTHER; note = 2'-O-methylguanosine-3'-phosphate
  modified_base 9: mod_base = OTHER; note = 2'-fluoroadenosine-3'-phosphate
  modified_base 10: mod_base = OTHER; note = 2'-fluorouridine-3'-phosphate
  modified_base 11: mod_base = OTHER; note = 2'-fluorouridine-3'-phosphate
  modified_base 12: mod_base = OTHER; note = 2'-O-methyluridine-3'-phosphate
  modified_base 13: mod_base = OTHER; note = 2'-O-methyluridine-3'-phosphate
  modified_base 14: mod_base = OTHER; note = 2'-O-methyluridine-3'-phosphate
  modified_base 15: mod_base = OTHER; note = 2'-O-methylcytidine-3'-phosphate
  modified_base 16: mod_base = OTHER; note = 2'-O-methyluridine-3'-phosphate
  modified_base 17: mod_base = OTHER; note = 2'-O-methyluridine-3'-phosphate
  modified_base 18: mod_base = OTHER; note = 2'-O-methyluridine-3'-phosphate
  modified_base 19: mod_base = OTHER; note = 2'-O-methyluridine-3'-phosphorothioate
  modified_base 20: mod_base = OTHER; note = 2'-O-methyladenosine-3'-phosphorothioate
  modified_base 21: mod_base = OTHER; note = 2'-O-methyladenosine-3'-phosphate
cagagatgatttttcttttaa

SEQ ID NO: 1569 - RNA, 21 nt, synthetic construct
  source 1..21: mol_type = other RNA
  modified_base 1: mod_base = OTHER; note = 2'-O-methyladenosine-3'-phosphorothioate
  modified_base 2: mod_base = OTHER; note = 2'-O-methylguanosine-3'-phosphorothioate
  modified_base 3: mod_base = OTHER; note = 2'-O-methyladenosine-3'-phosphate
  modified_base 4: mod_base = OTHER; note = 2'-O-methyladenosine-3'-phosphate
  modified_base 5: mod_base = OTHER; note = 2'-O-methyladenosine-3'-phosphate
  modified_base 6: mod_base = OTHER; note (2R,3S,4S,5R)-5-(6-amino-9H-purin-9-yl)-4-(docosyloxy)-2-(h ydroxymethyl)tetrahydrofuran-3-ol
  modified_base 7: mod_base = OTHER; note = 2'-fluorouridine-3'-phosphate
  modified_base 8: mod_base = OTHER; note = 2'-O-methyluridine-3'-phosphate
  modified_base 9: mod_base = OTHER; note = 2'-fluoroadenosine-3'-phosphate
  modified_base 10: mod_base = OTHER; note = 2'-fluoroguanosine-3'-phosphate
  modified_base 11: mod_base = OTHER; note = 2'-fluoroadenosine-3'-phosphate
  modified_base 12: mod_base = OTHER; note = 2'-O-methyluridine-3'-phosphate
  modified_base 13: mod_base = OTHER; note = 2'-O-methyluridine-3'-phosphate
  modified_base 14: mod_base = OTHER; note = 2'-O-methylcytidine-3'-phosphate
  modified_base 15: mod_base = OTHER; note = 2'-O-methyladenosine-3'-phosphate
  modified_base 16: mod_base = OTHER; note = 2'-O-methylguanosine-3'-phosphate
  modified_base 17: mod_base = OTHER; note = 2'-O-methyladenosine-3'-phosphate
  modified_base 18: mod_base = OTHER; note = 2'-O-methyluridine-3'-phosphate
  modified_base 19: mod_base = OTHER; note = 2'-O-methylcytidine-3'-phosphorothioate
  modified_base 20: mod_base = OTHER; note = 2'-O-methyluridine-3'-phosphorothioate
  modified_base 21: mod_base = OTHER; note = 2'-O-methyladenosine-3'-phosphate
agaaaattagattcagatcta

SEQ ID NO: 1570 - RNA, 21 nt, synthetic construct
  source 1..21: mol_type = other RNA
  modified_base 1: mod_base = OTHER; note = 2'-O-methyladenosine-3'-phosphorothioate
  modified_base 2: mod_base = OTHER; note = 2'-O-methylcytidine-3'-phosphorothioate
  modified_base 3: mod_base = OTHER; note = 2'-O-methyluridine-3'-phosphate
  modified_base 4: mod_base = OTHER; note = 2'-O-methylguanosine-3'-phosphate
  modified_base 5: mod_base = OTHER; note = 2'-O-methylguanosine-3'-phosphate
  modified_base 6: mod_base = OTHER; note (2R,3S,4S,5R)-5-(6-amino-9H-purin-9-yl)-4-(docosyloxy)-2-(h ydroxymethyl)tetrahydrofuran-3-ol
  modified_base 7: mod_base = OTHER; note = 2'-fluoroadenosine-3'-phosphate
  modified_base 8: mod_base = OTHER; note = 2'-O-methyladenosine-3'-phosphate
  modified_base 9: mod_base = OTHER; note = 2'-fluoroadenosine-3'-phosphate
  modified_base 10: mod_base = OTHER; note = 2'-fluorouridine-3'-phosphate
  modified_base 11: mod_base = OTHER; note = 2'-fluorouridine-3'-phosphate
  modified_base 12: mod_base = OTHER; note = 2'-O-methyladenosine-3'-phosphate
  modified_base 13: mod_base = OTHER; note = 2'-O-methyladenosine-3'-phosphate
  modified_base 14: mod_base = OTHER; note = 2'-O-methylguanosine-3'-phosphate
  modified_base 15: mod_base = OTHER; note = 2'-O-methyladenosine-3'-phosphate
  modified_base 16: mod_base = OTHER; note = 2'-O-methyladenosine-3'-phosphate
  modified_base 17: mod_base = OTHER; note = 2'-O-methyladenosine-3'-phosphate
  modified_base 18: mod_base = OTHER; note = 2'-O-methylguanosine-3'-phosphate
  modified_base 19: mod_base = OTHER; note = 2'-O-methyluridine-3'-phosphorothioate
  modified_base 20: mod_base = OTHER; note = 2'-O-methyladenosine-3'-phosphorothioate
  modified_base 21: mod_base = OTHER; note = 2'-O-methyladenosine-3'-phosphate
actggaaaattaagaaagtaa

SEQ ID NO: 1571 - RNA, 21 nt, synthetic construct
  source 1..21: mol_type = other RNA
  modified_base 1: mod_base = OTHER; note = 2'-O-methyluridine-3'-phosphorothioate
  modified_base 2: mod_base = OTHER; note = 2'-O-methyladenosine-3'-phosphorothioate
  modified_base 3: mod_base = OTHER; note = 2'-O-methyladenosine-3'-phosphate
  modified_base 4: mod_base = OTHER; note = 2'-O-methyladenosine-3'-phosphate
  modified_base 5: mod_base = OTHER; note = 2'-O-methylguanosine-3'-phosphate
  modified_base 6: mod_base = OTHER; note 1-((2R,3R,4R,5R)-3-(docosyloxy)-4-hydroxy-5-(hydroxymethyl) tetrahydrofuran-2-yl)pyrimidine-2,4(1H,3H)-dione
  modified_base 7: mod_base = OTHER; note = 2'-fluoroguanosine-3'-phosphate
  modified_base 8: mod_base = OTHER; note = 2'-O-methylguanosine-3'-phosphate
  modified_base 9: mod_base = OTHER; note = 2'-fluoroguanosine-3'-phosphate
  modified_base 10: mod_base = OTHER; note = 2'-fluoroadenosine-3'-phosphate
  modified_base 11: mod_base = OTHER; note = 2'-fluoroadenosine-3'-phosphate
  modified_base 12: mod_base = OTHER; note = 2'-O-methyladenosine-3'-phosphate
  modified_base 13: mod_base = OTHER; note = 2'-O-methylguanosine-3'-phosphate
  modified_base 14: mod_base = OTHER; note = 2'-O-methyladenosine-3'-phosphate
  modified_base 15: mod_base = OTHER; note = 2'-O-methyluridine-3'-phosphate
  modified_base 16: mod_base = OTHER; note = 2'-O-methyladenosine-3'-phosphate
  modified_base 17: mod_base = OTHER; note = 2'-O-methyladenosine-3'-phosphate
  modified_base 18: mod_base = OTHER; note = 2'-O-methyluridine-3'-phosphate
  modified_base 19: mod_base = OTHER; note = 2'-O-methyladenosine-3'-phosphorothioate
  modified_base 20: mod_base = OTHER; note = 2'-O-methyladenosine-3'-phosphorothioate
  modified_base 21: mod_base = OTHER; note = 2'-O-methyladenosine-3'-phosphate
taaagtgggaaagataataaa

SEQ ID NO: 1572 - RNA, 21 nt, synthetic construct
  source 1..21: mol_type = other RNA
  modified_base 1: mod_base = OTHER; note = 2'-O-methylcytidine-3'-phosphorothioate
  modified_base 2: mod_base = OTHER; note = 2'-O-methyluridine-3'-phosphorothioate
  modified_base 3: mod_base = OTHER; note = 2'-O-methyladenosine-3'-phosphate
  modified_base 4: mod_base = OTHER; note = 2'-O-methylguanosine-3'-phosphate
  modified_base 5: mod_base = OTHER; note = 2'-O-methylguanosine-3'-phosphate
  modified_base 6: mod_base = OTHER; note 4-amino-1-((2R,3R,4R,5R)-3-(docosyloxy)-4-hydroxy-5-(hydrox ymethyl)tetrahydrofuran-2-yl)pyrimidin-2(1H)-one
  modified_base 7: mod_base = OTHER; note = 2'-fluorouridine-3'-phosphate
  modified_base 8: mod_base = OTHER; note = 2'-O-methyladenosine-3'-phosphate
  modified_base 9: mod_base = OTHER; note = 2'-fluoroadenosine-3'-phosphate
  modified_base 10: mod_base = OTHER; note = 2'-fluoroguanosine-3'-phosphate
  modified_base 11: mod_base = OTHER; note = 2'-fluoroadenosine-3'-phosphate
  modified_base 12: mod_base = OTHER; note = 2'-O-methyladenosine-3'-phosphate
  modified_base 13: mod_base = OTHER; note = 2'-O-methyladenosine-3'-phosphate
  modified_base 14: mod_base = OTHER; note = 2'-O-methylguanosine-3'-phosphate
  modified_base 15: mod_base = OTHER; note = 2'-O-methyladenosine-3'-phosphate
  modified_base 16: mod_base = OTHER; note = 2'-O-methylguanosine-3'-phosphate
  modified_base 17: mod_base = OTHER; note = 2'-O-methyluridine-3'-phosphate
  modified_base 18: mod_base = OTHER; note = 2'-O-methyluridine-3'-phosphate
  modified_base 19: mod_base = OTHER; note = 2'-O-methylguanosine-3'-phosphorothioate
  modified_base 20: mod_base = OTHER; note = 2'-O-methyluridine-3'-phosphorothioate
  modified_base 21: mod_base = OTHER; note = 2'-O-methyladenosine-3'-phosphate
ctaggctaagaaagagttgta

SEQ ID NO: 1573 - RNA, 21 nt, synthetic construct
  source 1..21: mol_type = other RNA
  modified_base 1: mod_base = OTHER; note = 2'-O-methylguanosine-3'-phosphorothioate
  modified_base 2: mod_base = OTHER; note = 2'-O-methylcytidine-3'-phosphorothioate
  modified_base 3: mod_base = OTHER; note = 2'-O-methyluridine-3'-phosphate
  modified_base 4: mod_base = OTHER; note = 2'-O-methylguanosine-3'-phosphate
  modified_base 5: mod_base = OTHER; note = 2'-O-methyladenosine-3'-phosphate
  modified_base 6: mod_base = OTHER; note 1-((2R,3R,4R,5R)-3-(docosyloxy)-4-hydroxy-5-(hydroxymethyl) tetrahydrofuran-2-yl)pyrimidine-2,4(1H,3H)-dione
  modified_base 7: mod_base = OTHER; note = 2'-fluoroadenosine-3'-phosphate
  modified_base 8: mod_base = OTHER; note = 2'-O-methyladenosine-3'-phosphate
  modified_base 9: mod_base = OTHER; note = 2'-fluoroadenosine-3'-phosphate
  modified_base 10: mod_base = OTHER; note = 2'-fluoroadenosine-3'-phosphate
  modified_base 11: mod_base = OTHER; note = 2'-fluorouridine-3'-phosphate
  modified_base 12: mod_base = OTHER; note = 2'-O-methyluridine-3'-phosphate
  modified_base 13: mod_base = OTHER; note = 2'-O-methyladenosine-3'-phosphate
  modified_base 14: mod_base = OTHER; note = 2'-O-methyladenosine-3'-phosphate
  modified_base 15: mod_base = OTHER; note = 2'-O-methyluridine-3'-phosphate
  modified_base 16: mod_base = OTHER; note = 2'-O-methylguanosine-3'-phosphate
  modified_base 17: mod_base = OTHER; note = 2'-O-methylguanosine-3'-phosphate
  modified_base 18: mod_base = OTHER; note = 2'-O-methyladenosine-3'-phosphate
  modified_base 19: mod_base = OTHER; note = 2'-O-methyluridine-3'-phosphorothioate
  modified_base 20: mod_base = OTHER; note = 2'-O-methyladenosine-3'-phosphorothioate
  modified_base 21: mod_base = OTHER; note = 2'-O-methyladenosine-3'-phosphate
gctgataaaattaatggataa

SEQ ID NO: 1574 - RNA, 21 nt, synthetic construct
  source 1..21: mol_type = other RNA
  modified_base 1: mod_base = OTHER; note = 2'-O-methylcytidine-3'-phosphorothioate
  modified_base 2: mod_base = OTHER; note = 2'-O-methylcytidine-3'-phosphorothioate
  modified_base 3: mod_base = OTHER; note = 2'-O-methyluridine-3'-phosphate
  modified_base 4: mod_base = OTHER; note = 2'-O-methylguanosine-3'-phosphate
  modified_base 5: mod_base = OTHER; note = 2'-O-methyluridine-3'-phosphate
  modified_base 6: mod_base = OTHER; note (2R,3S,4S,5R)-5-(6-amino-9H-purin-9-yl)-4-(docosyloxy)-2-(h ydroxymethyl)tetrahydrofuran-3-ol
  modified_base 7: mod_base = OTHER; note = 2'-fluorouridine-3'-phosphate
  modified_base 8: mod_base = OTHER; note = 2'-O-methyluridine-3'-phosphate
  modified_base 9: mod_base = OTHER; note = 2'-fluorouridine-3'-phosphate
  modified_base 10: mod_base = OTHER; note = 2'-fluorocytidine-3'-phosphate
  modified_base 11: mod_base = OTHER; note = 2'-fluorouridine-3'-phosphate
  modified_base 12: mod_base = OTHER; note = 2'-O-methyluridine-3'-phosphate
  modified_base 13: mod_base = OTHER; note = 2'-O-methyluridine-3'-phosphate
  modified_base 14: mod_base = OTHER; note = 2'-O-methyladenosine-3'-phosphate
  modified_base 15: mod_base = OTHER; note = 2'-O-methylguanosine-3'-phosphate
  modified_base 16: mod_base = OTHER; note = 2'-O-methyluridine-3'-phosphate
  modified_base 17: mod_base = OTHER; note = 2'-O-methyluridine-3'-phosphate
  modified_base 18: mod_base = OTHER; note = 2'-O-methylguanosine-3'-phosphate
  modified_base 19: mod_base = OTHER; note = 2'-O-methyluridine-3'-phosphorothioate
  modified_base 20: mod_base = OTHER; note = 2'-O-methylcytidine-3'-phosphorothioate
  modified_base 21: mod_base = OTHER; note = 2'-O-methyladenosine-3'-phosphate
cctgtatttctttagttgtca

SEQ ID NO: 1575 - RNA, 21 nt, synthetic construct
  source 1..21: mol_type = other RNA
  modified_base 1: mod_base = OTHER; note = 2'-O-methyluridine-3'-phosphorothioate
  modified_base 2: mod_base = OTHER; note = 2'-O-methyluridine-3'-phosphorothioate
  modified_base 3: mod_base = OTHER; note = 2'-O-methyluridine-3'-phosphate
  modified_base 4: mod_base = OTHER; note = 2'-O-methylguanosine-3'-phosphate
  modified_base 5: mod_base = OTHER; note = 2'-O-methyluridine-3'-phosphate
  modified_base 6: mod_base = OTHER; note 1-((2R,3R,4R,5R)-3-(docosyloxy)-4-hydroxy-5-(hydroxymethyl) tetrahydrofuran-2-yl)pyrimidine-2,4(1H,3H)-dione
  modified_base 7: mod_base = OTHER; note = 2'-fluorouridine-3'-phosphate
  modified_base 8: mod_base = OTHER; note = 2'-O-methyluridine-3'-phosphate
  modified_base 9: mod_base = OTHER; note = 2'-fluoroguanosine-3'-phosphate
  modified_base 10: mod_base = OTHER; note = 2'-fluorocytidine-3'-phosphate
  modified_base 11: mod_base = OTHER; note = 2'-fluorouridine-3'-phosphate
  modified_base 12: mod_base = OTHER; note = 2'-O-methyluridine-3'-phosphate
  modified_base 13: mod_base = OTHER; note = 2'-O-methyluridine-3'-phosphate
  modified_base 14: mod_base = OTHER; note = 2'-O-methyluridine-3'-phosphate
  modified_base 15: mod_base = OTHER; note = 2'-O-methylguanosine-3'-phosphate
  modified_base 16: mod_base = OTHER; note = 2'-O-methyladenosine-3'-phosphate
  modified_base 17: mod_base = OTHER; note = 2'-O-methylcytidine-3'-phosphate
  modified_base 18: mod_base = OTHER; note = 2'-O-methyladenosine-3'-phosphate
  modified_base 19: mod_base = OTHER; note = 2'-O-methyladenosine-3'-phosphorothioate
  modified_base 20: mod_base = OTHER; note = 2'-O-methyladenosine-3'-phosphorothioate
  modified_base 21: mod_base = OTHER; note = 2'-O-methyladenosine-3'-phosphate
tttgttttgcttttgacaaaa

SEQ ID NO: 1576 - RNA, 21 nt, synthetic construct
  source 1..21: mol_type = other RNA
  modified_base 1: mod_base = OTHER; note = 2'-O-methyluridine-3'-phosphorothioate
  modified_base 2: mod_base = OTHER; note = 2'-O-methylguanosine-3'-phosphorothioate
  modified_base 3: mod_base = OTHER; note = 2'-O-methylguanosine-3'-phosphate
  modified_base 4: mod_base = OTHER; note = 2'-O-methylcytidine-3'-phosphate
  modified_base 5: mod_base = OTHER; note = 2'-O-methyluridine-3'-phosphate
  modified_base 6: mod_base = OTHER; note 2-amino-9-((2R,3S,4S,5R)-3-(docosyloxy)-4-hydroxy-5-(hydrox ymethyl)tetrahydrofuran-2-yl)-1,9-dihydro-6H-purin-6-one
  modified_base 7: mod_base = OTHER; note = 2'-fluorouridine-3'-phosphate
  modified_base 8: mod_base = OTHER; note = 2'-O-methylguanosine-3'-phosphate
  modified_base 9: mod_base = OTHER; note = 2'-fluoroadenosine-3'-phosphate
  modified_base 10: mod_base = OTHER; note = 2'-fluoroadenosine-3'-phosphate
  modified_base 11: mod_base = OTHER; note = 2'-fluoroadenosine-3'-phosphate
  modified_base 12: mod_base = OTHER; note = 2'-O-methyladenosine-3'-phosphate
  modified_base 13: mod_base = OTHER; note = 2'-O-methyluridine-3'-phosphate
  modified_base 14: mod_base = OTHER; note = 2'-O-methyladenosine-3'-phosphate
  modified_base 15: mod_base = OTHER; note = 2'-O-methyluridine-3'-phosphate
  modified_base 16: mod_base = OTHER; note = 2'-O-methyluridine-3'-phosphate
  modified_base 17: mod_base = OTHER; note = 2'-O-methylcytidine-3'-phosphate
  modified_base 18: mod_base = OTHER; note = 2'-O-methyluridine-3'-phosphate
  modified_base 19: mod_base = OTHER; note = 2'-O-methylcytidine-3'-phosphorothioate
  modified_base 20: mod_base = OTHER; note = 2'-O-methylcytidine-3'-phosphorothioate
  modified_base 21: mod_base = OTHER; note = 2'-O-methyladenosine-3'-phosphate
tggctgtgaaaatattctcca

SEQ ID NO: 1577 - RNA, 21 nt, synthetic construct
  source 1..21: mol_type = other RNA
  modified_base 1: mod_base = OTHER; note = 2'-O-methyladenosine-3'-phosphorothioate
  modified_base 2: mod_base = OTHER; note = 2'-O-methylcytidine-3'-phosphorothioate
  modified_base 3: mod_base = OTHER; note = 2'-O-methyluridine-3'-phosphate
  modified_base 4: mod_base = OTHER; note = 2'-O-methyladenosine-3'-phosphate
  modified_base 5: mod_base = OTHER; note = 2'-O-methyluridine-3'-phosphate
  modified_base 6: mod_base = OTHER; note 1-((2R,3R,4R,5R)-3-(docosyloxy)-4-hydroxy-5-(hydroxymethyl) tetrahydrofuran-2-yl)pyrimidine-2,4(1H,3H)-dione
  modified_base 7: mod_base = OTHER; note = 2'-fluorouridine-3'-phosphate
  modified_base 8: mod_base = OTHER; note = 2'-O-methyluridine-3'-phosphate
  modified_base 9: mod_base = OTHER; note = 2'-fluoroadenosine-3'-phosphate
  modified_base 10: mod_base = OTHER; note = 2'-fluoroguanosine-3'-phosphate
  modified_base 11: mod_base = OTHER; note = 2'-fluoroguanosine-3'-phosphate
  modified_base 12: mod_base = OTHER; note = 2'-O-methylcytidine-3'-phosphate
  modified_base 13: mod_base = OTHER; note = 2'-O-methyladenosine-3'-phosphate
  modified_base 14: mod_base = OTHER; note = 2'-O-methyluridine-3'-phosphate
  modified_base 15: mod_base = OTHER; note = 2'-O-methyladenosine-3'-phosphate
  modified_base 16: mod_base = OTHER; note = 2'-O-methylguanosine-3'-phosphate
  modified_base 17: mod_base = OTHER; note = 2'-O-methylcytidine-3'-phosphate
  modified_base 18: mod_base = OTHER; note = 2'-O-methyladenosine-3'-phosphate
  modified_base 19: mod_base = OTHER; note = 2'-O-methylcytidine-3'-phosphorothioate
  modified_base 20: mod_base = OTHER; note = 2'-O-methyluridine-3'-phosphorothioate
  modified_base 21: mod_base = OTHER; note = 2'-O-methyladenosine-3'-phosphate
actattttaggcatagcacta

SEQ ID NO: 1578 - RNA, 21 nt, synthetic construct
  source 1..21: mol_type = other RNA
  modified_base 1: mod_base = OTHER; note = 2'-O-methyluridine-3'-phosphorothioate
  modified_base 2: mod_base = OTHER; note = 2'-O-methyluridine-3'-phosphorothioate
  modified_base 3: mod_base = OTHER; note = 2'-O-methyluridine-3'-phosphate
  modified_base 4: mod_base = OTHER; note = 2'-O-methylcytidine-3'-phosphate
  modified_base 5: mod_base = OTHER; note = 2'-O-methyladenosine-3'-phosphate
  modified_base 6: mod_base = OTHER; note 2-amino-9-((2R,3S,4S,5R)-3-(docosyloxy)-4-hydroxy-5-(hydrox ymethyl)tetrahydrofuran-2-yl)-1,9-dihydro-6H-purin-6-one
  modified_base 7: mod_base = OTHER; note = 2'-fluorouridine-3'-phosphate
  modified_base 8: mod_base = OTHER; note = 2'-O-methyladenosine-3'-phosphate
  modified_base 9: mod_base = OTHER; note = 2'-fluorocytidine-3'-phosphate
  modified_base 10: mod_base = OTHER; note = 2'-fluorouridine-3'-phosphate
  modified_base 11: mod_base = OTHER; note = 2'-fluoroguanosine-3'-phosphate
  modified_base 12: mod_base = OTHER; note = 2'-O-methyluridine-3'-phosphate
  modified_base 13: mod_base = OTHER; note = 2'-O-methyladenosine-3'-phosphate
  modified_base 14: mod_base = OTHER; note = 2'-O-methyluridine-3'-phosphate
  modified_base 15: mod_base = OTHER; note = 2'-O-methyladenosine-3'-phosphate
  modified_base 16: mod_base = OTHER; note = 2'-O-methyladenosine-3'-phosphate
  modified_base 17: mod_base = OTHER; note = 2'-O-methyladenosine-3'-phosphate
  modified_base 18: mod_base = OTHER; note = 2'-O-methylguanosine-3'-phosphate
  modified_base 19: mod_base = OTHER; note = 2'-O-methyluridine-3'-phosphorothioate
  modified_base 20: mod_base = OTHER; note = 2'-O-methylguanosine-3'-phosphorothioate
  modified_base 21: mod_base = OTHER; note = 2'-O-methyladenosine-3'-phosphate
tttcagtactgtataaagtga

SEQ ID NO: 1579 - RNA, 21 nt, synthetic construct
  source 1..21: mol_type = other RNA
  modified_base 1: mod_base = OTHER; note = 2'-O-methylguanosine-3'-phosphorothioate
  modified_base 2: mod_base = OTHER; note = 2'-O-methyluridine-3'-phosphorothioate
  modified_base 3: mod_base = OTHER; note = 2'-O-methylguanosine-3'-phosphate
  modified_base 4: mod_base = OTHER; note = 2'-O-methyladenosine-3'-phosphate
  modified_base 5: mod_base = OTHER; note = 2'-O-methyluridine-3'-phosphate
  modified_base 6: mod_base = OTHER; note 2-amino-9-((2R,3S,4S,5R)-3-(docosyloxy)-4-hydroxy-5-(hydrox ymethyl)tetrahydrofuran-2-yl)-1,9-dihydro-6H-purin-6-one
  modified_base 7: mod_base = OTHER; note = 2'-fluorocytidine-3'-phosphate
  modified_base 8: mod_base = OTHER; note = 2'-O-methyladenosine-3'-phosphate
  modified_base 9: mod_base = OTHER; note = 2'-fluoroadenosine-3'-phosphate
  modified_base 10: mod_base = OTHER; note = 2'-fluorouridine-3'-phosphate
  modified_base 11: mod_base = OTHER; note = 2'-fluorocytidine-3'-phosphate
  modified_base 12: mod_base = OTHER; note = 2'-O-methyluridine-3'-phosphate
  modified_base 13: mod_base = OTHER; note = 2'-O-methyladenosine-3'-phosphate
  modified_base 14: mod_base = OTHER; note = 2'-O-methyluridine-3'-phosphate
  modified_base 15: mod_base = OTHER; note = 2'-O-methylguanosine-3'-phosphate
  modified_base 16: mod_base = OTHER; note = 2'-O-methyluridine-3'-phosphate
  modified_base 17: mod_base = OTHER; note = 2'-O-methyluridine-3'-phosphate
  modified_base 18: mod_base = OTHER; note = 2'-O-methyluridine-3'-phosphate
  modified_base 19: mod_base = OTHER; note = 2'-O-methylcytidine-3'-phosphorothioate
  modified_base 20: mod_base = OTHER; note = 2'-O-methylcytidine-3'-phosphorothioate
  modified_base 21: mod_base = OTHER; note = 2'-O-methyladenosine-3'-phosphate
gtgatgcaatctatgtttcca

SEQ ID NO: 1580 - RNA, 21 nt, synthetic construct
  source 1..21: mol_type = other RNA
  modified_base 1: mod_base = OTHER; note = 2'-O-methyluridine-3'-phosphorothioate
  modified_base 2: mod_base = OTHER; note = 2'-O-methylguanosine-3'-phosphorothioate
  modified_base 3: mod_base = OTHER; note = 2'-O-methyluridine-3'-phosphate
  modified_base 4: mod_base = OTHER; note = 2'-O-methyluridine-3'-phosphate
  modified_base 5: mod_base = OTHER; note = 2'-O-methyluridine-3'-phosphate
  modified_base 6: mod_base = OTHER; note 2-amino-9-((2R,3S,4S,5R)-3-(docosyloxy)-4-hydroxy-5-(hydrox ymethyl)tetrahydrofuran-2-yl)-1,9-dihydro-6H-purin-6-one
  modified_base 7: mod_base = OTHER; note = 2'-fluoroguanosine-3'-phosphate
  modified_base 8: mod_base = OTHER; note = 2'-O-methylcytidine-3'-phosphate
  modified_base 9: mod_base = OTHER; note = 2'-fluoroadenosine-3'-phosphate
  modified_base 10: mod_base = OTHER; note = 2'-fluoroguanosine-3'-phosphate
  modified_base 11: mod_base = OTHER; note = 2'-fluoroadenosine-3'-phosphate
  modified_base 12: mod_base = OTHER; note = 2'-O-methyluridine-3'-phosphate
  modified_base 13: mod_base = OTHER; note = 2'-O-methylcytidine-3'-phosphate
  modified_base 14: mod_base = OTHER; note = 2'-O-methyluridine-3'-phosphate
  modified_base 15: mod_base = OTHER; note = 2'-O-methylcytidine-3'-phosphate
  modified_base 16: mod_base = OTHER; note = 2'-O-methyladenosine-3'-phosphate
  modified_base 17: mod_base = OTHER; note = 2'-O-methyluridine-3'-phosphate
  modified_base 18: mod_base = OTHER; note = 2'-O-methylcytidine-3'-phosphate
  modified_base 19: mod_base = OTHER; note = 2'-O-methyladenosine-3'-phosphorothioate
  modified_base 20: mod_base = OTHER; note = 2'-O-methyladenosine-3'-phosphorothioate
  modified_base 21: mod_base = OTHER; note = 2'-O-methyladenosine-3'-phosphate
tgtttggcagatctcatcaaa

SEQ ID NO: 1581 - RNA, 21 nt, synthetic construct
  source 1..21: mol_type = other RNA
  modified_base 1: mod_base = OTHER; note = 2'-O-methyladenosine-3'-phosphorothioate
  modified_base 2: mod_base = OTHER; note = 2'-O-methyladenosine-3'-phosphorothioate
  modified_base 3: mod_base = OTHER; note = 2'-O-methylguanosine-3'-phosphate
  modified_base 4: mod_base = OTHER; note = 2'-O-methylguanosine-3'-phosphate
  modified_base 5: mod_base = OTHER; note = 2'-O-methyluridine-3'-phosphate
  modified_base 6: mod_base = OTHER; note 1-((2R,3R,4R,5R)-3-(docosyloxy)-4-hydroxy-5-(hydroxymethyl) tetrahydrofuran-2-yl)pyrimidine-2,4(1H,3H)-dione
  modified_base 7: mod_base = OTHER; note = 2'-fluoroguanosine-3'-phosphate
  modified_base 8: mod_base = OTHER; note = 2'-O-methyluridine-3'-phosphate
  modified_base 9: mod_base = OTHER; note = 2'-fluorouridine-3'-phosphate
  modified_base 10: mod_base = OTHER; note = 2'-fluorouridine-3'-phosphate
  modified_base 11: mod_base = OTHER; note = 2'-fluoroguanosine-3'-phosphate
  modified_base 12: mod_base = OTHER; note = 2'-O-methyluridine-3'-phosphate
  modified_base 13: mod_base = OTHER; note = 2'-O-methylguanosine-3'-phosphate
  modified_base 14: mod_base = OTHER; note = 2'-O-methyladenosine-3'-phosphate
  modified_base 15: mod_base = OTHER; note = 2'-O-methylcytidine-3'-phosphate
  modified_base 16: mod_base = OTHER; note = 2'-O-methylcytidine-3'-phosphate
  modified_base 17: mod_base = OTHER; note = 2'-O-methyladenosine-3'-phosphate
  modified_base 18: mod_base = OTHER; note = 2'-O-methylguanosine-3'-phosphate
  modified_base 19: mod_base = OTHER; note = 2'-O-methyladenosine-3'-phosphorothioate
  modified_base 20: mod_base = OTHER; note = 2'-O-methyladenosine-3'-phosphorothioate
  modified_base 21: mod_base = OTHER; note = 2'-O-methyladenosine-3'-phosphate
aaggttgtttgtgaccagaaa

SEQ ID NO: 1582 - RNA, 21 nt, synthetic construct
  source 1..21: mol_type = other RNA
  modified_base 1: mod_base = OTHER; note = 2'-O-methylguanosine-3'-phosphorothioate
  modified_base 2: mod_base = OTHER; note = 2'-O-methylguanosine-3'-phosphorothioate
  modified_base 3: mod_base = OTHER; note = 2'-O-methyladenosine-3'-phosphate
  modified_base 4: mod_base = OTHER; note = 2'-O-methyladenosine-3'-phosphate
  modified_base 5: mod_base = OTHER; note = 2'-O-methylguanosine-3'-phosphate
  modified_base 6: mod_base = OTHER; note 2-amino-9-((2R,3S,4S,5R)-3-(docosyloxy)-4-hydroxy-5-(hydrox ymethyl)tetrahydrofuran-2-yl)-1,9-dihydro-6H-purin-6-one
  modified_base 7: mod_base = OTHER; note = 2'-fluoroadenosine-3'-phosphate
  modified_base 8: mod_base = OTHER; note = 2'-O-methyladenosine-3'-phosphate
  modified_base 9: mod_base = OTHER; note = 2'-fluoroadenosine-3'-phosphate
  modified_base 10: mod_base = OTHER; note = 2'-fluorouridine-3'-phosphate
  modified_base 11: mod_base = OTHER; note = 2'-fluoroadenosine-3'-phosphate
  modified_base 12: mod_base = OTHER; note = 2'-O-methyluridine-3'-phosphate
  modified_base 13: mod_base = OTHER; note = 2'-O-methyluridine-3'-phosphate
  modified_base 14: mod_base = OTHER; note = 2'-O-methyluridine-3'-phosphate
  modified_base 15: mod_base = OTHER; note = 2'-O-methyluridine-3'-phosphate
  modified_base 16: mod_base = OTHER; note = 2'-O-methylguanosine-3'-phosphate
  modified_base 17: mod_base = OTHER; note = 2'-O-methyladenosine-3'-phosphate
  modified_base 18: mod_base = OTHER; note = 2'-O-methylguanosine-3'-phosphate
  modified_base 19: mod_base = OTHER; note = 2'-O-methyladenosine-3'-phosphorothioate
  modified_base 20: mod_base = OTHER; note = 2'-O-methyladenosine-3'-phosphorothioate
  modified_base 21: mod_base = OTHER; note = 2'-O-methyladenosine-3'-phosphate
ggaaggaaatattttgagaaa

SEQ ID NO: 1583 - RNA, 21 nt, synthetic construct
  source 1..21: mol_type = other RNA
  modified_base 1: mod_base = OTHER; note = 2'-O-methyluridine-3'-phosphorothioate
  modified_base 2: mod_base = OTHER; note = 2'-O-methyluridine-3'-phosphorothioate
  modified_base 3: mod_base = OTHER; note = 2'-O-methyluridine-3'-phosphate
  modified_base 4: mod_base = OTHER; note = 2'-O-methyluridine-3'-phosphate
  modified_base 5: mod_base = OTHER; note = 2'-O-methylguanosine-3'-phosphate
  modified_base 6: mod_base = OTHER; note 2-amino-9-((2R,3S,4S,5R)-3-(docosyloxy)-4-hydroxy-5-(hydrox ymethyl)tetrahydrofuran-2-yl)-1,9-dihydro-6H-purin-6-one
  modified_base 7: mod_base = OTHER; note = 2'-fluorouridine-3'-phosphate
  modified_base 8: mod_base = OTHER; note = 2'-O-methyladenosine-3'-phosphate
  modified_base 9: mod_base = OTHER; note = 2'-fluoroguanosine-3'-phosphate
  modified_base 10: mod_base = OTHER; note = 2'-fluorocytidine-3'-phosphate
  modified_base 11: mod_base = OTHER; note = 2'-fluoroguanosine-3'-phosphate
  modified_base 12: mod_base = OTHER; note = 2'-O-methyluridine-3'-phosphate
  modified_base 13: mod_base = OTHER; note = 2'-O-methylguanosine-3'-phosphate
  modified_base 14: mod_base = OTHER; note = 2'-O-methyladenosine-3'-phosphate
  modified_base 15: mod_base = OTHER; note = 2'-O-methylcytidine-3'-phosphate
  modified_base 16: mod_base = OTHER; note = 2'-O-methyluridine-3'-phosphate
  modified_base 17: mod_base = OTHER; note = 2'-O-methylcytidine-3'-phosphate
  modified_base 18: mod_base = OTHER; note = 2'-O-methyluridine-3'-phosphate
  modified_base 19: mod_base = OTHER; note = 2'-O-methyluridine-3'-phosphorothioate
  modified_base 20: mod_base = OTHER; note = 2'-O-methylcytidine-3'-phosphorothioate
  modified_base 21: mod_base = OTHER; note = 2'-O-methyladenosine-3'-phosphate
ttttggtagcgtgactcttca

SEQ ID NO: 1584 - RNA, 21 nt, synthetic construct
  source 1..21: mol_type = other RNA
  modified_base 1: mod_base = OTHER; note = 2'-O-methyluridine-3'-phosphorothioate
  modified_base 2: mod_base = OTHER; note = 2'-O-methylguanosine-3'-phosphorothioate
  modified_base 3: mod_base = OTHER; note = 2'-O-methyladenosine-3'-phosphate
  modified_base 4: mod_base = OTHER; note = 2'-O-methyladenosine-3'-phosphate
  modified_base 5: mod_base = OTHER; note = 2'-O-methylcytidine-3'-phosphate
  modified_base 6: mod_base = OTHER; note (2R,3S,4S,5R)-5-(6-amino-9H-purin-9-yl)-4-(docosyloxy)-2-(h ydroxymethyl)tetrahydrofuran-3-ol
  modified_base 7: mod_base = OTHER; note = 2'-fluoroguanosine-3'-phosphate
  modified_base 8: mod_base = OTHER; note = 2'-O-methylguanosine-3'-phosphate
  modified_base 9: mod_base = OTHER; note = 2'-fluoroadenosine-3'-phosphate
  modified_base 10: mod_base = OTHER; note = 2'-fluoroadenosine-3'-phosphate
  modified_base 11: mod_base = OTHER; note = 2'-fluoroadenosine-3'-phosphate
  modified_base 12: mod_base = OTHER; note = 2'-O-methyladenosine-3'-phosphate
  modified_base 13: mod_base = OTHER; note = 2'-O-methylguanosine-3'-phosphate
  modified_base 14: mod_base = OTHER; note = 2'-O-methyladenosine-3'-phosphate
  modified_base 15: mod_base = OTHER; note = 2'-O-methyluridine-3'-phosphate
  modified_base 16: mod_base = OTHER; note = 2'-O-methylguanosine-3'-phosphate
  modified_base 17: mod_base = OTHER; note = 2'-O-methyluridine-3'-phosphate
  modified_base 18: mod_base = OTHER; note = 2'-O-methyladenosine-3'-phosphate
  modified_base 19: mod_base = OTHER; note = 2'-O-methyladenosine-3'-phosphorothioate
  modified_base 20: mod_base = OTHER; note = 2'-O-methyladenosine-3'-phosphorothioate
  modified_base 21: mod_base = OTHER; note = 2'-O-methyladenosine-3'-phosphate
tgaacaggaaaagatgtaaaa

SEQ ID NO: 1585 - RNA, 21 nt, synthetic construct
  source 1..21: mol_type = other RNA
  modified_base 1: mod_base = OTHER; note = 2'-O-methylguanosine-3'-phosphorothioate
  modified_base 2: mod_base = OTHER; note = 2'-O-methylguanosine-3'-phosphorothioate
  modified_base 3: mod_base = OTHER; note = 2'-O-methylguanosine-3'-phosphate
  modified_base 4: mod_base = OTHER; note = 2'-O-methyladenosine-3'-phosphate
  modified_base 5: mod_base = OTHER; note = 2'-O-methyladenosine-3'-phosphate
  modified_base 6: mod_base = OTHER; note 4-amino-1-((2R,3R,4R,5R)-3-(docosyloxy)-4-hydroxy-5-(hydrox ymethyl)tetrahydrofuran-2-yl)pyrimidin-2(1H)-one
  modified_base 7: mod_base = OTHER; note = 2'-fluorocytidine-3'-phosphate
  modified_base 8: mod_base = OTHER; note = 2'-O-methyladenosine-3'-phosphate
  modified_base 9: mod_base = OTHER; note = 2'-fluoroadenosine-3'-phosphate
  modified_base 10: mod_base = OTHER; note = 2'-fluoroguanosine-3'-phosphate
  modified_base 11: mod_base = OTHER; note = 2'-fluoroadenosine-3'-phosphate
  modified_base 12: mod_base = OTHER; note = 2'-O-methylguanosine-3'-phosphate
  modified_base 13: mod_base = OTHER; note = 2'-O-methylguanosine-3'-phosphate
  modified_base 14: mod_base = OTHER; note = 2'-O-methyluridine-3'-phosphate
  modified_base 15: mod_base = OTHER; note = 2'-O-methyladenosine-3'-phosphate
  modified_base 16: mod_base = OTHER; note = 2'-O-methyluridine-3'-phosphate
  modified_base 17: mod_base = OTHER; note = 2'-O-methyladenosine-3'-phosphate
  modified_base 18: mod_base = OTHER; note = 2'-O-methyluridine-3'-phosphate
  modified_base 19: mod_base = OTHER; note = 2'-O-methylguanosine-3'-phosphorothioate
  modified_base 20: mod_base = OTHER; note = 2'-O-methylguanosine-3'-phosphorothioate
  modified_base 21: mod_base = OTHER; note = 2'-O-methyladenosine-3'-phosphate
gggaaccaagaggtatatgga

SEQ ID NO: 1586 - RNA, 21 nt, synthetic construct
  source 1..21: mol_type = other RNA
  modified_base 1: mod_base = OTHER; note = 2'-O-methyluridine-3'-phosphorothioate
  modified_base 2: mod_base = OTHER; note = 2'-O-methylguanosine-3'-phosphorothioate
  modified_base 3: mod_base = OTHER; note = 2'-O-methylguanosine-3'-phosphate
  modified_base 4: mod_base = OTHER; note = 2'-O-methylcytidine-3'-phosphate
  modified_base 5: mod_base = OTHER; note = 2'-O-methyladenosine-3'-phosphate
  modified_base 6: mod_base = OTHER; note 4-amino-1-((2R,3R,4R,5R)-3-(docosyloxy)-4-hydroxy-5-(hydrox ymethyl)tetrahydrofuran-2-yl)pyrimidin-2(1H)-one
  modified_base 7: mod_base = OTHER; note = 2'-fluorouridine-3'-phosphate
  modified_base 8: mod_base = OTHER; note = 2'-O-methyladenosine-3'-phosphate
  modified_base 9: mod_base = OTHER; note = 2'-fluoroguanosine-3'-phosphate
  modified_base 10: mod_base = OTHER; note = 2'-fluoroguanosine-3'-phosphate
  modified_base 11: mod_base = OTHER; note = 2'-fluorouridine-3'-phosphate
  modified_base 12: mod_base = OTHER; note = 2'-O-methylcytidine-3'-phosphate
  modified_base 13: mod_base = OTHER; note = 2'-O-methylcytidine-3'-phosphate
  modified_base 14: mod_base = OTHER; note = 2'-O-methyladenosine-3'-phosphate
  modified_base 15: mod_base = OTHER; note = 2'-O-methyladenosine-3'-phosphate
  modified_base 16: mod_base = OTHER; note = 2'-O-methyladenosine-3'-phosphate
  modified_base 17: mod_base = OTHER; note = 2'-O-methyluridine-3'-phosphate
  modified_base 18: mod_base = OTHER; note = 2'-O-methylcytidine-3'-phosphate
  modified_base 19: mod_base = OTHER; note = 2'-O-methyluridine-3'-phosphorothioate
  modified_base 20: mod_base = OTHER; note = 2'-O-methyluridine-3'-phosphorothioate
  modified_base 21: mod_base = OTHER; note = 2'-O-methyladenosine-3'-phosphate
tggcactaggtccaaatctta

SEQ ID NO: 1587 - RNA, 21 nt, synthetic construct
  source 1..21: mol_type = other RNA
  modified_base 1: mod_base = OTHER; note = 2'-O-methylcytidine-3'-phosphorothioate
  modified_base 2: mod_base = OTHER; note = 2'-O-methyladenosine-3'-phosphorothioate
  modified_base 3: mod_base = OTHER; note = 2'-O-methylcytidine-3'-phosphate
  modified_base 4: mod_base = OTHER; note = 2'-O-methyladenosine-3'-phosphate
  modified_base 5: mod_base = OTHER; note = 2'-O-methylcytidine-3'-phosphate
  modified_base 6: mod_base = OTHER; note 4-amino-1-((2R,3R,4R,5R)-3-(docosyloxy)-4-hydroxy-5-(hydrox ymethyl)tetrahydrofuran-2-yl)pyrimidin-2(1H)-one
  modified_base 7: mod_base = OTHER; note = 2'-fluorouridine-3'-phosphate
  modified_base 8: mod_base = OTHER; note = 2'-O-methyluridine-3'-phosphate
  modified_base 9: mod_base = OTHER; note = 2'-fluorocytidine-3'-phosphate
  modified_base 10: mod_base = OTHER; note = 2'-fluoroadenosine-3'-phosphate
  modified_base 11: mod_base = OTHER; note = 2'-fluorouridine-3'-phosphate
  modified_base 12: mod_base = OTHER; note = 2'-O-methyladenosine-3'-phosphate
  modified_base 13: mod_base = OTHER; note = 2'-O-methyluridine-3'-phosphate
  modified_base 14: mod_base = OTHER; note = 2'-O-methylguanosine-3'-phosphate
  modified_base 15: mod_base = OTHER; note = 2'-O-methylguanosine-3'-phosphate
  modified_base 16: mod_base = OTHER; note = 2'-O-methyladenosine-3'-phosphate
  modified_base 17: mod_base = OTHER; note = 2'-O-methylguanosine-3'-phosphate
  modified_base 18: mod_base = OTHER; note = 2'-O-methyladenosine-3'-phosphate
  modified_base 19: mod_base = OTHER; note = 2'-O-methyluridine-3'-phosphorothioate
  modified_base 20: mod_base = OTHER; note = 2'-O-methyluridine-3'-phosphorothioate
  modified_base 21: mod_base = OTHER; note = 2'-O-methyladenosine-3'-phosphate
cacaccttcatatggagatta

SEQ ID NO: 1588 - RNA, 21 nt, synthetic construct
  source 1..21: mol_type = other RNA
  modified_base 1: mod_base = OTHER; note = 2'-O-methylcytidine-3'-phosphorothioate
  modified_base 2: mod_base = OTHER; note = 2'-O-methyluridine-3'-phosphorothioate
  modified_base 3: mod_base = OTHER; note = 2'-O-methylguanosine-3'-phosphate
  modified_base 4: mod_base = OTHER; note = 2'-O-methylguanosine-3'-phosphate
  modified_base 5: mod_base = OTHER; note = 2'-O-methyluridine-3'-phosphate
  modified_base 6: mod_base = OTHER; note 1-((2R,3R,4R,5R)-3-(docosyloxy)-4-hydroxy-5-(hydroxymethyl) tetrahydrofuran-2-yl)pyrimidine-2,4(1H,3H)-dione
  modified_base 7: mod_base = OTHER; note = 2'-fluorouridine-3'-phosphate
  modified_base 8: mod_base = OTHER; note = 2'-O-methyladenosine-3'-phosphate
  modified_base 9: mod_base = OTHER; note = 2'-fluorocytidine-3'-phosphate
  modified_base 10: mod_base = OTHER; note = 2'-fluorouridine-3'-phosphate
  modified_base 11: mod_base = OTHER; note = 2'-fluoroguanosine-3'-phosphate
  modified_base 12: mod_base = OTHER; note = 2'-O-methylguanosine-3'-phosphate
  modified_base 13: mod_base = OTHER; note = 2'-O-methylguanosine-3'-phosphate
  modified_base 14: mod_base = OTHER; note = 2'-O-methyladenosine-3'-phosphate
  modified_base 15: mod_base = OTHER; note = 2'-O-methyladenosine-3'-phosphate
  modified_base 16: mod_base = OTHER; note = 2'-O-methyladenosine-3'-phosphate
  modified_base 17: mod_base = OTHER; note = 2'-O-methyluridine-3'-phosphate
  modified_base 18: mod_base = OTHER; note = 2'-O-methyladenosine-3'-phosphate
  modified_base 19: mod_base = OTHER; note = 2'-O-methylguanosine-3'-phosphorothioate
  modified_base 20: mod_base = OTHER; note = 2'-O-methylcytidine-3'-phosphorothioate
  modified_base 21: mod_base = OTHER; note = 2'-O-methyladenosine-3'-phosphate
ctggtttactgggaaatagca

SEQ ID NO: 1589 - RNA, 21 nt, synthetic construct
  source 1..21: mol_type = other RNA
  modified_base 1: mod_base = OTHER; note = 2'-O-methylguanosine-3'-phosphorothioate
  modified_base 2: mod_base = OTHER; note = 2'-O-methylcytidine-3'-phosphorothioate
  modified_base 3: mod_base = OTHER; note = 2'-O-methylcytidine-3'-phosphate
  modified_base 4: mod_base = OTHER; note = 2'-O-methylcytidine-3'-phosphate
  modified_base 5: mod_base = OTHER; note = 2'-O-methyladenosine-3'-phosphate
  modified_base 6: mod_base = OTHER; note (2R,3S,4S,5R)-5-(6-amino-9H-purin-9-yl)-4-(docosyloxy)-2-(h ydroxymethyl)tetrahydrofuran-3-ol
  modified_base 7: mod_base = OTHER; note = 2'-fluoroadenosine-3'-phosphate
  modified_base 8: mod_base = OTHER; note = 2'-O-methylguanosine-3'-phosphate
  modified_base 9: mod_base = OTHER; note = 2'-fluoroguanosine-3'-phosphate
  modified_base 10: mod_base = OTHER; note = 2'-fluoroadenosine-3'-phosphate
  modified_base 11: mod_base = OTHER; note = 2'-fluoroadenosine-3'-phosphate
  modified_base 12: mod_base = OTHER; note = 2'-O-methyluridine-3'-phosphate
  modified_base 13: mod_base = OTHER; note = 2'-O-methylguanosine-3'-phosphate
  modified_base 14: mod_base = OTHER; note = 2'-O-methyluridine-3'-phosphate
  modified_base 15: mod_base = OTHER; note = 2'-O-methyladenosine-3'-phosphate
  modified_base 16: mod_base = OTHER; note = 2'-O-methyluridine-3'-phosphate
  modified_base 17: mod_base = OTHER; note = 2'-O-methyladenosine-3'-phosphate
  modified_base 18: mod_base = OTHER; note = 2'-O-methyluridine-3'-phosphate
  modified_base 19: mod_base = OTHER; note = 2'-O-methyladenosine-3'-phosphorothioate
  modified_base 20: mod_base = OTHER; note = 2'-O-methyladenosine-3'-phosphorothioate
  modified_base 21: mod_base = OTHER; note = 2'-O-methyladenosine-3'-phosphate
gcccaaaggaatgtatataaa

SEQ ID NO: 1590 - RNA, 21 nt, synthetic construct
  source 1..21: mol_type = other RNA
  modified_base 1: mod_base = OTHER; note = 2'-O-methyluridine-3'-phosphorothioate
  modified_base 2: mod_base = OTHER; note = 2'-O-methyluridine-3'-phosphorothioate
  modified_base 3: mod_base = OTHER; note = 2'-O-methyladenosine-3'-phosphate
  modified_base 4: mod_base = OTHER; note = 2'-O-methyladenosine-3'-phosphate
  modified_base 5: mod_base = OTHER; note = 2'-O-methylcytidine-3'-phosphate
  modified_base 6: mod_base = OTHER; note 1-((2R,3R,4R,5R)-3-(docosyloxy)-4-hydroxy-5-(hydroxymethyl) tetrahydrofuran-2-yl)pyrimidine-2,4(1H,3H)-dione
  modified_base 7: mod_base = OTHER; note = 2'-fluoroguanosine-3'-phosphate
  modified_base 8: mod_base = OTHER; note = 2'-O-methylcytidine-3'-phosphate
  modified_base 9: mod_base = OTHER; note = 2'-fluoroadenosine-3'-phosphate
  modified_base 10: mod_base = OTHER; note = 2'-fluoroadenosine-3'-phosphate
  modified_base 11: mod_base = OTHER; note = 2'-fluoroguanosine-3'-phosphate
  modified_base 12: mod_base = OTHER; note = 2'-O-methyladenosine-3'-phosphate
  modified_base 13: mod_base = OTHER; note = 2'-O-methylguanosine-3'-phosphate
  modified_base 14: mod_base = OTHER; note = 2'-O-methyluridine-3'-phosphate
  modified_base 15: mod_base = OTHER; note = 2'-O-methyluridine-3'-phosphate
  modified_base 16: mod_base = OTHER; note = 2'-O-methyluridine-3'-phosphate
  modified_base 17: mod_base = OTHER; note = 2'-O-methyladenosine-3'-phosphate
  modified_base 18: mod_base = OTHER; note = 2'-O-methylcytidine-3'-phosphate
  modified_base 19: mod_base = OTHER; note = 2'-O-methyluridine-3'-phosphorothioate
  modified_base 20: mod_base = OTHER; note = 2'-O-methylguanosine-3'-phosphorothioate
  modified_base 21: mod_base = OTHER; note = 2'-O-methyladenosine-3'-phosphate
ttaactgcaagagtttactga

SEQ ID NO: 1591 - RNA, 21 nt, synthetic construct
  source 1..21: mol_type = other RNA
  modified_base 1: mod_base = OTHER; note = 2'-O-methylguanosine-3'-phosphorothioate
  modified_base 2: mod_base = OTHER; note = 2'-O-methyladenosine-3'-phosphorothioate
  modified_base 3: mod_base = OTHER; note = 2'-O-methyladenosine-3'-phosphate
  modified_base 4: mod_base = OTHER; note = 2'-O-methylcytidine-3'-phosphate
  modified_base 5: mod_base = OTHER; note = 2'-O-methylcytidine-3'-phosphate
  modified_base 6: mod_base = OTHER; note (2R,3S,4S,5R)-5-(6-amino-9H-purin-9-yl)-4-(docosyloxy)-2-(h ydroxymethyl)tetrahydrofuran-3-ol
  modified_base 7: mod_base = OTHER; note = 2'-fluorocytidine-3'-phosphate
  modified_base 8: mod_base = OTHER; note = 2'-O-methyluridine-3'-phosphate
  modified_base 9: mod_base = OTHER; note = 2'-fluorocytidine-3'-phosphate
  modified_base 10: mod_base = OTHER; note = 2'-fluorouridine-3'-phosphate
  modified_base 11: mod_base = OTHER; note = 2'-fluorocytidine-3'-phosphate
  modified_base 12: mod_base = OTHER; note = 2'-O-methyluridine-3'-phosphate
  modified_base 13: mod_base = OTHER; note = 2'-O-methylguanosine-3'-phosphate
  modified_base 14: mod_base = OTHER; note = 2'-O-methyladenosine-3'-phosphate
  modified_base 15: mod_base = OTHER; note = 2'-O-methylguanosine-3'-phosphate
  modified_base 16: mod_base = OTHER; note = 2'-O-methyluridine-3'-phosphate
  modified_base 17: mod_base = OTHER; note = 2'-O-methylguanosine-3'-phosphate
  modified_base 18: mod_base = OTHER; note = 2'-O-methylcytidine-3'-phosphate
  modified_base 19: mod_base = OTHER; note = 2'-O-methyladenosine-3'-phosphorothioate
  modified_base 20: mod_base = OTHER; note = 2'-O-methyladenosine-3'-phosphorothioate
  modified_base 21: mod_base = OTHER; note = 2'-O-methyladenosine-3'-phosphate
gaaccactctctgagtgcaaa

SEQ ID NO: 1592 - RNA, 21 nt, synthetic construct
  source 1..21: mol_type = other RNA
  modified_base 1: mod_base = OTHER; note = 2'-O-methyluridine-3'-phosphorothioate
  modified_base 2: mod_base = OTHER; note = 2'-O-methyluridine-3'-phosphorothioate
  modified_base 3: mod_base = OTHER; note = 2'-O-methyladenosine-3'-phosphate
  modified_base 4: mod_base = OTHER; note = 2'-O-methyluridine-3'-phosphate
  modified_base 5: mod_base = OTHER; note = 2'-O-methylcytidine-3'-phosphate
  modified_base 6: mod_base = OTHER; note 1-((2R,3R,4R,5R)-3-(docosyloxy)-4-hydroxy-5-(hydroxymethyl) tetrahydrofuran-2-yl)pyrimidine-2,4(1H,3H)-dione
  modified_base 7: mod_base = OTHER; note = 2'-fluorouridine-3'-phosphate
  modified_base 8: mod_base = OTHER; note = 2'-O-methyluridine-3'-phosphate
  modified_base 9: mod_base = OTHER; note = 2'-fluorouridine-3'-phosphate
  modified_base 10: mod_base = OTHER; note = 2'-fluorocytidine-3'-phosphate
  modified_base 11: mod_base = OTHER; note = 2'-fluoroadenosine-3'-phosphate
  modified_base 12: mod_base = OTHER; note = 2'-O-methyluridine-3'-phosphate
  modified_base 13: mod_base = OTHER; note = 2'-O-methylcytidine-3'-phosphate
  modified_base 14: mod_base = OTHER; note = 2'-O-methylcytidine-3'-phosphate
  modified_base 15: mod_base = OTHER; note = 2'-O-methyluridine-3'-phosphate
  modified_base 16: mod_base = OTHER; note = 2'-O-methylguanosine-3'-phosphate
  modified_base 17: mod_base = OTHER; note = 2'-O-methylguanosine-3'-phosphate
  modified_base 18: mod_base = OTHER; note = 2'-O-methylcytidine-3'-phosphate
  modified_base 19: mod_base = OTHER; note = 2'-O-methyladenosine-3'-phosphorothioate
  modified_base 20: mod_base = OTHER; note = 2'-O-methyluridine-3'-phosphorothioate
  modified_base 21: mod_base = OTHER; note = 2'-O-methyladenosine-3'-phosphate
ttatcttttcatcctggcata

SEQ ID NO: 1593 - RNA, 21 nt, synthetic construct
  source 1..21: mol_type = other RNA
  modified_base 1: mod_base = OTHER; note = 2'-O-methylguanosine-3'-phosphorothioate
  modified_base 2: mod_base = OTHER; note = 2'-O-methyluridine-3'-phosphorothioate
  modified_base 3: mod_base = OTHER; note = 2'-O-methylguanosine-3'-phosphate
  modified_base 4: mod_base = OTHER; note = 2'-O-methyladenosine-3'-phosphate
  modified_base 5: mod_base = OTHER; note = 2'-O-methylguanosine-3'-phosphate
  modified_base 6: mod_base = OTHER; note 1-((2R,3R,4R,5R)-3-(docosyloxy)-4-hydroxy-5-(hydroxymethyl) tetrahydrofuran-2-yl)pyrimidine-2,4(1H,3H)-dione
  modified_base 7: mod_base = OTHER; note = 2'-fluoroguanosine-3'-phosphate
  modified_base 8: mod_base = OTHER; note = 2'-O-methyluridine-3'-phosphate
  modified_base 9: mod_base = OTHER; note = 2'-fluorouridine-3'-phosphate
  modified_base 10: mod_base = OTHER; note = 2'-fluoroguanosine-3'-phosphate
  modified_base 11: mod_base = OTHER; note = 2'-fluoroguanosine-3'-phosphate
  modified_base 12: mod_base = OTHER; note = 2'-O-methyluridine-3'-phosphate
  modified_base 13: mod_base = OTHER; note = 2'-O-methyladenosine-3'-phosphate
  modified_base 14: mod_base = OTHER; note = 2'-O-methyluridine-3'-phosphate
  modified_base 15: mod_base = OTHER; note = 2'-O-methylguanosine-3'-phosphate
  modified_base 16: mod_base = OTHER; note = 2'-O-methylcytidine-3'-phosphate
  modified_base 17: mod_base = OTHER; note = 2'-O-methylcytidine-3'-phosphate
  modified_base 18: mod_base = OTHER; note = 2'-O-methyladenosine-3'-phosphate
  modified_base 19: mod_base = OTHER; note = 2'-O-methyladenosine-3'-phosphorothioate
  modified_base 20: mod_base = OTHER; note = 2'-O-methylcytidine-3'-phosphorothioate
  modified_base 21: mod_base = OTHER; note = 2'-O-methyladenosine-3'-phosphate
gtgagtgttggtatgccaaca

SEQ ID NO: 1594 - RNA, 21 nt, synthetic construct
  source 1..21: mol_type = other RNA
  modified_base 1: mod_base = OTHER; note = 2'-O-methyladenosine-3'-phosphorothioate
  modified_base 2: mod_base = OTHER; note = 2'-O-methylguanosine-3'-phosphorothioate
  modified_base 3: mod_base = OTHER; note = 2'-O-methyladenosine-3'-phosphate
  modified_base 4: mod_base = OTHER; note = 2'-O-methyladenosine-3'-phosphate
  modified_base 5: mod_base = OTHER; note = 2'-O-methyluridine-3'-phosphate
  modified_base 6: mod_base = OTHER; note 2-amino-9-((2R,3S,4S,5R)-3-(docosyloxy)-4-hydroxy-5-(hydrox ymethyl)tetrahydrofuran-2-yl)-1,9-dihydro-6H-purin-6-one
  modified_base 7: mod_base = OTHER; note = 2'-fluorouridine-3'-phosphate
  modified_base 8: mod_base = OTHER; note = 2'-O-methyladenosine-3'-phosphate
  modified_base 9: mod_base = OTHER; note = 2'-fluorouridine-3'-phosphate
  modified_base 10: mod_base = OTHER; note = 2'-fluorouridine-3'-phosphate
  modified_base 11: mod_base = OTHER; note = 2'-fluorouridine-3'-phosphate
  modified_base 12: mod_base = OTHER; note = 2'-O-methylguanosine-3'-phosphate
  modified_base 13: mod_base = OTHER; note = 2'-O-methylguanosine-3'-phosphate
  modified_base 14: mod_base = OTHER; note = 2'-O-methylcytidine-3'-phosphate
  modified_base 15: mod_base = OTHER; note = 2'-O-methyluridine-3'-phosphate
  modified_base 16: mod_base = OTHER; note = 2'-O-methyladenosine-3'-phosphate
  modified_base 17: mod_base = OTHER; note = 2'-O-methyladenosine-3'-phosphate
  modified_base 18: mod_base = OTHER; note = 2'-O-methyladenosine-3'-phosphate
  modified_base 19: mod_base = OTHER; note = 2'-O-methyluridine-3'-phosphorothioate
  modified_base 20: mod_base = OTHER; note = 2'-O-methyladenosine-3'-phosphorothioate
  modified_base 21: mod_base = OTHER; note = 2'-O-methyladenosine-3'-phosphate
agaatgtatttggctaaataa

SEQ ID NO: 1595 - RNA, 21 nt, synthetic construct
  source 1..21: mol_type = other RNA
  modified_base 1: mod_base = OTHER; note = 2'-O-methylguanosine-3'-phosphorothioate
  modified_base 2: mod_base = OTHER; note = 2'-O-methyladenosine-3'-phosphorothioate
  modified_base 3: mod_base = OTHER; note = 2'-O-methyladenosine-3'-phosphate
  modified_base 4: mod_base = OTHER; note = 2'-O-methylcytidine-3'-phosphate
  modified_base 5: mod_base = OTHER; note = 2'-O-methylcytidine-3'-phosphate
  modified_base 6: mod_base = OTHER; note 4-amino-1-((2R,3R,4R,5R)-3-(docosyloxy)-4-hydroxy-5-(hydrox ymethyl)tetrahydrofuran-2-yl)pyrimidin-2(1H)-one
  modified_base 7: mod_base = OTHER; note = 2'-fluorouridine-3'-phosphate
  modified_base 8: mod_base = OTHER; note = 2'-O-methyluridine-3'-phosphate
  modified_base 9: mod_base = OTHER; note = 2'-fluorouridine-3'-phosphate
  modified_base 10: mod_base = OTHER; note = 2'-fluorouridine-3'-phosphate
  modified_base 11: mod_base = OTHER; note = 2'-fluoroadenosine-3'-phosphate
  modified_base 12: mod_base = OTHER; note = 2'-O-methyluridine-3'-phosphate
  modified_base 13: mod_base = OTHER; note = 2'-O-methyluridine-3'-phosphate
  modified_base 14: mod_base = OTHER; note = 2'-O-methyladenosine-3'-phosphate
  modified_base 15: mod_base = OTHER; note = 2'-O-methyladenosine-3'-phosphate
  modified_base 16: mod_base = OTHER; note = 2'-O-methylguanosine-3'-phosphate
  modified_base 17: mod_base = OTHER; note = 2'-O-methyladenosine-3'-phosphate
  modified_base 18: mod_base = OTHER; note = 2'-O-methylguanosine-3'-phosphate
  modified_base 19: mod_base = OTHER; note = 2'-O-methylguanosine-3'-phosphorothioate
  modified_base 20: mod_base = OTHER; note = 2'-O-methyladenosine-3'-phosphorothioate
  modified_base 21: mod_base = OTHER; note = 2'-O-methyladenosine-3'-phosphate
gaacccttttattaagaggaa

SEQ ID NO: 1596 - RNA, 21 nt, synthetic construct
  source 1..21: mol_type = other RNA
  modified_base 1: mod_base = OTHER; note = 2'-O-methylcytidine-3'-phosphorothioate
  modified_base 2: mod_base = OTHER; note = 2'-O-methyluridine-3'-phosphorothioate
  modified_base 3: mod_base = OTHER; note = 2'-O-methylcytidine-3'-phosphate
  modified_base 4: mod_base = OTHER; note = 2'-O-methylcytidine-3'-phosphate
  modified_base 5: mod_base = OTHER; note = 2'-O-methyluridine-3'-phosphate
  modified_base 6: mod_base = OTHER; note 2-amino-9-((2R,3S,4S,5R)-3-(docosyloxy)-4-hydroxy-5-(hydrox ymethyl)tetrahydrofuran-2-yl)-1,9-dihydro-6H-purin-6-one
  modified_base 7: mod_base = OTHER; note = 2'-fluorouridine-3'-phosphate
  modified_base 8: mod_base = OTHER; note = 2'-O-methylcytidine-3'-phosphate
  modified_base 9: mod_base = OTHER; note = 2'-fluorocytidine-3'-phosphate
  modified_base 10: mod_base = OTHER; note = 2'-fluoroadenosine-3'-phosphate
  modified_base 11: mod_base = OTHER; note = 2'-fluorouridine-3'-phosphate
  modified_base 12: mod_base = OTHER; note = 2'-O-methyladenosine-3'-phosphate
  modified_base 13: mod_base = OTHER; note = 2'-O-methylguanosine-3'-phosphate
  modified_base 14: mod_base = OTHER; note = 2'-O-methylcytidine-3'-phosphate
  modified_base 15: mod_base = OTHER; note = 2'-O-methyluridine-3'-phosphate
  modified_base 16: mod_base = OTHER; note = 2'-O-methylguanosine-3'-phosphate
  modified_base 17: mod_base = OTHER; note = 2'-O-methylcytidine-3'-phosphate
  modified_base 18: mod_base = OTHER; note = 2'-O-methylguanosine-3'-phosphate
  modified_base 19: mod_base = OTHER; note = 2'-O-methyladenosine-3'-phosphorothioate
  modified_base 20: mod_base = OTHER; note = 2'-O-methyluridine-3'-phosphorothioate
  modified_base 21: mod_base = OTHER; note = 2'-O-methyladenosine-3'-phosphate
ctcctgtccatagctgcgata

SEQ ID NO: 1597 - RNA, 21 nt, synthetic construct
  source 1..21: mol_type = other RNA
  modified_base 1: mod_base = OTHER; note = 2'-O-methyladenosine-3'-phosphorothioate
  modified_base 2: mod_base = OTHER; note = 2'-O-methylcytidine-3'-phosphorothioate
  modified_base 3: mod_base = OTHER; note = 2'-O-methyluridine-3'-phosphate
  modified_base 4: mod_base = OTHER; note = 2'-O-methylguanosine-3'-phosphate
  modified_base 5: mod_base = OTHER; note = 2'-O-methyladenosine-3'-phosphate
  modified_base 6: mod_base = OTHER; note 2-amino-9-((2R,3S,4S,5R)-3-(docosyloxy)-4-hydroxy-5-(hydrox ymethyl)tetrahydrofuran-2-yl)-1,9-dihydro-6H-purin-6-one
  modified_base 7: mod_base = OTHER; note = 2'-fluorouridine-3'-phosphate
  modified_base 8: mod_base = OTHER; note = 2'-O-methyluridine-3'-phosphate
  modified_base 9: mod_base = OTHER; note = 2'-fluoroguanosine-3'-phosphate
  modified_base 10: mod_base = OTHER; note = 2'-fluoroadenosine-3'-phosphate
  modified_base 11: mod_base = OTHER; note = 2'-fluoroadenosine-3'-phosphate
  modified_base 12: mod_base = OTHER; note = 2'-O-methyladenosine-3'-phosphate
  modified_base 13: mod_base = OTHER; note = 2'-O-methyluridine-3'-phosphate
  modified_base 14: mod_base = OTHER; note = 2'-O-methyladenosine-3'-phosphate
  modified_base 15: mod_base = OTHER; note = 2'-O-methyladenosine-3'-phosphate
  modified_base 16: mod_base = OTHER; note = 2'-O-methylguanosine-3'-phosphate
  modified_base 17: mod_base = OTHER; note = 2'-O-methylguanosine-3'-phosphate
  modified_base 18: mod_base = OTHER; note = 2'-O-methyladenosine-3'-phosphate
  modified_base 19: mod_base = OTHER; note = 2'-O-methyladenosine-3'-phosphorothioate
  modified_base 20: mod_base = OTHER; note = 2'-O-methylguanosine-3'-phosphorothioate
  modified_base 21: mod_base = OTHER; note = 2'-O-methyladenosine-3'-phosphate
actgagttgaaataaggaaga

SEQ ID NO: 1598 - RNA, 21 nt, synthetic construct
  source 1..21: mol_type = other RNA
  modified_base 1: mod_base = OTHER; note = 2'-O-methylcytidine-3'-phosphorothioate
  modified_base 2: mod_base = OTHER; note = 2'-O-methyluridine-3'-phosphorothioate
  modified_base 3: mod_base = OTHER; note = 2'-O-methylguanosine-3'-phosphate
  modified_base 4: mod_base = OTHER; note = 2'-O-methylcytidine-3'-phosphate
  modified_base 5: mod_base = OTHER; note = 2'-O-methylcytidine-3'-phosphate
  modified_base 6: mod_base = OTHER; note (2R,3S,4S,5R)-5-(6-amino-9H-purin-9-yl)-4-(docosyloxy)-2-(h ydroxymethyl)tetrahydrofuran-3-ol
  modified_base 7: mod_base = OTHER; note = 2'-fluoroadenosine-3'-phosphate
  modified_base 8: mod_base = OTHER; note = 2'-O-methyladenosine-3'-phosphate
  modified_base 9: mod_base = OTHER; note = 2'-fluorocytidine-3'-phosphate
  modified_base 10: mod_base = OTHER; note = 2'-fluoroadenosine-3'-phosphate
  modified_base 11: mod_base = OTHER; note = 2'-fluoroguanosine-3'-phosphate
  modified_base 12: mod_base = OTHER; note = 2'-O-methyladenosine-3'-phosphate
  modified_base 13: mod_base = OTHER; note = 2'-O-methyladenosine-3'-phosphate
  modified_base 14: mod_base = OTHER; note = 2'-O-methylguanosine-3'-phosphate
  modified_base 15: mod_base = OTHER; note = 2'-O-methylguanosine-3'-phosphate
  modified_base 16: mod_base = OTHER; note = 2'-O-methyladenosine-3'-phosphate
  modified_base 17: mod_base = OTHER; note = 2'-O-methylguanosine-3'-phosphate
  modified_base 18: mod_base = OTHER; note = 2'-O-methylcytidine-3'-phosphate
  modified_base 19: mod_base = OTHER; note = 2'-O-methyladenosine-3'-phosphorothioate
  modified_base 20: mod_base = OTHER; note = 2'-O-methyluridine-3'-phosphorothioate
  modified_base 21: mod_base = OTHER; note = 2'-O-methyladenosine-3'-phosphate
ctgccaaacagaaggagcata

SEQ ID NO: 1599 - RNA, 21 nt, synthetic construct
  source 1..21: mol_type = other RNA
  modified_base 1: mod_base = OTHER; note = 2'-O-methylguanosine-3'-phosphorothioate
  modified_base 2: mod_base = OTHER; note = 2'-O-methylguanosine-3'-phosphorothioate
  modified_base 3: mod_base = OTHER; note = 2'-O-methylcytidine-3'-phosphate
  modified_base 4: mod_base = OTHER; note = 2'-O-methyladenosine-3'-phosphate
  modified_base 5: mod_base = OTHER; note = 2'-O-methyladenosine-3'-phosphate
  modified_base 6: mod_base = OTHER; note (2R,3S,4S,5R)-5-(6-amino-9H-purin-9-yl)-4-(docosyloxy)-2-(h ydroxymethyl)tetrahydrofuran-3-ol
  modified_base 7: mod_base = OTHER; note = 2'-fluoroguanosine-3'-phosphate
  modified_base 8: mod_base = OTHER; note = 2'-O-methyluridine-3'-phosphate
  modified_base 9: mod_base = OTHER; note = 2'-fluorouridine-3'-phosphate
  modified_base 10: mod_base = OTHER; note = 2'-fluoroguanosine-3'-phosphate
  modified_base 11: mod_base = OTHER; note = 2'-fluorouridine-3'-phosphate
  modified_base 12: mod_base = OTHER; note = 2'-O-methylguanosine-3'-phosphate
  modified_base 13: mod_base = OTHER; note = 2'-O-methyladenosine-3'-phosphate
  modified_base 14: mod_base = OTHER; note = 2'-O-methyladenosine-3'-phosphate
  modified_base 15: mod_base = OTHER; note = 2'-O-methylguanosine-3'-phosphate
  modified_base 16: mod_base = OTHER; note = 2'-O-methylcytidine-3'-phosphate
  modified_base 17: mod_base = OTHER; note = 2'-O-methyladenosine-3'-phosphate
  modified_base 18: mod_base = OTHER; note = 2'-O-methylcytidine-3'-phosphate
  modified_base 19: mod_base = OTHER; note = 2'-O-methyluridine-3'-phosphorothioate
  modified_base 20: mod_base = OTHER; note = 2'-O-methylcytidine-3'-phosphorothioate
  modified_base 21: mod_base = OTHER; note = 2'-O-methyladenosine-3'-phosphate
ggcaaagttgtgaagcactca

SEQ ID NO: 1600 - RNA, 21 nt, synthetic construct
  source 1..21: mol_type = other RNA
  modified_base 1: mod_base = OTHER; note = 2'-O-methyladenosine-3'-phosphorothioate
  modified_base 2: mod_base = OTHER; note = 2'-O-methyluridine-3'-phosphorothioate
  modified_base 3: mod_base = OTHER; note = 2'-O-methyladenosine-3'-phosphate
  modified_base 4: mod_base = OTHER; note = 2'-O-methylguanosine-3'-phosphate
  modified_base 5: mod_base = OTHER; note = 2'-O-methylguanosine-3'-phosphate
  modified_base 6: mod_base = OTHER; note (2R,3S,4S,5R)-5-(6-amino-9H-purin-9-yl)-4-(docosyloxy)-2-(h ydroxymethyl)tetrahydrofuran-3-ol
  modified_base 7: mod_base = OTHER; note = 2'-fluorouridine-3'-phosphate
  modified_base 8: mod_base = OTHER; note = 2'-O-methylguanosine-3'-phosphate
  modified_base 9: mod_base = OTHER; note = 2'-fluoroadenosine-3'-phosphate
  modified_base 10: mod_base = OTHER; note = 2'-fluorouridine-3'-phosphate
  modified_base 11: mod_base = OTHER; note = 2'-fluoroguanosine-3'-phosphate
  modified_base 12: mod_base = OTHER; note = 2'-O-methyladenosine-3'-phosphate
  modified_base 13: mod_base = OTHER; note = 2'-O-methyladenosine-3'-phosphate
  modified_base 14: mod_base = OTHER; note = 2'-O-methylguanosine-3'-phosphate
  modified_base 15: mod_base = OTHER; note = 2'-O-methyluridine-3'-phosphate
  modified_base 16: mod_base = OTHER; note = 2'-O-methyluridine-3'-phosphate
  modified_base 17: mod_base = OTHER; note = 2'-O-methyluridine-3'-phosphate
  modified_base 18: mod_base = OTHER; note = 2'-O-methyladenosine-3'-phosphate
  modified_base 19: mod_base = OTHER; note = 2'-O-methylguanosine-3'-phosphorothioate
  modified_base 20: mod_base = OTHER; note = 2'-O-methyladenosine-3'-phosphorothioate
  modified_base 21: mod_base = OTHER; note = 2'-O-methyladenosine-3'-phosphate
ataggatgatgaagtttagaa

SEQ ID NO: 1601 - RNA, 21 nt, synthetic construct
  source 1..21: mol_type = other RNA
  modified_base 1: mod_base = OTHER; note = 2'-O-methyladenosine-3'-phosphorothioate
  modified_base 2: mod_base = OTHER; note = 2'-O-methyluridine-3'-phosphorothioate
  modified_base 3: mod_base = OTHER; note = 2'-O-methyluridine-3'-phosphate
  modified_base 4: mod_base = OTHER; note = 2'-O-methylcytidine-3'-phosphate
  modified_base 5: mod_base = OTHER; note = 2'-O-methylguanosine-3'-phosphate
  modified_base 6: mod_base = OTHER; note 1-((2R,3R,4R,5R)-3-(docosyloxy)-4-hydroxy-5-(hydroxymethyl) tetrahydrofuran-2-yl)pyrimidine-2,4(1H,3H)-dione
  modified_base 7: mod_base = OTHER; note = 2'-fluoroadenosine-3'-phosphate
  modified_base 8: mod_base = OTHER; note = 2'-O-methyluridine-3'-phosphate
  modified_base 9: mod_base = OTHER; note = 2'-fluorocytidine-3'-phosphate
  modified_base 10: mod_base = OTHER; note = 2'-fluorouridine-3'-phosphate
  modified_base 11: mod_base = OTHER; note = 2'-fluorouridine-3'-phosphate
  modified_base 12: mod_base = OTHER; note = 2'-O-methyladenosine-3'-phosphate
  modified_base 13: mod_base = OTHER; note = 2'-O-methyladenosine-3'-phosphate
  modified_base 14: mod_base = OTHER; note = 2'-O-methyladenosine-3'-phosphate
  modified_base 15: mod_base = OTHER; note = 2'-O-methyladenosine-3'-phosphate
  modified_base 16: mod_base = OTHER; note = 2'-O-methyluridine-3'-phosphate
  modified_base 17: mod_base = OTHER; note = 2'-O-methylguanosine-3'-phosphate
  modified_base 18: mod_base = OTHER; note = 2'-O-methylguanosine-3'-phosphate
  modified_base 19: mod_base = OTHER; note = 2'-O-methylcytidine-3'-phosphorothioate
  modified_base 20: mod_base = OTHER; note = 2'-O-methyladenosine-3'-phosphorothioate
  modified_base 21: mod_base = OTHER; note = 2'-O-methyladenosine-3'-phosphate
attcgtatcttaaaatggcaa

SEQ ID NO: 1602 - RNA, 21 nt, synthetic construct
  source 1..21: mol_type = other RNA
  modified_base 1: mod_base = OTHER; note = 2'-O-methylcytidine-3'-phosphorothioate
  modified_base 2: mod_base = OTHER; note = 2'-O-methyladenosine-3'-phosphorothioate
  modified_base 3: mod_base = OTHER; note = 2'-O-methylcytidine-3'-phosphate
  modified_base 4: mod_base = OTHER; note = 2'-O-methyladenosine-3'-phosphate
  modified_base 5: mod_base = OTHER; note = 2'-O-methylguanosine-3'-phosphate
  modified_base 6: mod_base = OTHER; note 4-amino-1-((2R,3R,4R,5R)-3-(docosyloxy)-4-hydroxy-5-(hydrox ymethyl)tetrahydrofuran-2-yl)pyrimidin-2(1H)-one
  modified_base 7: mod_base = OTHER; note = 2'-fluorouridine-3'-phosphate
  modified_base 8: mod_base = OTHER; note = 2'-O-methyluridine-3'-phosphate
  modified_base 9: mod_base = OTHER; note = 2'-fluoroguanosine-3'-phosphate
  modified_base 10: mod_base = OTHER; note = 2'-fluoroguanosine-3'-phosphate
  modified_base 11: mod_base = OTHER; note = 2'-fluoroguanosine-3'-phosphate
  modified_base 12: mod_base = OTHER; note = 2'-O-methyluridine-3'-phosphate
  modified_base 13: mod_base = OTHER; note = 2'-O-methyladenosine-3'-phosphate
  modified_base 14: mod_base = OTHER; note = 2'-O-methyladenosine-3'-phosphate
  modified_base 15: mod_base = OTHER; note = 2'-O-methyluridine-3'-phosphate
  modified_base 16: mod_base = OTHER; note = 2'-O-methyladenosine-3'-phosphate
  modified_base 17: mod_base = OTHER; note = 2'-O-methylguanosine-3'-phosphate
  modified_base 18: mod_base = OTHER; note = 2'-O-methylcytidine-3'-phosphate
  modified_base 19: mod_base = OTHER; note = 2'-O-methylguanosine-3'-phosphorothioate
  modified_base 20: mod_base = OTHER; note = 2'-O-methyluridine-3'-phosphorothioate
  modified_base 21: mod_base = OTHER; note = 2'-O-methyladenosine-3'-phosphate
cacagcttgggtaatagcgta

SEQ ID NO: 1603 - RNA, 21 nt, synthetic construct
  source 1..21: mol_type = other RNA
  modified_base 1: mod_base = OTHER; note = 2'-O-methyluridine-3'-phosphorothioate
  modified_base 2: mod_base = OTHER; note = 2'-O-methyluridine-3'-phosphorothioate
  modified_base 3: mod_base = OTHER; note = 2'-O-methyluridine-3'-phosphate
  modified_base 4: mod_base = OTHER; note = 2'-O-methylguanosine-3'-phosphate
  modified_base 5: mod_base = OTHER; note = 2'-O-methylcytidine-3'-phosphate
  modified_base 6: mod_base = OTHER; note (2R,3S,4S,5R)-5-(6-amino-9H-purin-9-yl)-4-(docosyloxy)-2-(h ydroxymethyl)tetrahydrofuran-3-ol
  modified_base 7: mod_base = OTHER; note = 2'-fluoroadenosine-3'-phosphate
  modified_base 8: mod_base = OTHER; note = 2'-O-methylcytidine-3'-phosphate
  modified_base 9: mod_base = OTHER; note = 2'-fluoroadenosine-3'-phosphate
  modified_base 10: mod_base = OTHER; note = 2'-fluoroadenosine-3'-phosphate
  modified_base 11: mod_base = OTHER; note = 2'-fluorocytidine-3'-phosphate
  modified_base 12: mod_base = OTHER; note = 2'-O-methyladenosine-3'-phosphate
  modified_base 13: mod_base = OTHER; note = 2'-O-methyluridine-3'-phosphate
  modified_base 14: mod_base = OTHER; note = 2'-O-methyladenosine-3'-phosphate
  modified_base 15: mod_base = OTHER; note = 2'-O-methyladenosine-3'-phosphate
  modified_base 16: mod_base = OTHER; note = 2'-O-methylcytidine-3'-phosphate
  modified_base 17: mod_base = OTHER; note = 2'-O-methyladenosine-3'-phosphate
  modified_base 18: mod_base = OTHER; note = 2'-O-methylcytidine-3'-phosphate
  modified_base 19: mod_base = OTHER; note = 2'-O-methyluridine-3'-phosphorothioate
  modified_base 20: mod_base = OTHER; note = 2'-O-methylguanosine-3'-phosphorothioate
  modified_base 21: mod_base = OTHER; note = 2'-O-methyladenosine-3'-phosphate
tttgcaacaacataacactga

SEQ ID NO: 1604 - RNA, 21 nt, synthetic construct
  source 1..21: mol_type = other RNA
  modified_base 1: mod_base = OTHER; note = 2'-O-methyluridine-3'-phosphorothioate
  modified_base 2: mod_base = OTHER; note = 2'-O-methylguanosine-3'-phosphorothioate
  modified_base 3: mod_base = OTHER; note = 2'-O-methylcytidine-3'-phosphate
  modified_base 4: mod_base = OTHER; note = 2'-O-methylcytidine-3'-phosphate
  modified_base 5: mod_base = OTHER; note = 2'-O-methyladenosine-3'-phosphate
  modified_base 6: mod_base = OTHER; note 4-amino-1-((2R,3R,4R,5R)-3-(docosyloxy)-4-hydroxy-5-(hydrox ymethyl)tetrahydrofuran-2-yl)pyrimidin-2(1H)-one
  modified_base 7: mod_base = OTHER; note = 2'-fluorocytidine-3'-phosphate
  modified_base 8: mod_base = OTHER; note = 2'-O-methyladenosine-3'-phosphate
  modified_base 9: mod_base = OTHER; note = 2'-fluorouridine-3'-phosphate
  modified_base 10: mod_base = OTHER; note = 2'-fluoroguanosine-3'-phosphate
  modified_base 11: mod_base = OTHER; note = 2'-fluorouridine-3'-phosphate
  modified_base 12: mod_base = OTHER; note = 2'-O-methylguanosine-3'-phosphate
  modified_base 13: mod_base = OTHER; note = 2'-O-methyladenosine-3'-phosphate
  modified_base 14: mod_base = OTHER; note = 2'-O-methylcytidine-3'-phosphate
  modified_base 15: mod_base = OTHER; note = 2'-O-methyluridine-3'-phosphate
  modified_base 16: mod_base = OTHER; note = 2'-O-methyluridine-3'-phosphate
  modified_base 17: mod_base = OTHER; note = 2'-O-methyladenosine-3'-phosphate
  modified_base 18: mod_base = OTHER; note = 2'-O-methyluridine-3'-phosphate
  modified_base 19: mod_base = OTHER; note = 2'-O-methyluridine-3'-phosphorothioate
  modified_base 20: mod_base = OTHER; note = 2'-O-methylguanosine-3'-phosphorothioate
  modified_base 21: mod_base = OTHER; note = 2'-O-methyladenosine-3'-phosphate
tgccaccatgtgacttattga

SEQ ID NO: 1605 - RNA, 21 nt, synthetic construct
  source 1..21: mol_type = other RNA
  modified_base 1: mod_base = OTHER; note = 2'-O-methyluridine-3'-phosphorothioate
  modified_base 2: mod_base = OTHER; note = 2'-O-methylcytidine-3'-phosphorothioate
  modified_base 3: mod_base = OTHER; note = 2'-O-methylguanosine-3'-phosphate
  modified_base 4: mod_base = OTHER; note = 2'-O-methyladenosine-3'-phosphate
  modified_base 5: mod_base = OTHER; note = 2'-O-methyluridine-3'-phosphate
  modified_base 6: mod_base = OTHER; note (2R,3S,4S,5R)-5-(6-amino-9H-purin-9-yl)-4-(docosyloxy)-2-(h ydroxymethyl)tetrahydrofuran-3-ol
  modified_base 7: mod_base = OTHER; note = 2'-fluoroguanosine-3'-phosphate
  modified_base 8: mod_base = OTHER; note = 2'-O-methyladenosine-3'-phosphate
  modified_base 9: mod_base = OTHER; note = 2'-fluoroguanosine-3'-phosphate
  modified_base 10: mod_base = OTHER; note = 2'-fluoroguanosine-3'-phosphate
  modified_base 11: mod_base = OTHER; note = 2'-fluoroadenosine-3'-phosphate
  modified_base 12: mod_base = OTHER; note = 2'-O-methyladenosine-3'-phosphate
  modified_base 13: mod_base = OTHER; note = 2'-O-methyladenosine-3'-phosphate
  modified_base 14: mod_base = OTHER; note = 2'-O-methyluridine-3'-phosphate
  modified_base 15: mod_base = OTHER; note = 2'-O-methylguanosine-3'-phosphate
  modified_base 16: mod_base = OTHER; note = 2'-O-methyladenosine-3'-phosphate
  modified_base 17: mod_base = OTHER; note = 2'-O-methylguanosine-3'-phosphate
  modified_base 18: mod_base = OTHER; note = 2'-O-methyladenosine-3'-phosphate
  modified_base 19: mod_base = OTHER; note = 2'-O-methyladenosine-3'-phosphorothioate
  modified_base 20: mod_base = OTHER; note = 2'-O-methyladenosine-3'-phosphorothioate
  modified_base 21: mod_base = OTHER; note = 2'-O-methyladenosine-3'-phosphate
tcgatagaggaaatgagaaaa

SEQ ID NO: 1606 - RNA, 21 nt, synthetic construct
  source 1..21: mol_type = other RNA
  modified_base 1: mod_base = OTHER; note = 2'-O-methyluridine-3'-phosphorothioate
  modified_base 2: mod_base = OTHER; note = 2'-O-methyluridine-3'-phosphorothioate
  modified_base 3: mod_base = OTHER; note = 2'-O-methyluridine-3'-phosphate
  modified_base 4: mod_base = OTHER; note = 2'-O-methyluridine-3'-phosphate
  modified_base 5: mod_base = OTHER; note = 2'-O-methyluridine-3'-phosphate
  modified_base 6: mod_base = OTHER; note (2R,3S,4S,5R)-5-(6-amino-9H-purin-9-yl)-4-(docosyloxy)-2-(h ydroxymethyl)tetrahydrofuran-3-ol
  modified_base 7: mod_base = OTHER; note = 2'-fluoroadenosine-3'-phosphate
  modified_base 8: mod_base = OTHER; note = 2'-O-methylguanosine-3'-phosphate
  modified_base 9: mod_base = OTHER; note = 2'-fluorouridine-3'-phosphate
  modified_base 10: mod_base = OTHER; note = 2'-fluorouridine-3'-phosphate
  modified_base 11: mod_base = OTHER; note = 2'-fluoroadenosine-3'-phosphate
  modified_base 12: mod_base = OTHER; note = 2'-O-methylguanosine-3'-phosphate
  modified_base 13: mod_base = OTHER; note = 2'-O-methylcytidine-3'-phosphate
  modified_base 14: mod_base = OTHER; note = 2'-O-methyladenosine-3'-phosphate
  modified_base 15: mod_base = OTHER; note = 2'-O-methylguanosine-3'-phosphate
  modified_base 16: mod_base = OTHER; note = 2'-O-methylguanosine-3'-phosphate
  modified_base 17: mod_base = OTHER; note = 2'-O-methyladenosine-3'-phosphate
  modified_base 18: mod_base = OTHER; note = 2'-O-methylcytidine-3'-phosphate
  modified_base 19: mod_base = OTHER; note = 2'-O-methyluridine-3'-phosphorothioate
  modified_base 20: mod_base = OTHER; note = 2'-O-methyluridine-3'-phosphorothioate
  modified_base 21: mod_base = OTHER; note = 2'-O-methyladenosine-3'-phosphate
tttttaagttagcaggactta

SEQ ID NO: 1607 - RNA, 21 nt, synthetic construct
  source 1..21: mol_type = other RNA
  modified_base 1: mod_base = OTHER; note = 2'-O-methyluridine-3'-phosphorothioate
  modified_base 2: mod_base = OTHER; note = 2'-O-methylguanosine-3'-phosphorothioate
  modified_base 3: mod_base = OTHER; note = 2'-O-methyluridine-3'-phosphate
  modified_base 4: mod_base = OTHER; note = 2'-O-methyladenosine-3'-phosphate
  modified_base 5: mod_base = OTHER; note = 2'-O-methyladenosine-3'-phosphate
  modified_base 6: mod_base = OTHER; note (2R,3S,4S,5R)-5-(6-amino-9H-purin-9-yl)-4-(docosyloxy)-2-(h ydroxymethyl)tetrahydrofuran-3-ol
  modified_base 7: mod_base = OTHER; note = 2'-fluorouridine-3'-phosphate
  modified_base 8: mod_base = OTHER; note = 2'-O-methyladenosine-3'-phosphate
  modified_base 9: mod_base = OTHER; note = 2'-fluoroadenosine-3'-phosphate
  modified_base 10: mod_base = OTHER; note = 2'-fluorouridine-3'-phosphate
  modified_base 11: mod_base = OTHER; note = 2'-fluorouridine-3'-phosphate
  modified_base 12: mod_base = OTHER; note = 2'-O-methyladenosine-3'-phosphate
  modified_base 13: mod_base = OTHER; note = 2'-O-methyluridine-3'-phosphate
  modified_base 14: mod_base = OTHER; note = 2'-O-methylcytidine-3'-phosphate
  modified_base 15: mod_base = OTHER; note = 2'-O-methyluridine-3'-phosphate
  modified_base 16: mod_base = OTHER; note = 2'-O-methylguanosine-3'-phosphate
  modified_base 17: mod_base = OTHER; note = 2'-O-methylcytidine-3'-phosphate
  modified_base 18: mod_base = OTHER; note = 2'-O-methylcytidine-3'-phosphate
  modified_base 19: mod_base = OTHER; note = 2'-O-methyluridine-3'-phosphorothioate
  modified_base 20: mod_base = OTHER; note = 2'-O-methyladenosine-3'-phosphorothioate
  modified_base 21: mod_base = OTHER; note = 2'-O-methyladenosine-3'-phosphate
tgtaaataattatctgcctaa

SEQ ID NO: 1608 - RNA, 21 nt, synthetic construct
  source 1..21: mol_type = other RNA
  modified_base 1: mod_base = OTHER; note = 2'-O-methyluridine-3'-phosphorothioate
  modified_base 2: mod_base = OTHER; note = 2'-O-methylguanosine-3'-phosphorothioate
  modified_base 3: mod_base = OTHER; note = 2'-O-methylguanosine-3'-phosphate
  modified_base 4: mod_base = OTHER; note = 2'-O-methyluridine-3'-phosphate
  modified_base 5: mod_base = OTHER; note = 2'-O-methyluridine-3'-phosphate
  modified_base 6: mod_base = OTHER; note 2-amino-9-((2R,3S,4S,5R)-3-(docosyloxy)-4-hydroxy-5-(hydrox ymethyl)tetrahydrofuran-2-yl)-1,9-dihydro-6H-purin-6-one
  modified_base 7: mod_base = OTHER; note = 2'-fluorouridine-3'-phosphate
  modified_base 8: mod_base = OTHER; note = 2'-O-methyladenosine-3'-phosphate
  modified_base 9: mod_base = OTHER; note = 2'-fluorocytidine-3'-phosphate
  modified_base 10: mod_base = OTHER; note = 2'-fluoroguanosine-3'-phosphate
  modified_base 11: mod_base = OTHER; note = 2'-fluorouridine-3'-phosphate
  modified_base 12: mod_base = OTHER; note = 2'-O-methylguanosine-3'-phosphate
  modified_base 13: mod_base = OTHER; note = 2'-O-methylcytidine-3'-phosphate
  modified_base 14: mod_base = OTHER; note = 2'-O-methylcytidine-3'-phosphate
  modified_base 15: mod_base = OTHER; note = 2'-O-methyluridine-3'-phosphate
  modified_base 16: mod_base = OTHER; note = 2'-O-methylcytidine-3'-phosphate
  modified_base 17: mod_base = OTHER; note = 2'-O-methyladenosine-3'-phosphate
  modified_base 18: mod_base = OTHER; note = 2'-O-methyladenosine-3'-phosphate
  modified_base 19: mod_base = OTHER; note = 2'-O-methyladenosine-3'-phosphorothioate
  modified_base 20: mod_base = OTHER; note = 2'-O-methyluridine-3'-phosphorothioate
  modified_base 21: mod_base = OTHER; note = 2'-O-methyladenosine-3'-phosphate
tggttgtacgtgcctcaaata

SEQ ID NO: 1609 - RNA, 23 nt, synthetic construct
  source 1..23: mol_type = other RNA
  modified_base 1: mod_base = OTHER; note = Vinyl-phosphonate 2'-O-methyluridine-3'-phosphorothioate
  modified_base 2: mod_base = OTHER; note = 2'-fluoroadenosine-3'-phosphorothioate
  modified_base 3: mod_base = OTHER; note = 2'-O-methylguanosine-3'-phosphate
  modified_base 4: mod_base = OTHER; note = 2'-O-methylguanosine-3'-phosphate
  modified_base 5: mod_base = OTHER; note = 2'-O-methyladenosine-3'-phosphate
  modified_base 6: mod_base = OTHER; note = 2'-fluoroadenosine-3'-phosphate
  modified_base 7: mod_base = OTHER; note = 2'-O-methyluridine-3'-phosphate
  modified_base 8: mod_base = OTHER; note = 2'-fluoroguanosine-3'-phosphate
  modified_base 9: mod_base = OTHER; note = 2'-fluoroguanosine-3'-phosphate
  modified_base 10: mod_base = OTHER; note = 2'-O-methyladenosine-3'-phosphate
  modified_base 11: mod_base = OTHER; note = 2'-O-methylguanosine-3'-phosphate
  modified_base 12: mod_base = OTHER; note = 2'-O-methyluridine-3'-phosphate
  modified_base 13: mod_base = OTHER; note = 2'-O-methyluridine-3'-phosphate
  modified_base 14: mod_base = OTHER; note = 2'-fluorouridine-3'-phosphate
  modified_base 15: mod_base = OTHER; note = 2'-O-methylguanosine-3'-phosphate
  modified_base 16: mod_base = OTHER; note = 2'-fluoroadenosine-3'-phosphate
  modified_base 17: mod_base = OTHER; note = 2'-O-methyladenosine-3'-phosphate
  modified_base 18: mod_base = OTHER; note = 2'-O-methyladenosine-3'-phosphate
  modified_base 19: mod_base = OTHER; note = 2'-O-methyladenosine-3'-phosphate
  modified_base 20: mod_base = OTHER; note = 2'-O-methyladenosine-3'-phosphate
  modified_base 21: mod_base = OTHER; note = 2'-O-methyladenosine-3'-phosphorothioate
  modified_base 22: mod_base = OTHER; note = 2'-O-methylguanosine-3'-phosphorothioate
  modified_base 23: mod_base = OTHER; note = 2'-O-methyladenosine-3'-phosphate
taggaatggagtttgaaaaaaga

SEQ ID NO: 1610 - RNA, 23 nt, synthetic construct
  source 1..23: mol_type = other RNA
  modified_base 1: mod_base = OTHER; note = Vinyl-phosphonate 2'-O-methyluridine-3'-phosphorothioate
  modified_base 2: mod_base = OTHER; note = 2'-fluoroadenosine-3'-phosphorothioate
  modified_base 3: mod_base = OTHER; note = 2'-O-methyluridine-3'-phosphate
  modified_base 4: mod_base = OTHER; note = 2'-O-methylcytidine-3'-phosphate
  modified_base 5: mod_base = OTHER; note = 2'-O-methyluridine-3'-phosphate
  modified_base 6: mod_base = OTHER; note = 2'-fluoroguanosine-3'-phosphate
  modified_base 7: mod_base = OTHER; note = 2'-O-methyladenosine-3'-phosphate
  modified_base 8: mod_base = OTHER; note = 2'-fluoroadenosine-3'-phosphate
  modified_base 9: mod_base = OTHER; note = 2'-fluoroguanosine-3'-phosphate
  modified_base 10: mod_base = OTHER; note = 2'-O-methyladenosine-3'-phosphate
  modified_base 11: mod_base = OTHER; note = 2'-O-methylcytidine-3'-phosphate
  modified_base 12: mod_base = OTHER; note = 2'-O-methyladenosine-3'-phosphate
  modified_base 13: mod_base = OTHER; note = 2'-O-methylguanosine-3'-phosphate
  modified_base 14: mod_base = OTHER; note = 2'-fluoroadenosine-3'-phosphate
  modified_base 15: mod_base = OTHER; note = 2'-O-methyluridine-3'-phosphate
  modified_base 16: mod_base = OTHER; note = 2'-fluoroguanosine-3'-phosphate
  modified_base 17: mod_base = OTHER; note = 2'-O-methyladenosine-3'-phosphate
  modified_base 18: mod_base = OTHER; note = 2'-O-methyladenosine-3'-phosphate
  modified_base 19: mod_base = OTHER; note = 2'-O-methyladenosine-3'-phosphate
  modified_base 20: mod_base = OTHER; note = 2'-O-methylguanosine-3'-phosphate
  modified_base 21: mod_base = OTHER; note = 2'-O-methyluridine-3'-phosphorothioate
  modified_base 22: mod_base = OTHER; note = 2'-O-methyluridine-3'-phosphorothioate
  modified_base 23: mod_base = OTHER; note = 2'-O-methyladenosine-3'-phosphate
tatctgaagacagatgaaagtta

SEQ ID NO: 1611 - RNA, 23 nt, synthetic construct
  source 1..23: mol_type = other RNA
  modified_base 1: mod_base = OTHER; note = Vinyl-phosphonate 2'-O-methyluridine-3'-phosphorothioate
  modified_base 2: mod_base = OTHER; note = 2'-fluorouridine -3'-phosphorothioate
  modified_base 3: mod_base = OTHER; note = 2'-O-methyluridine-3'-phosphate
  modified_base 4: mod_base = OTHER; note = 2'-O-methyladenosine-3'-phosphate
  modified_base 5: mod_base = OTHER; note = 2'-O-methylcytidine-3'-phosphate
  modified_base 6: mod_base = OTHER; note = 2'-fluorouridine-3'-phosphate
  modified_base 7: mod_base = OTHER; note = 2'-O-methylguanosine-3'-phosphate
  modified_base 8: mod_base = OTHER; note = 2'-fluoroguanosine-3'-phosphate
  modified_base 9: mod_base = OTHER; note = 2'-fluoroadenosine-3'-phosphate
  modified_base 10: mod_base = OTHER; note = 2'-O-methylguanosine-3'-phosphate
  modified_base 11: mod_base = OTHER; note = 2'-O-methyladenosine-3'-phosphate
  modified_base 12: mod_base = OTHER; note = 2'-O-methyladenosine-3'-phosphate
  modified_base 13: mod_base = OTHER; note = 2'-O-methylguanosine-3'-phosphate
  modified_base 14: mod_base = OTHER; note = 2'-fluorouridine-3'-phosphate
  modified_base 15: mod_base = OTHER; note = 2'-O-methyluridine-3'-phosphate
  modified_base 16: mod_base = OTHER; note = 2'-fluoroadenosine-3'-phosphate
  modified_base 17: mod_base = OTHER; note = 2'-O-methyluridine-3'-phosphate
  modified_base 18: mod_base = OTHER; note = 2'-O-methylguanosine-3'-phosphate
  modified_base 19: mod_base = OTHER; note = 2'-O-methyladenosine-3'-phosphate
  modified_base 20: mod_base = OTHER; note = 2'-O-methylguanosine-3'-phosphate
  modified_base 21: mod_base = OTHER; note = 2'-O-methylguanosine-3'-phosphorothioate
  modified_base 22: mod_base = OTHER; note = 2'-O-methyluridine-3'-phosphorothioate
  modified_base 23: mod_base = OTHER; note = 2'-O-methylguanosine-3'-phosphate
tttactggagaagttatgaggtg

SEQ ID NO: 1612 - RNA, 23 nt, synthetic construct
  source 1..23: mol_type = other RNA
  modified_base 1: mod_base = OTHER; note = Vinyl-phosphonate 2'-O-methyluridine-3'-phosphorothioate
  modified_base 2: mod_base = OTHER; note = 2'-fluorouridine -3'-phosphorothioate
  modified_base 3: mod_base = OTHER; note = 2'-O-methyladenosine-3'-phosphate
  modified_base 4: mod_base = OTHER; note = 2'-O-methyladenosine-3'-phosphate
  modified_base 5: mod_base = OTHER; note = 2'-O-methyluridine-3'-phosphate
  modified_base 6: mod_base = OTHER; note = 2'-fluoroguanosine-3'-phosphate
  modified_base 7: mod_base = OTHER; note = 2'-O-methyluridine-3'-phosphate
  modified_base 8: mod_base = OTHER; note = 2'-fluorouridine-3'-phosphate
  modified_base 9: mod_base = OTHER; note = 2'-fluoroguanosine-3'-phosphate
  modified_base 10: mod_base = OTHER; note = 2'-O-methyladenosine-3'-phosphate
  modified_base 11: mod_base = OTHER; note = 2'-O-methyladenosine-3'-phosphate
  modified_base 12: mod_base = OTHER; note = 2'-O-methyladenosine-3'-phosphate
  modified_base 13: mod_base = OTHER; note = 2'-O-methylguanosine-3'-phosphate
  modified_base 14: mod_base = OTHER; note = 2'-fluoroadenosine-3'-phosphate
  modified_base 15: mod_base = OTHER; note = 2'-O-methyluridine-3'-phosphate
  modified_base 16: mod_base = OTHER; note = 2'-fluoroadenosine-3'-phosphate
  modified_base 17: mod_base = OTHER; note = 2'-O-methylguanosine-3'-phosphate
  modified_base 18: mod_base = OTHER; note = 2'-O-methyluridine-3'-phosphate
  modified_base 19: mod_base = OTHER; note = 2'-O-methylguanosine-3'-phosphate
  modified_base 20: mod_base = OTHER; note = 2'-O-methyladenosine-3'-phosphate
  modified_base 21: mod_base = OTHER; note = 2'-O-methylguanosine-3'-phosphorothioate
  modified_base 22: mod_base = OTHER; note = 2'-O-methylguanosine-3'-phosphorothioate
  modified_base 23: mod_base = OTHER; note = 2'-O-methylguanosine-3'-phosphate
ttaatgttgaaagatagtgaggg

SEQ ID NO: 1613 - RNA, 23 nt, synthetic construct
  source 1..23: mol_type = other RNA
  modified_base 1: mod_base = OTHER; note = Vinyl-phosphonate 2'-O-methyluridine-3'-phosphorothioate
  modified_base 2: mod_base = OTHER; note = 2'-fluorouridine -3'-phosphorothioate
  modified_base 3: mod_base = OTHER; note = 2'-O-methylguanosine-3'-phosphate
  modified_base 4: mod_base = OTHER; note = 2'-O-methylguanosine-3'-phosphate
  modified_base 5: mod_base = OTHER; note = 2'-O-methyladenosine-3'-phosphate
  modified_base 6: mod_base = OTHER; note = 2'-fluorouridine-3'-phosphate
  modified_base 7: mod_base = OTHER; note = 2'-O-methylguanosine-3'-phosphate
  modified_base 8: mod_base = OTHER; note = 2'-fluoroadenosine-3'-phosphate
  modified_base 9: mod_base = OTHER; note = 2'-fluoroguanosine-3'-phosphate
  modified_base 10: mod_base = OTHER; note = 2'-O-methyladenosine-3'-phosphate
  modified_base 11: mod_base = OTHER; note = 2'-O-methylguanosine-3'-phosphate
  modified_base 12: mod_base = OTHER; note = 2'-O-methylcytidine-3'-phosphate
  modified_base 13: mod_base = OTHER; note = 2'-O-methyladenosine-3'-phosphate
  modified_base 14: mod_base = OTHER; note = 2'-fluorouridine-3'-phosphate
  modified_base 15: mod_base = OTHER; note = 2'-O-methyluridine-3'-phosphate
  modified_base 16: mod_base = OTHER; note = 2'-fluoroadenosine-3'-phosphate
  modified_base 17: mod_base = OTHER; note = 2'-O-methyladenosine-3'-phosphate
  modified_base 18: mod_base = OTHER; note = 2'-O-methylcytidine-3'-phosphate
  modified_base 19: mod_base = OTHER; note = 2'-O-methylguanosine-3'-phosphate
  modified_base 20: mod_base = OTHER; note = 2'-O-methyladenosine-3'-phosphate
  modified_base 21: mod_base = OTHER; note = 2'-O-methylguanosine-3'-phosphorothioate
  modified_base 22: mod_base = OTHER; note = 2'-O-methyluridine-3'-phosphorothioate
  modified_base 23: mod_base = OTHER; note = 2'-O-methyladenosine-3'-phosphate
ttggatgagagcattaacgagta

SEQ ID NO: 1614 - RNA, 23 nt, synthetic construct
  source 1..23: mol_type = other RNA
  modified_base 1: mod_base = OTHER; note = Vinyl-phosphonate 2'-O-methyluridine-3'-phosphorothioate
  modified_base 2: mod_base = OTHER; note = 2'-fluoroadenosine-3'-phosphorothioate
  modified_base 3: mod_base = OTHER; note = 2'-O-methylguanosine-3'-phosphate
  modified_base 4: mod_base = OTHER; note = 2'-O-methyluridine-3'-phosphate
  modified_base 5: mod_base = OTHER; note = 2'-O-methyladenosine-3'-phosphate
  modified_base 6: mod_base = OTHER; note = 2'-fluoroguanosine-3'-phosphate
  modified_base 7: mod_base = OTHER; note = 2'-O-methyluridine-3'-phosphate
  modified_base 8: mod_base = OTHER; note = 2'-fluoroguanosine-3'-phosphate
  modified_base 9: mod_base = OTHER; note = 2'-fluoroguanosine-3'-phosphate
  modified_base 10: mod_base = OTHER; note = 2'-O-methyladenosine-3'-phosphate
  modified_base 11: mod_base = OTHER; note = 2'-O-methyluridine-3'-phosphate
  modified_base 12: mod_base = OTHER; note = 2'-O-methyluridine-3'-phosphate
  modified_base 13: mod_base = OTHER; note = 2'-O-methyladenosine-3'-phosphate
  modified_base 14: mod_base = OTHER; note = 2'-fluorouridine-3'-phosphate
  modified_base 15: mod_base = OTHER; note = 2'-O-methylguanosine-3'-phosphate
  modified_base 16: mod_base = OTHER; note = 2'-fluoroadenosine-3'-phosphate
  modified_base 17: mod_base = OTHER; note = 2'-O-methyladenosine-3'-phosphate
  modified_base 18: mod_base = OTHER; note = 2'-O-methylguanosine-3'-phosphate
  modified_base 19: mod_base = OTHER; note = 2'-O-methyladenosine-3'-phosphate
  modified_base 20: mod_base = OTHER; note = 2'-O-methyladenosine-3'-phosphate
  modified_base 21: mod_base = OTHER; note = 2'-O-methylcytidine-3'-phosphorothioate
  modified_base 22: mod_base = OTHER; note = 2'-O-methyladenosine-3'-phosphorothioate
  modified_base 23: mod_base = OTHER; note = 2'-O-methylguanosine-3'-phosphate
tagtagtggattatgaagaacag

SEQ ID NO: 1615 - RNA, 23 nt, synthetic construct
  source 1..23: mol_type = other RNA
  modified_base 1: mod_base = OTHER; note = Vinyl-phosphonate 2'-O-methyluridine-3'-phosphorothioate
  modified_base 2: mod_base = OTHER; note = 2'-fluoroadenosine-3'-phosphorothioate
  modified_base 3: mod_base = OTHER; note = 2'-O-methylguanosine-3'-phosphate
  modified_base 4: mod_base = OTHER; note = 2'-O-methyladenosine-3'-phosphate
  modified_base 5: mod_base = OTHER; note = 2'-O-methylguanosine-3'-phosphate
  modified_base 6: mod_base = OTHER; note = 2'-fluoroadenosine-3'-phosphate
  modified_base 7: mod_base = OTHER; note = 2'-O-methyluridine-3'-phosphate
  modified_base 8: mod_base = OTHER; note = 2'-fluorouridine-3'-phosphate
  modified_base 9: mod_base = OTHER; note = 2'-fluoroguanosine-3'-phosphate
  modified_base 10: mod_base = OTHER; note = 2'-O-methylguanosine-3'-phosphate
  modified_base 11: mod_base = OTHER; note = 2'-O-methyladenosine-3'-phosphate
  modified_base 12: mod_base = OTHER; note = 2'-O-methyluridine-3'-phosphate
  modified_base 13: mod_base = OTHER; note = 2'-O-methylguanosine-3'-phosphate
  modified_base 14: mod_base = OTHER; note = 2'-fluoroadenosine-3'-phosphate
  modified_base 15: mod_base = OTHER; note = 2'-O-methyladenosine-3'-phosphate
  modified_base 16: mod_base = OTHER; note = 2'-fluoroguanosine-3'-phosphate
  modified_base 17: mod_base = OTHER; note = 2'-O-methyluridine-3'-phosphate
  modified_base 18: mod_base = OTHER; note = 2'-O-methylcytidine-3'-phosphate
  modified_base 19: mod_base = OTHER; note = 2'-O-methyladenosine-3'-phosphate
  modified_base 20: mod_base = OTHER; note = 2'-O-methyladenosine-3'-phosphate
  modified_base 21: mod_base = OTHER; note = 2'-O-methylcytidine-3'-phosphorothioate
  modified_base 22: mod_base = OTHER; note = 2'-O-methyluridine-3'-phosphorothioate
  modified_base 23: mod_base = OTHER; note = 2'-O-methylcytidine-3'-phosphate
tagagattggatgaagtcaactc

SEQ ID NO: 1616 - RNA, 23 nt, synthetic construct
  source 1..23: mol_type = other RNA
  modified_base 1: mod_base = OTHER; note = Vinyl-phosphonate 2'-O-methyluridine-3'-phosphorothioate
  modified_base 2: mod_base = OTHER; note = 2'-fluorouridine -3'-phosphorothioate
  modified_base 3: mod_base = OTHER; note = 2'-O-methyluridine-3'-phosphate
  modified_base 4: mod_base = OTHER; note = 2'-O-methyladenosine-3'-phosphate
  modified_base 5: mod_base = OTHER; note = 2'-O-methyladenosine-3'-phosphate
  modified_base 6: mod_base = OTHER; note = 2'-fluoroguanosine-3'-phosphate
  modified_base 7: mod_base = OTHER; note = 2'-O-methyladenosine-3'-phosphate
  modified_base 8: mod_base = OTHER; note = 2'-fluoroadenosine-3'-phosphate
  modified_base 9: mod_base = OTHER; note = 2'-fluoroguanosine-3'-phosphate
  modified_base 10: mod_base = OTHER; note = 2'-O-methyluridine-3'-phosphate
  modified_base 11: mod_base = OTHER; note = 2'-O-methyluridine-3'-phosphate
  modified_base 12: mod_base = OTHER; note = 2'-O-methylcytidine-3'-phosphate
  modified_base 13: mod_base = OTHER; note = 2'-O-methyladenosine-3'-phosphate
  modified_base 14: mod_base = OTHER; note = 2'-fluorouridine-3'-phosphate
  modified_base 15: mod_base = OTHER; note = 2'-O-methyluridine-3'-phosphate
  modified_base 16: mod_base = OTHER; note = 2'-fluoroguanosine-3'-phosphate
  modified_base 17: mod_base = OTHER; note = 2'-O-methyluridine-3'-phosphate
  modified_base 18: mod_base = OTHER; note = 2'-O-methylguanosine-3'-phosphate
  modified_base 19: mod_base = OTHER; note = 2'-O-methyluridine-3'-phosphate
  modified_base 20: mod_base = OTHER; note = 2'-O-methyladenosine-3'-phosphate
  modified_base 21: mod_base = OTHER; note = 2'-O-methylguanosine-3'-phosphorothioate
  modified_base 22: mod_base = OTHER; note = 2'-O-methyladenosine-3'-phosphorothioate
  modified_base 23: mod_base = OTHER; note = 2'-O-methyladenosine-3'-phosphate
tttaagaagttcattgtgtagaa

SEQ ID NO: 1617 - RNA, 23 nt, synthetic construct
  source 1..23: mol_type = other RNA
  modified_base 1: mod_base = OTHER; note = Vinyl-phosphonate 2'-O-methyluridine-3'-phosphorothioate
  modified_base 2: mod_base = OTHER; note = 2'-fluoroadenosine-3'-phosphorothioate
  modified_base 3: mod_base = OTHER; note = 2'-O-methyladenosine-3'-phosphate
  modified_base 4: mod_base = OTHER; note = 2'-O-methyluridine-3'-phosphate
  modified_base 5: mod_base = OTHER; note = 2'-O-methyluridine-3'-phosphate
  modified_base 6: mod_base = OTHER; note = 2'-fluoroadenosine-3'-phosphate
  modified_base 7: mod_base = OTHER; note = 2'-O-methyladenosine-3'-phosphate
  modified_base 8: mod_base = OTHER; note = 2'-fluoroguanosine-3'-phosphate
  modified_base 9: mod_base = OTHER; note = 2'-fluoroadenosine-3'-phosphate
  modified_base 10: mod_base = OTHER; note = 2'-O-methyladenosine-3'-phosphate
  modified_base 11: mod_base = OTHER; note = 2'-O-methyluridine-3'-phosphate
  modified_base 12: mod_base = OTHER; note = 2'-O-methyluridine-3'-phosphate
  modified_base 13: mod_base = OTHER; note = 2'-O-methylcytidine-3'-phosphate
  modified_base 14: mod_base = OTHER; note = 2'-fluorouridine-3'-phosphate
  modified_base 15: mod_base = OTHER; note = 2'-O-methyladenosine-3'-phosphate
  modified_base 16: mod_base = OTHER; note = 2'-fluoroguanosine-3'-phosphate
  modified_base 17: mod_base = OTHER; note = 2'-O-methyladenosine-3'-phosphate
  modified_base 18: mod_base = OTHER; note = 2'-O-methyluridine-3'-phosphate
  modified_base 19: mod_base = OTHER; note = 2'-O-methylguanosine-3'-phosphate
  modified_base 20: mod_base = OTHER; note = 2'-O-methyluridine-3'-phosphate
  modified_base 21: mod_base = OTHER; note = 2'-O-methylguanosine-3'-phosphorothioate
  modified_base 22: mod_base = OTHER; note = 2'-O-methyladenosine-3'-phosphorothioate
  modified_base 23: mod_base = OTHER; note = 2'-O-methylcytidine-3'-phosphate
taattaagaattctagatgtgac

SEQ ID NO: 1618 - RNA, 23 nt, synthetic construct
  source 1..23: mol_type = other RNA
  modified_base 1: mod_base = OTHER; note = Vinyl-phosphonate 2'-O-methyluridine-3'-phosphorothioate
  modified_base 2: mod_base = OTHER; note = 2'-fluoroadenosine-3'-phosphorothioate
  modified_base 3: mod_base = OTHER; note = 2'-O-methyladenosine-3'-phosphate
  modified_base 4: mod_base = OTHER; note = 2'-O-methylguanosine-3'-phosphate
  modified_base 5: mod_base = OTHER; note = 2'-O-methyladenosine-3'-phosphate
  modified_base 6: mod_base = OTHER; note = 2'-fluoroadenosine-3'-phosphate
  modified_base 7: mod_base = OTHER; note = 2'-O-methyladenosine-3'-phosphate
  modified_base 8: mod_base = OTHER; note = 2'-fluoroguanosine-3'-phosphate
  modified_base 9: mod_base = OTHER; note = 2'-fluorocytidine-3'-phosphate
  modified_base 10: mod_base = OTHER; note = 2'-O-methyluridine-3'-phosphate
  modified_base 11: mod_base = OTHER; note = 2'-O-methyladenosine-3'-phosphate
  modified_base 12: mod_base = OTHER; note = 2'-O-methyluridine-3'-phosphate
  modified_base 13: mod_base = OTHER; note = 2'-O-methylguanosine-3'-phosphate
  modified_base 14: mod_base = OTHER; note = 2'-fluoroadenosine-3'-phosphate
  modified_base 15: mod_base = OTHER; note = 2'-O-methylguanosine-3'-phosphate
  modified_base 16: mod_base = OTHER; note = 2'-fluoroadenosine-3'-phosphate
  modified_base 17: mod_base = OTHER; note = 2'-O-methylguanosine-3'-phosphate
  modified_base 18: mod_base = OTHER; note = 2'-O-methyladenosine-3'-phosphate
  modified_base 19: mod_base = OTHER; note = 2'-O-methyluridine-3'-phosphate
  modified_base 20: mod_base = OTHER; note = 2'-O-methyluridine-3'-phosphate
  modified_base 21: mod_base = OTHER; note = 2'-O-methyluridine-3'-phosphorothioate
  modified_base 22: mod_base = OTHER; note = 2'-O-methylcytidine-3'-phosphorothioate
  modified_base 23: mod_base = OTHER; note = 2'-O-methyluridine-3'-phosphate
taagaaagctatgagagatttct

SEQ ID NO: 1619 - RNA, 23 nt, synthetic construct
  source 1..23: mol_type = other RNA
  modified_base 1: mod_base = OTHER; note = Vinyl-phosphonate 2'-O-methyluridine-3'-phosphorothioate
  modified_base 2: mod_base = OTHER; note = 2'-fluoroadenosine-3'-phosphorothioate
  modified_base 3: mod_base = OTHER; note = 2'-O-methylguanosine-3'-phosphate
  modified_base 4: mod_base = OTHER; note = 2'-O-methyluridine-3'-phosphate
  modified_base 5: mod_base = OTHER; note = 2'-O-methyladenosine-3'-phosphate
  modified_base 6: mod_base = OTHER; note = 2'-fluoroadenosine-3'-phosphate
  modified_base 7: mod_base = OTHER; note = 2'-O-methyluridine-3'-phosphate
  modified_base 8: mod_base = OTHER; note = 2'-fluorouridine-3'-phosphate
  modified_base 9: mod_base = OTHER; note = 2'-fluorocytidine-3'-phosphate
  modified_base 10: mod_base = OTHER; note = 2'-O-methyluridine-3'-phosphate
  modified_base 11: mod_base = OTHER; note = 2'-O-methyladenosine-3'-phosphate
  modified_base 12: mod_base = OTHER; note = 2'-O-methylcytidine-3'-phosphate
  modified_base 13: mod_base = OTHER; note = 2'-O-methyladenosine-3'-phosphate
  modified_base 14: mod_base = OTHER; note = 2'-fluoroadenosine-3'-phosphate
  modified_base 15: mod_base = OTHER; note = 2'-O-methyluridine-3'-phosphate
  modified_base 16: mod_base = OTHER; note = 2'-fluoroadenosine-3'-phosphate
  modified_base 17: mod_base = OTHER; note = 2'-O-methylguanosine-3'-phosphate
  modified_base 18: mod_base = OTHER; note = 2'-O-methyluridine-3'-phosphate
  modified_base 19: mod_base = OTHER; note = 2'-O-methyladenosine-3'-phosphate
  modified_base 20: mod_base = OTHER; note = 2'-O-methylguanosine-3'-phosphate
  modified_base 21: mod_base = OTHER; note = 2'-O-methylguanosine-3'-phosphorothioate
  modified_base 22: mod_base = OTHER; note = 2'-O-methyluridine-3'-phosphorothioate
  modified_base 23: mod_base = OTHER; note = 2'-O-methylguanosine-3'-phosphate
tagtaattctacaatagtaggtg

SEQ ID NO: 1620 - RNA, 23 nt, synthetic construct
  source 1..23: mol_type = other RNA
  modified_base 1: mod_base = OTHER; note = Vinyl-phosphonate 2'-O-methyluridine-3'-phosphorothioate
  modified_base 2: mod_base = OTHER; note = 2'-fluorouridine -3'-phosphorothioate
  modified_base 3: mod_base = OTHER; note = 2'-O-methyluridine-3'-phosphate
  modified_base 4: mod_base = OTHER; note = 2'-O-methyladenosine-3'-phosphate
  modified_base 5: mod_base = OTHER; note = 2'-O-methyladenosine-3'-phosphate
  modified_base 6: mod_base = OTHER; note = 2'-fluorouridine-3'-phosphate
  modified_base 7: mod_base = OTHER; note = 2'-O-methylguanosine-3'-phosphate
  modified_base 8: mod_base = OTHER; note = 2'-fluorocytidine-3'-phosphate
  modified_base 9: mod_base = OTHER; note = 2'-fluoroadenosine-3'-phosphate
  modified_base 10: mod_base = OTHER; note = 2'-O-methylcytidine-3'-phosphate
  modified_base 11: mod_base = OTHER; note = 2'-O-methyluridine-3'-phosphate
  modified_base 12: mod_base = OTHER; note = 2'-O-methyladenosine-3'-phosphate
  modified_base 13: mod_base = OTHER; note = 2'-O-methyladenosine-3'-phosphate
  modified_base 14: mod_base = OTHER; note = 2'-fluoroadenosine-3'-phosphate
  modified_base 15: mod_base = OTHER; note = 2'-O-methyladenosine-3'-phosphate
  modified_base 16: mod_base = OTHER; note = 2'-fluoroguanosine-3'-phosphate
  modified_base 17: mod_base = OTHER; note = 2'-O-methyladenosine-3'-phosphate
  modified_base 18: mod_base = OTHER; note = 2'-O-methyladenosine-3'-phosphate
  modified_base 19: mod_base = OTHER; note = 2'-O-methylguanosine-3'-phosphate
  modified_base 20: mod_base = OTHER; note = 2'-O-methyladenosine-3'-phosphate
  modified_base 21: mod_base = OTHER; note = 2'-O-methyluridine-3'-phosphorothioate
  modified_base 22: mod_base = OTHER; note = 2'-O-methylguanosine-3'-phosphorothioate
  modified_base 23: mod_base = OTHER; note = 2'-O-methyladenosine-3'-phosphate
tttaatgcactaaaagaagatga

SEQ ID NO: 1621 - RNA, 23 nt, synthetic construct
  source 1..23: mol_type = other RNA
  modified_base 1: mod_base = OTHER; note = Vinyl-phosphonate 2'-O-methyluridine-3'-phosphorothioate
  modified_base 2: mod_base = OTHER; note = 2'-fluoroguanosine-3'-phosphorothioate
  modified_base 3: mod_base = OTHER; note = 2'-O-methyladenosine-3'-phosphate
  modified_base 4: mod_base = OTHER; note = 2'-O-methyladenosine-3'-phosphate
  modified_base 5: mod_base = OTHER; note = 2'-O-methyluridine-3'-phosphate
  modified_base 6: mod_base = OTHER; note = 2'-fluorocytidine-3'-phosphate
  modified_base 7: mod_base = OTHER; note = 2'-O-methyladenosine-3'-phosphate
  modified_base 8: mod_base = OTHER; note = 2'-fluoroguanosine-3'-phosphate
  modified_base 9: mod_base = OTHER; note = 2'-fluoroadenosine-3'-phosphate
  modified_base 10: mod_base = OTHER; note = 2'-O-methyladenosine-3'-phosphate
  modified_base 11: mod_base = OTHER; note = 2'-O-methylguanosine-3'-phosphate
  modified_base 12: mod_base = OTHER; note = 2'-O-methyladenosine-3'-phosphate
  modified_base 13: mod_base = OTHER; note = 2'-O-methylguanosine-3'-phosphate
  modified_base 14: mod_base = OTHER; note = 2'-fluorouridine-3'-phosphate
  modified_base 15: mod_base = OTHER; note = 2'-O-methyladenosine-3'-phosphate
  modified_base 16: mod_base = OTHER; note = 2'-fluorocytidine-3'-phosphate
  modified_base 17: mod_base = OTHER; note = 2'-O-methyladenosine-3'-phosphate
  modified_base 18: mod_base = OTHER; note = 2'-O-methyluridine-3'-phosphate
  modified_base 19: mod_base = OTHER; note = 2'-O-methylguanosine-3'-phosphate
  modified_base 20: mod_base = OTHER; note = 2'-O-methyladenosine-3'-phosphate
  modified_base 21: mod_base = OTHER; note = 2'-O-methylguanosine-3'-phosphorothioate
  modified_base 22: mod_base = OTHER; note = 2'-O-methylcytidine-3'-phosphorothioate
  modified_base 23: mod_base = OTHER; note = 2'-O-methyluridine-3'-phosphate
tgaatcagaagagtacatgagct

SEQ ID NO: 1622 - RNA, 23 nt, synthetic construct
  source 1..23: mol_type = other RNA
  modified_base 1: mod_base = OTHER; note = Vinyl-phosphonate 2'-O-methyluridine-3'-phosphorothioate
  modified_base 2: mod_base = OTHER; note = 2'-fluorouridine -3'-phosphorothioate
  modified_base 3: mod_base = OTHER; note = 2'-O-methyluridine-3'-phosphate
  modified_base 4: mod_base = OTHER; note = 2'-O-methylcytidine-3'-phosphate
  modified_base 5: mod_base = OTHER; note = 2'-O-methylcytidine-3'-phosphate
  modified_base 6: mod_base = OTHER; note = 2'-fluoroadenosine-3'-phosphate
  modified_base 7: mod_base = OTHER; note = 2'-O-methyladenosine-3'-phosphate
  modified_base 8: mod_base = OTHER; note = 2'-fluoroguanosine-3'-phosphate
  modified_base 9: mod_base = OTHER; note = 2'-fluoroguanosine-3'-phosphate
  modified_base 10: mod_base = OTHER; note = 2'-O-methyluridine-3'-phosphate
  modified_base 11: mod_base = OTHER; note = 2'-O-methyladenosine-3'-phosphate
  modified_base 12: mod_base = OTHER; note = 2'-O-methylcytidine-3'-phosphate
  modified_base 13: mod_base = OTHER; note = 2'-O-methyladenosine-3'-phosphate
  modified_base 14: mod_base = OTHER; note = 2'-fluoroadenosine-3'-phosphate
  modified_base 15: mod_base = OTHER; note = 2'-O-methyladenosine-3'-phosphate
  modified_base 16: mod_base = OTHER; note = 2'-fluoroguanosine-3'-phosphate
  modified_base 17: mod_base = OTHER; note = 2'-O-methyladenosine-3'-phosphate
  modified_base 18: mod_base = OTHER; note = 2'-O-methylguanosine-3'-phosphate
  modified_base 19: mod_base = OTHER; note = 2'-O-methyladenosine-3'-phosphate
  modified_base 20: mod_base = OTHER; note = 2'-O-methyladenosine-3'-phosphate
  modified_base 21: mod_base = OTHER; note = 2'-O-methyladenosine-3'-phosphorothioate
  modified_base 22: mod_base = OTHER; note = 2'-O-methylguanosine-3'-phosphorothioate
  modified_base 23: mod_base = OTHER; note = 2'-O-methyladenosine-3'-phosphate
tttccaaggtacaaagagaaaga

SEQ ID NO: 1623 - RNA, 23 nt, synthetic construct
  source 1..23: mol_type = other RNA
  modified_base 1: mod_base = OTHER; note = Vinyl-phosphonate 2'-O-methyluridine-3'-phosphorothioate
  modified_base 2: mod_base = OTHER; note = 2'-fluorouridine -3'-phosphorothioate
  modified_base 3: mod_base = OTHER; note = 2'-O-methyluridine-3'-phosphate
  modified_base 4: mod_base = OTHER; note = 2'-O-methylcytidine-3'-phosphate
  modified_base 5: mod_base = OTHER; note = 2'-O-methyluridine-3'-phosphate
  modified_base 6: mod_base = OTHER; note = 2'-fluoroguanosine-3'-phosphate
  modified_base 7: mod_base = OTHER; note = 2'-O-methyladenosine-3'-phosphate
  modified_base 8: mod_base = OTHER; note = 2'-fluoroadenosine-3'-phosphate
  modified_base 9: mod_base = OTHER; note = 2'-fluoroguanosine-3'-phosphate
  modified_base 10: mod_base = OTHER; note = 2'-O-methyladenosine-3'-phosphate
  modified_base 11: mod_base = OTHER; note = 2'-O-methyluridine-3'-phosphate
  modified_base 12: mod_base = OTHER; note = 2'-O-methylguanosine-3'-phosphate
  modified_base 13: mod_base = OTHER; note = 2'-O-methyluridine-3'-phosphate
  modified_base 14: mod_base = OTHER; note = 2'-fluoroadenosine-3'-phosphate
  modified_base 15: mod_base = OTHER; note = 2'-O-methyluridine-3'-phosphate
  modified_base 16: mod_base = OTHER; note = 2'-fluoroadenosine-3'-phosphate
  modified_base 17: mod_base = OTHER; note = 2'-O-methyladenosine-3'-phosphate
  modified_base 18: mod_base = OTHER; note = 2'-O-methylguanosine-3'-phosphate
  modified_base 19: mod_base = OTHER; note = 2'-O-methylcytidine-3'-phosphate
  modified_base 20: mod_base = OTHER; note = 2'-O-methylcytidine-3'-phosphate
  modified_base 21: mod_base = OTHER; note = 2'-O-methyladenosine-3'-phosphorothioate
  modified_base 22: mod_base = OTHER; note = 2'-O-methylguanosine-3'-phosphorothioate
  modified_base 23: mod_base = OTHER; note = 2'-O-methyladenosine-3'-phosphate
tttctgaagatgtataagccaga

SEQ ID NO: 1624 - RNA, 23 nt, synthetic construct
  source 1..23: mol_type = other RNA
  modified_base 1: mod_base = OTHER; note = Vinyl-phosphonate 2'-O-methyluridine-3'-phosphorothioate
  modified_base 2: mod_base = OTHER; note = 2'-fluoroadenosine-3'-phosphorothioate
  modified_base 3: mod_base = OTHER; note = 2'-O-methyluridine-3'-phosphate
  modified_base 4: mod_base = OTHER; note = 2'-O-methyladenosine-3'-phosphate
  modified_base 5: mod_base = OTHER; note = 2'-O-methylguanosine-3'-phosphate
  modified_base 6: mod_base = OTHER; note = 2'-fluoroguanosine-3'-phosphate
  modified_base 7: mod_base = OTHER; note = 2'-O-methyladenosine-3'-phosphate
  modified_base 8: mod_base = OTHER; note = 2'-fluoroguanosine-3'-phosphate
  modified_base 9: mod_base = OTHER; note = 2'-fluorouridine-3'-phosphate
  modified_base 10: mod_base = OTHER; note = 2'-O-methyladenosine-3'-phosphate
  modified_base 11: mod_base = OTHER; note = 2'-O-methylguanosine-3'-phosphate
  modified_base 12: mod_base = OTHER; note = 2'-O-methyluridine-3'-phosphate
  modified_base 13: mod_base = OTHER; note = 2'-O-methyluridine-3'-phosphate
  modified_base 14: mod_base = OTHER; note = 2'-fluorouridine-3'-phosphate
  modified_base 15: mod_base = OTHER; note = 2'-O-methyluridine-3'-phosphate
  modified_base 16: mod_base = OTHER; note = 2'-fluoroguanosine-3'-phosphate
  modified_base 17: mod_base = OTHER; note = 2'-O-methyluridine-3'-phosphate
  modified_base 18: mod_base = OTHER; note = 2'-O-methyluridine-3'-phosphate
  modified_base 19: mod_base = OTHER; note = 2'-O-methyluridine-3'-phosphate
  modified_base 20: mod_base = OTHER; note = 2'-O-methyluridine-3'-phosphate
  modified_base 21: mod_base = OTHER; note = 2'-O-methylguanosine-3'-phosphorothioate
  modified_base 22: mod_base = OTHER; note = 2'-O-methyluridine-3'-phosphorothioate
  modified_base 23: mod_base = OTHER; note = 2'-O-methyluridine-3'-phosphate
tataggagtagttttgttttgtt

SEQ ID NO: 1625 - RNA, 23 nt, synthetic construct
  source 1..23: mol_type = other RNA
  modified_base 1: mod_base = OTHER; note = Vinyl-phosphonate 2'-O-methyluridine-3'-phosphorothioate
  modified_base 2: mod_base = OTHER; note = 2'-fluorouridine -3'-phosphorothioate
  modified_base 3: mod_base = OTHER; note = 2'-O-methyluridine-3'-phosphate
  modified_base 4: mod_base = OTHER; note = 2'-O-methylcytidine-3'-phosphate
  modified_base 5: mod_base = OTHER; note = 2'-O-methyladenosine-3'-phosphate
  modified_base 6: mod_base = OTHER; note = 2'-fluorouridine-3'-phosphate
  modified_base 7: mod_base = OTHER; note = 2'-O-methyladenosine-3'-phosphate
  modified_base 8: mod_base = OTHER; note = 2'-fluoroadenosine-3'-phosphate
  modified_base 9: mod_base = OTHER; note = 2'-fluoroguanosine-3'-phosphate
  modified_base 10: mod_base = OTHER; note = 2'-O-methyladenosine-3'-phosphate
  modified_base 11: mod_base = OTHER; note = 2'-O-methylguanosine-3'-phosphate
  modified_base 12: mod_base = OTHER; note = 2'-O-methyluridine-3'-phosphate
  modified_base 13: mod_base = OTHER; note = 2'-O-methyluridine-3'-phosphate
  modified_base 14: mod_base = OTHER; note = 2'-fluorocytidine-3'-phosphate
  modified_base 15: mod_base = OTHER; note = 2'-O-methyluridine-3'-phosphate
  modified_base 16: mod_base = OTHER; note = 2'-fluoroguanosine-3'-phosphate
  modified_base 17: mod_base = OTHER; note = 2'-O-methylcytidine-3'-phosphate
  modified_base 18: mod_base = OTHER; note = 2'-O-methyluridine-3'-phosphate
  modified_base 19: mod_base = OTHER; note = 2'-O-methyladenosine-3'-phosphate
  modified_base 20: mod_base = OTHER; note = 2'-O-methylguanosine-3'-phosphate
  modified_base 21: mod_base = OTHER; note = 2'-O-methyluridine-3'-phosphorothioate
  modified_base 22: mod_base = OTHER; note = 2'-O-methyladenosine-3'-phosphorothioate
  modified_base 23: mod_base = OTHER; note = 2'-O-methyladenosine-3'-phosphate
tttcataagagttctgctagtaa

SEQ ID NO: 1626 - RNA, 23 nt, synthetic construct
  source 1..23: mol_type = other RNA
  modified_base 1: mod_base = OTHER; note = Vinyl-phosphonate 2'-O-methyluridine-3'-phosphorothioate
  modified_base 2: mod_base = OTHER; note = 2'-fluoroguanosine-3'-phosphorothioate
  modified_base 3: mod_base = OTHER; note = 2'-O-methylguanosine-3'-phosphate
  modified_base 4: mod_base = OTHER; note = 2'-O-methyladenosine-3'-phosphate
  modified_base 5: mod_base = OTHER; note = 2'-O-methyladenosine-3'-phosphate
  modified_base 6: mod_base = OTHER; note = 2'-fluorouridine-3'-phosphate
  modified_base 7: mod_base = OTHER; note = 2'-O-methyluridine-3'-phosphate
  modified_base 8: mod_base = OTHER; note = 2'-fluoroadenosine-3'-phosphate
  modified_base 9: mod_base = OTHER; note = 2'-fluorouridine-3'-phosphate
  modified_base 10: mod_base = OTHER; note = 2'-O-methyladenosine-3'-phosphate
  modified_base 11: mod_base = OTHER; note = 2'-O-methylguanosine-3'-phosphate
  modified_base 12: mod_base = OTHER; note = 2'-O-methyladenosine-3'-phosphate
  modified_base 13: mod_base = OTHER; note = 2'-O-methylguanosine-3'-phosphate
  modified_base 14: mod_base = OTHER; note = 2'-fluorouridine-3'-phosphate
  modified_base 15: mod_base = OTHER; note = 2'-O-methylguanosine-3'-phosphate
  modified_base 16: mod_base = OTHER; note = 2'-fluoroadenosine-3'-phosphate
  modified_base 17: mod_base = OTHER; note = 2'-O-methylcytidine-3'-phosphate
  modified_base 18: mod_base = OTHER; note = 2'-O-methyluridine-3'-phosphate
  modified_base 19: mod_base = OTHER; note = 2'-O-methyluridine-3'-phosphate
  modified_base 20: mod_base = OTHER; note = 2'-O-methylguanosine-3'-phosphate
  modified_base 21: mod_base = OTHER; note = 2'-O-methylguanosine-3'-phosphorothioate
  modified_base 22: mod_base = OTHER; note = 2'-O-methylguanosine-3'-phosphorothioate
  modified_base 23: mod_base = OTHER; note = 2'-O-methyladenosine-3'-phosphate
tggaattatagagtgacttggga

SEQ ID NO: 1627 - RNA, 23 nt, synthetic construct
  source 1..23: mol_type = other RNA
  modified_base 1: mod_base = OTHER; note = Vinyl-phosphonate 2'-O-methyluridine-3'-phosphorothioate
  modified_base 2: mod_base = OTHER; note = 2'-fluoroadenosine-3'-phosphorothioate
  modified_base 3: mod_base = OTHER; note = 2'-O-methyluridine-3'-phosphate
  modified_base 4: mod_base = OTHER; note = 2'-O-methyladenosine-3'-phosphate
  modified_base 5: mod_base = OTHER; note = 2'-O-methyladenosine-3'-phosphate
  modified_base 6: mod_base = OTHER; note = 2'-fluorouridine-3'-phosphate
  modified_base 7: mod_base = OTHER; note = 2'-O-methylguanosine-3'-phosphate
  modified_base 8: mod_base = OTHER; note = 2'-fluoroadenosine-3'-phosphate
  modified_base 9: mod_base = OTHER; note = 2'-fluorocytidine-3'-phosphate
  modified_base 10: mod_base = OTHER; note = 2'-O-methyladenosine-3'-phosphate
  modified_base 11: mod_base = OTHER; note = 2'-O-methyladenosine-3'-phosphate
  modified_base 12: mod_base = OTHER; note = 2'-O-methylguanosine-3'-phosphate
  modified_base 13: mod_base = OTHER; note = 2'-O-methyladenosine-3'-phosphate
  modified_base 14: mod_base = OTHER; note = 2'-fluoroadenosine-3'-phosphate
  modified_base 15: mod_base = OTHER; note = 2'-O-methyladenosine-3'-phosphate
  modified_base 16: mod_base = OTHER; note = 2'-fluoroadenosine-3'-phosphate
  modified_base 17: mod_base = OTHER; note = 2'-O-methyladenosine-3'-phosphate
  modified_base 18: mod_base = OTHER; note = 2'-O-methyluridine-3'-phosphate
  modified_base 19: mod_base = OTHER; note = 2'-O-methylguanosine-3'-phosphate
  modified_base 20: mod_base = OTHER; note = 2'-O-methylguanosine-3'-phosphate
  modified_base 21: mod_base = OTHER; note = 2'-O-methyladenosine-3'-phosphorothioate
  modified_base 22: mod_base = OTHER; note = 2'-O-methylguanosine-3'-phosphorothioate
  modified_base 23: mod_base = OTHER; note = 2'-O-methyladenosine-3'-phosphate
tataatgacaagaaaaatggaga

SEQ ID NO: 1628 - RNA, 23 nt, synthetic construct
  source 1..23: mol_type = other RNA
  modified_base 1: mod_base = OTHER; note = Vinyl-phosphonate 2'-O-methyluridine-3'-phosphorothioate
  modified_base 2: mod_base = OTHER; note = 2'-fluoroadenosine-3'-phosphorothioate
  modified_base 3: mod_base = OTHER; note = 2'-O-methyladenosine-3'-phosphate
  modified_base 4: mod_base = OTHER; note = 2'-O-methyladenosine-3'-phosphate
  modified_base 5: mod_base = OTHER; note = 2'-O-methylguanosine-3'-phosphate
  modified_base 6: mod_base = OTHER; note = 2'-fluoroadenosine-3'-phosphate
  modified_base 7: mod_base = OTHER; note = 2'-O-methyluridine-3'-phosphate
  modified_base 8: mod_base = OTHER; note = 2'-fluoroguanosine-3'-phosphate
  modified_base 9: mod_base = OTHER; note = 2'-fluoroadenosine-3'-phosphate
  modified_base 10: mod_base = OTHER; note = 2'-O-methylguanosine-3'-phosphate
  modified_base 11: mod_base = OTHER; note = 2'-O-methyluridine-3'-phosphate
  modified_base 12: mod_base = OTHER; note = 2'-O-methyluridine-3'-phosphate
  modified_base 13: mod_base = OTHER; note = 2'-O-methylguanosine-3'-phosphate
  modified_base 14: mod_base = OTHER; note = 2'-fluoroadenosine-3'-phosphate
  modified_base 15: mod_base = OTHER; note = 2'-O-methylguanosine-3'-phosphate
  modified_base 16: mod_base = OTHER; note = 2'-fluoroguanosine-3'-phosphate
  modified_base 17: mod_base = OTHER; note = 2'-O-methyluridine-3'-phosphate
  modified_base 18: mod_base = OTHER; note = 2'-O-methylguanosine-3'-phosphate
  modified_base 19: mod_base = OTHER; note = 2'-O-methyluridine-3'-phosphate
  modified_base 20: mod_base = OTHER; note = 2'-O-methyluridine-3'-phosphate
  modified_base 21: mod_base = OTHER; note = 2'-O-methylguanosine-3'-phosphorothioate
  modified_base 22: mod_base = OTHER; note = 2'-O-methylcytidine-3'-phosphorothioate
  modified_base 23: mod_base = OTHER; note = 2'-O-methyluridine-3'-phosphate
taaagatgagttgaggtgttgct

SEQ ID NO: 1629 - RNA, 23 nt, synthetic construct
  source 1..23: mol_type = other RNA
  modified_base 1: mod_base = OTHER; note = Vinyl-phosphonate 2'-O-methyluridine-3'-phosphorothioate
  modified_base 2: mod_base = OTHER; note = 2'-fluorouridine -3'-phosphorothioate
  modified_base 3: mod_base = OTHER; note = 2'-O-methyladenosine-3'-phosphate
  modified_base 4: mod_base = OTHER; note = 2'-O-methyladenosine-3'-phosphate
  modified_base 5: mod_base = OTHER; note = 2'-O-methyladenosine-3'-phosphate
  modified_base 6: mod_base = OTHER; note = 2'-fluorouridine-3'-phosphate
  modified_base 7: mod_base = OTHER; note = 2'-O-methylcytidine-3'-phosphate
  modified_base 8: mod_base = OTHER; note = 2'-fluoroadenosine-3'-phosphate
  modified_base 9: mod_base = OTHER; note = 2'-fluoroguanosine-3'-phosphate
  modified_base 10: mod_base = OTHER; note = 2'-O-methyladenosine-3'-phosphate
  modified_base 11: mod_base = OTHER; note = 2'-O-methyluridine-3'-phosphate
  modified_base 12: mod_base = OTHER; note = 2'-O-methylcytidine-3'-phosphate
  modified_base 13: mod_base = OTHER; note = 2'-O-methyluridine-3'-phosphate
  modified_base 14: mod_base = OTHER; note = 2'-fluorouridine-3'-phosphate
  modified_base 15: mod_base = OTHER; note = 2'-O-methyluridine-3'-phosphate
  modified_base 16: mod_base = OTHER; note = 2'-fluorocytidine-3'-phosphate
  modified_base 17: mod_base = OTHER; note = 2'-O-methyladenosine-3'-phosphate
  modified_base 18: mod_base = OTHER; note = 2'-O-methylguanosine-3'-phosphate
  modified_base 19: mod_base = OTHER; note = 2'-O-methyladenosine-3'-phosphate
  modified_base 20: mod_base = OTHER; note = 2'-O-methylguanosine-3'-phosphate
  modified_base 21: mod_base = OTHER; note = 2'-O-methyluridine-3'-phosphorothioate
  modified_base 22: mod_base = OTHER; note = 2'-O-methyluridine-3'-phosphorothioate
  modified_base 23: mod_base = OTHER; note = 2'-O-methyluridine-3'-phosphate
ttaaatcagatctttcagagttt

SEQ ID NO: 1630 - RNA, 23 nt, synthetic construct
  source 1..23: mol_type = other RNA
  modified_base 1: mod_base = OTHER; note = Vinyl-phosphonate 2'-O-methyluridine-3'-phosphorothioate
  modified_base 2: mod_base = OTHER; note = 2'-fluorouridine -3'-phosphorothioate
  modified_base 3: mod_base = OTHER; note = 2'-O-methylcytidine-3'-phosphate
  modified_base 4: mod_base = OTHER; note = 2'-O-methyladenosine-3'-phosphate
  modified_base 5: mod_base = OTHER; note = 2'-O-methyluridine-3'-phosphate
  modified_base 6: mod_base = OTHER; note = 2'-fluorouridine-3'-phosphate
  modified_base 7: mod_base = OTHER; note = 2'-O-methylguanosine-3'-phosphate
  modified_base 8: mod_base = OTHER; note = 2'-fluorocytidine-3'-phosphate
  modified_base 9: mod_base = OTHER; note = 2'-fluoroguanosine-3'-phosphate
  modified_base 10: mod_base = OTHER; note = 2'-O-methylguanosine-3'-phosphate
  modified_base 11: mod_base = OTHER; note = 2'-O-methyladenosine-3'-phosphate
  modified_base 12: mod_base = OTHER; note = 2'-O-methyladenosine-3'-phosphate
  modified_base 13: mod_base = OTHER; note = 2'-O-methyladenosine-3'-phosphate
  modified_base 14: mod_base = OTHER; note = 2'-fluoroadenosine-3'-phosphate
  modified_base 15: mod_base = OTHER; note = 2'-O-methylguanosine-3'-phosphate
  modified_base 16: mod_base = OTHER; note = 2'-fluoroadenosine-3'-phosphate
  modified_base 17: mod_base = OTHER; note = 2'-O-methyladenosine-3'-phosphate
  modified_base 18: mod_base = OTHER; note = 2'-O-methylcytidine-3'-phosphate
  modified_base 19: mod_base = OTHER; note = 2'-O-methyluridine-3'-phosphate
  modified_base 20: mod_base = OTHER; note = 2'-O-methyladenosine-3'-phosphate
  modified_base 21: mod_base = OTHER; note = 2'-O-methylguanosine-3'-phosphorothioate
  modified_base 22: mod_base = OTHER; note = 2'-O-methyladenosine-3'-phosphorothioate
  modified_base 23: mod_base = OTHER; note = 2'-O-methyladenosine-3'-phosphate
ttcattgcggaaaagaactagaa

SEQ ID NO: 1631 - RNA, 23 nt, synthetic construct
  source 1..23: mol_type = other RNA
  modified_base 1: mod_base = OTHER; note = Vinyl-phosphonate 2'-O-methyluridine-3'-phosphorothioate
  modified_base 2: mod_base = OTHER; note = 2'-fluoroguanosine-3'-phosphorothioate
  modified_base 3: mod_base = OTHER; note = 2'-O-methylguanosine-3'-phosphate
  modified_base 4: mod_base = OTHER; note = 2'-O-methyladenosine-3'-phosphate
  modified_base 5: mod_base = OTHER; note = 2'-O-methyluridine-3'-phosphate
  modified_base 6: mod_base = OTHER; note = 2'-fluorouridine-3'-phosphate
  modified_base 7: mod_base = OTHER; note = 2'-O-methyluridine-3'-phosphate
  modified_base 8: mod_base = OTHER; note = 2'-fluorocytidine-3'-phosphate
  modified_base 9: mod_base = OTHER; note = 2'-fluorouridine-3'-phosphate
  modified_base 10: mod_base = OTHER; note = 2'-O-methyluridine-3'-phosphate
  modified_base 11: mod_base = OTHER; note = 2'-O-methylcytidine-3'-phosphate
  modified_base 12: mod_base = OTHER; note = 2'-O-methyladenosine-3'-phosphate
  modified_base 13: mod_base = OTHER; note = 2'-O-methylguanosine-3'-phosphate
  modified_base 14: mod_base = OTHER; note = 2'-fluoroadenosine-3'-phosphate
  modified_base 15: mod_base = OTHER; note = 2'-O-methylguanosine-3'-phosphate
  modified_base 16: mod_base = OTHER; note = 2'-fluorouridine-3'-phosphate
  modified_base 17: mod_base = OTHER; note = 2'-O-methylguanosine-3'-phosphate
  modified_base 18: mod_base = OTHER; note = 2'-O-methyladenosine-3'-phosphate
  modified_base 19: mod_base = OTHER; note = 2'-O-methyladenosine-3'-phosphate
  modified_base 20: mod_base = OTHER; note = 2'-O-methyladenosine-3'-phosphate
  modified_base 21: mod_base = OTHER; note = 2'-O-methylguanosine-3'-phosphorothioate
  modified_base 22: mod_base = OTHER; note = 2'-O-methyluridine-3'-phosphorothioate
  modified_base 23: mod_base = OTHER; note = 2'-O-methyluridine-3'-phosphate
tggatttcttcagagtgaaagtt

SEQ ID NO: 1632 - RNA, 23 nt, synthetic construct
  source 1..23: mol_type = other RNA
  modified_base 1: mod_base = OTHER; note = Vinyl-phosphonate 2'-O-methyluridine-3'-phosphorothioate
  modified_base 2: mod_base = OTHER; note = 2'-fluoroadenosine-3'-phosphorothioate
  modified_base 3: mod_base = OTHER; note = 2'-O-methylguanosine-3'-phosphate
  modified_base 4: mod_base = OTHER; note = 2'-O-methyladenosine-3'-phosphate
  modified_base 5: mod_base = OTHER; note = 2'-O-methyladenosine-3'-phosphate
  modified_base 6: mod_base = OTHER; note = 2'-fluoroadenosine-3'-phosphate
  modified_base 7: mod_base = OTHER; note = 2'-O-methylguanosine-3'-phosphate
  modified_base 8: mod_base = OTHER; note = 2'-fluoroadenosine-3'-phosphate
  modified_base 9: mod_base = OTHER; note = 2'-fluoroguanosine-3'-phosphate
  modified_base 10: mod_base = OTHER; note = 2'-O-methyladenosine-3'-phosphate
  modified_base 11: mod_base = OTHER; note = 2'-O-methylguanosine-3'-phosphate
  modified_base 12: mod_base = OTHER; note = 2'-O-methyladenosine-3'-phosphate
  modified_base 13: mod_base = OTHER; note = 2'-O-methyladenosine-3'-phosphate
  modified_base 14: mod_base = OTHER; note = 2'-fluoroadenosine-3'-phosphate
  modified_base 15: mod_base = OTHER; note = 2'-O-methyladenosine-3'-phosphate
  modified_base 16: mod_base = OTHER; note = 2'-fluoroguanosine-3'-phosphate
  modified_base 17: mod_base = OTHER; note = 2'-O-methyluridine-3'-phosphate
  modified_base 18: mod_base = OTHER; note = 2'-O-methyluridine-3'-phosphate
  modified_base 19: mod_base = OTHER; note = 2'-O-methyladenosine-3'-phosphate
  modified_base 20: mod_base = OTHER; note = 2'-O-methylguanosine-3'-phosphate
  modified_base 21: mod_base = OTHER; note = 2'-O-methyladenosine-3'-phosphorothioate
  modified_base 22: mod_base = OTHER; note = 2'-O-methyluridine-3'-phosphorothioate
  modified_base 23: mod_base = OTHER; note = 2'-O-methyladenosine-3'-phosphate
tagaaagagagaaaagttagata

SEQ ID NO: 1633 - RNA, 23 nt, synthetic construct
  source 1..23: mol_type = other RNA
  modified_base 1: mod_base = OTHER; note = Vinyl-phosphonate 2'-O-methyluridine-3'-phosphorothioate
  modified_base 2: mod_base = OTHER; note = 2'-fluorouridine -3'-phosphorothioate
  modified_base 3: mod_base = OTHER; note = 2'-O-methylcytidine-3'-phosphate
  modified_base 4: mod_base = OTHER; note = 2'-O-methyluridine-3'-phosphate
  modified_base 5: mod_base = OTHER; note = 2'-O-methyluridine-3'-phosphate
  modified_base 6: mod_base = OTHER; note = 2'-fluorouridine-3'-phosphate
  modified_base 7: mod_base = OTHER; note = 2'-O-methylguanosine-3'-phosphate
  modified_base 8: mod_base = OTHER; note = 2'-fluoroadenosine-3'-phosphate
  modified_base 9: mod_base = OTHER; note = 2'-fluorocytidine-3'-phosphate
  modified_base 10: mod_base = OTHER; note = 2'-O-methyladenosine-3'-phosphate
  modified_base 11: mod_base = OTHER; note = 2'-O-methylcytidine-3'-phosphate
  modified_base 12: mod_base = OTHER; note = 2'-O-methyladenosine-3'-phosphate
  modified_base 13: mod_base = OTHER; note = 2'-O-methyladenosine-3'-phosphate
  modified_base 14: mod_base = OTHER; note = 2'-fluoroadenosine-3'-phosphate
  modified_base 15: mod_base = OTHER; note = 2'-O-methylguanosine-3'-phosphate
  modified_base 16: mod_base = OTHER; note = 2'-fluorouridine-3'-phosphate
  modified_base 17: mod_base = OTHER; note = 2'-O-methyluridine-3'-phosphate
  modified_base 18: mod_base = OTHER; note = 2'-O-methylguanosine-3'-phosphate
  modified_base 19: mod_base = OTHER; note = 2'-O-methyladenosine-3'-phosphate
  modified_base 20: mod_base = OTHER; note = 2'-O-methylguanosine-3'-phosphate
  modified_base 21: mod_base = OTHER; note = 2'-O-methyladenosine-3'-phosphorothioate
  modified_base 22: mod_base = OTHER; note = 2'-O-methyluridine-3'-phosphorothioate
  modified_base 23: mod_base = OTHER; note = 2'-O-methyladenosine-3'-phosphate
ttctttgacacaaagttgagata

SEQ ID NO: 1634 - RNA, 23 nt, synthetic construct
  source 1..23: mol_type = other RNA
  modified_base 1: mod_base = OTHER; note = Vinyl-phosphonate 2'-O-methyluridine-3'-phosphorothioate
  modified_base 2: mod_base = OTHER; note = 2'-fluorouridine -3'-phosphorothioate
  modified_base 3: mod_base = OTHER; note = 2'-O-methyladenosine-3'-phosphate
  modified_base 4: mod_base = OTHER; note = 2'-O-methyladenosine-3'-phosphate
  modified_base 5: mod_base = OTHER; note = 2'-O-methyladenosine-3'-phosphate
  modified_base 6: mod_base = OTHER; note = 2'-fluoroguanosine-3'-phosphate
  modified_base 7: mod_base = OTHER; note = 2'-O-methylguanosine-3'-phosphate
  modified_base 8: mod_base = OTHER; note = 2'-fluoroadenosine-3'-phosphate
  modified_base 9: mod_base = OTHER; note = 2'-fluoroadenosine-3'-phosphate
  modified_base 10: mod_base = OTHER; note = 2'-O-methyluridine-3'-phosphate
  modified_base 11: mod_base = OTHER; note = 2'-O-methylguanosine-3'-phosphate
  modified_base 12: mod_base = OTHER; note = 2'-O-methyladenosine-3'-phosphate
  modified_base 13: mod_base = OTHER; note = 2'-O-methyluridine-3'-phosphate
  modified_base 14: mod_base = OTHER; note = 2'-fluorouridine-3'-phosphate
  modified_base 15: mod_base = OTHER; note = 2'-O-methyladenosine-3'-phosphate
  modified_base 16: mod_base = OTHER; note = 2'-fluorouridine-3'-phosphate
  modified_base 17: mod_base = OTHER; note = 2'-O-methyluridine-3'-phosphate
  modified_base 18: mod_base = OTHER; note = 2'-O-methylguanosine-3'-phosphate
  modified_base 19: mod_base = OTHER; note = 2'-O-methyladenosine-3'-phosphate
  modified_base 20: mod_base = OTHER; note = 2'-O-methyladenosine-3'-phosphate
  modified_base 21: mod_base = OTHER; note = 2'-O-methylguanosine-3'-phosphorothioate
  modified_base 22: mod_base = OTHER; note = 2'-O-methyladenosine-3'-phosphorothioate
  modified_base 23: mod_base = OTHER; note = 2'-O-methylcytidine-3'-phosphate
ttaaaggaatgattattgaagac

SEQ ID NO: 1635 - RNA, 23 nt, synthetic construct
  source 1..23: mol_type = other RNA
  modified_base 1: mod_base = OTHER; note = Vinyl-phosphonate 2'-O-methyluridine-3'-phosphorothioate
  modified_base 2: mod_base = OTHER; note = 2'-fluorocytidine-3'-phosphorothioate
  modified_base 3: mod_base = OTHER; note = 2'-O-methyluridine-3'-phosphate
  modified_base 4: mod_base = OTHER; note = 2'-O-methyluridine-3'-phosphate
  modified_base 5: mod_base = OTHER; note = 2'-O-methyladenosine-3'-phosphate
  modified_base 6: mod_base = OTHER; note = 2'-fluoroadenosine-3'-phosphate
  modified_base 7: mod_base = OTHER; note = 2'-O-methyluridine-3'-phosphate
  modified_base 8: mod_base = OTHER; note = 2'-fluoroadenosine-3'-phosphate
  modified_base 9: mod_base = OTHER; note = 2'-fluorocytidine-3'-phosphate
  modified_base 10: mod_base = OTHER; note = 2'-O-methylguanosine-3'-phosphate
  modified_base 11: mod_base = OTHER; note = 2'-O-methyladenosine-3'-phosphate
  modified_base 12: mod_base = OTHER; note = 2'-O-methyladenosine-3'-phosphate
  modified_base 13: mod_base = OTHER; note = 2'-O-methylguanosine-3'-phosphate
  modified_base 14: mod_base = OTHER; note = 2'-fluoroadenosine-3'-phosphate
  modified_base 15: mod_base = OTHER; note = 2'-O-methylguanosine-3'-phosphate
  modified_base 16: mod_base = OTHER; note = 2'-fluorocytidine-3'-phosphate
  modified_base 17: mod_base = OTHER; note = 2'-O-methyladenosine-3'-phosphate
  modified_base 18: mod_base = OTHER; note = 2'-O-methylguanosine-3'-phosphate
  modified_base 19: mod_base = OTHER; note = 2'-O-methyluridine-3'-phosphate
  modified_base 20: mod_base = OTHER; note = 2'-O-methyluridine-3'-phosphate
  modified_base 21: mod_base = OTHER; note = 2'-O-methyladenosine-3'-phosphorothioate
  modified_base 22: mod_base = OTHER; note = 2'-O-methylguanosine-3'-phosphorothioate
  modified_base 23: mod_base = OTHER; note = 2'-O-methylguanosine-3'-phosphate
tcttaatacgaagagcagttagg

SEQ ID NO: 1636 - RNA, 23 nt, synthetic construct
  source 1..23: mol_type = other RNA
  modified_base 1: mod_base = OTHER; note = Vinyl-phosphonate 2'-O-methyluridine-3'-phosphorothioate
  modified_base 2: mod_base = OTHER; note = 2'-fluoroguanosine-3'-phosphorothioate
  modified_base 3: mod_base = OTHER; note = 2'-O-methyluridine-3'-phosphate
  modified_base 4: mod_base = OTHER; note = 2'-O-methyluridine-3'-phosphate
  modified_base 5: mod_base = OTHER; note = 2'-O-methylguanosine-3'-phosphate
  modified_base 6: mod_base = OTHER; note = 2'-fluoroguanosine-3'-phosphate
  modified_base 7: mod_base = OTHER; note = 2'-O-methyladenosine-3'-phosphate
  modified_base 8: mod_base = OTHER; note = 2'-fluoroadenosine-3'-phosphate
  modified_base 9: mod_base = OTHER; note = 2'-fluorocytidine-3'-phosphate
  modified_base 10: mod_base = OTHER; note = 2'-O-methyluridine-3'-phosphate
  modified_base 11: mod_base = OTHER; note = 2'-O-methyladenosine-3'-phosphate
  modified_base 12: mod_base = OTHER; note = 2'-O-methyluridine-3'-phosphate
  modified_base 13: mod_base = OTHER; note = 2'-O-methylguanosine-3'-phosphate
  modified_base 14: mod_base = OTHER; note = 2'-fluoroadenosine-3'-phosphate
  modified_base 15: mod_base = OTHER; note = 2'-O-methylcytidine-3'-phosphate
  modified_base 16: mod_base = OTHER; note = 2'-fluoroadenosine-3'-phosphate
  modified_base 17: mod_base = OTHER; note = 2'-O-methylguanosine-3'-phosphate
  modified_base 18: mod_base = OTHER; note = 2'-O-methyladenosine-3'-phosphate
  modified_base 19: mod_base = OTHER; note = 2'-O-methyladenosine-3'-phosphate
  modified_base 20: mod_base = OTHER; note = 2'-O-methylguanosine-3'-phosphate
  modified_base 21: mod_base = OTHER; note = 2'-O-methyladenosine-3'-phosphorothioate
  modified_base 22: mod_base = OTHER; note = 2'-O-methylcytidine-3'-phosphorothioate
  modified_base 23: mod_base = OTHER; note = 2'-O-methyluridine-3'-phosphate
tgttggaactatgacagaagact

SEQ ID NO: 1637 - RNA, 23 nt, synthetic construct
  source 1..23: mol_type = other RNA
  modified_base 1: mod_base = OTHER; note = Vinyl-phosphonate 2'-O-methyluridine-3'-phosphorothioate
  modified_base 2: mod_base = OTHER; note = 2'-fluoroadenosine-3'-phosphorothioate
  modified_base 3: mod_base = OTHER; note = 2'-O-methyladenosine-3'-phosphate
  modified_base 4: mod_base = OTHER; note = 2'-O-methylcytidine-3'-phosphate
  modified_base 5: mod_base = OTHER; note = 2'-O-methyladenosine-3'-phosphate
  modified_base 6: mod_base = OTHER; note = 2'-fluoroguanosine-3'-phosphate
  modified_base 7: mod_base = OTHER; note = 2'-O-methyladenosine-3'-phosphate
  modified_base 8: mod_base = OTHER; note = 2'-fluorouridine-3'-phosphate
  modified_base 9: mod_base = OTHER; note = 2'-fluoroadenosine-3'-phosphate
  modified_base 10: mod_base = OTHER; note = 2'-O-methyluridine-3'-phosphate
  modified_base 11: mod_base = OTHER; note = 2'-O-methylguanosine-3'-phosphate
  modified_base 12: mod_base = OTHER; note = 2'-O-methylguanosine-3'-phosphate
  modified_base 13: mod_base = OTHER; note = 2'-O-methyluridine-3'-phosphate
  modified_base 14: mod_base = OTHER; note = 2'-fluorouridine-3'-phosphate
  modified_base 15: mod_base = OTHER; note = 2'-O-methylcytidine-3'-phosphate
  modified_base 16: mod_base = OTHER; note = 2'-fluorouridine-3'-phosphate
  modified_base 17: mod_base = OTHER; note = 2'-O-methylguanosine-3'-phosphate
  modified_base 18: mod_base = OTHER; note = 2'-O-methyladenosine-3'-phosphate
  modified_base 19: mod_base = OTHER; note = 2'-O-methylguanosine-3'-phosphate
  modified_base 20: mod_base = OTHER; note = 2'-O-methyladenosine-3'-phosphate
  modified_base 21: mod_base = OTHER; note = 2'-O-methyluridine-3'-phosphorothioate
  modified_base 22: mod_base = OTHER; note = 2'-O-methyluridine-3'-phosphorothioate
  modified_base 23: mod_base = OTHER; note = 2'-O-methyluridine-3'-phosphate
taacagatatggttctgagattt

SEQ ID NO: 1638 - RNA, 23 nt, synthetic construct
  source 1..23: mol_type = other RNA
  modified_base 1: mod_base = OTHER; note = Vinyl-phosphonate 2'-O-methyluridine-3'-phosphorothioate
  modified_base 2: mod_base = OTHER; note = 2'-fluoroguanosine-3'-phosphorothioate
  modified_base 3: mod_base = OTHER; note = 2'-O-methyluridine-3'-phosphate
  modified_base 4: mod_base = OTHER; note = 2'-O-methyladenosine-3'-phosphate
  modified_base 5: mod_base = OTHER; note = 2'-O-methyladenosine-3'-phosphate
  modified_base 6: mod_base = OTHER; note = 2'-fluoroadenosine-3'-phosphate
  modified_base 7: mod_base = OTHER; note = 2'-O-methyladenosine-3'-phosphate
  modified_base 8: mod_base = OTHER; note = 2'-fluorouridine-3'-phosphate
  modified_base 9: mod_base = OTHER; note = 2'-fluoroguanosine-3'-phosphate
  modified_base 10: mod_base = OTHER; note = 2'-O-methyladenosine-3'-phosphate
  modified_base 11: mod_base = OTHER; note = 2'-O-methyladenosine-3'-phosphate
  modified_base 12: mod_base = OTHER; note = 2'-O-methylguanosine-3'-phosphate
  modified_base 13: mod_base = OTHER; note = 2'-O-methyladenosine-3'-phosphate
  modified_base 14: mod_base = OTHER; note = 2'-fluorouridine-3'-phosphate
  modified_base 15: mod_base = OTHER; note = 2'-O-methyladenosine-3'-phosphate
  modified_base 16: mod_base = OTHER; note = 2'-fluoroguanosine-3'-phosphate
  modified_base 17: mod_base = OTHER; note = 2'-O-methyladenosine-3'-phosphate
  modified_base 18: mod_base = OTHER; note = 2'-O-methyluridine-3'-phosphate
  modified_base 19: mod_base = OTHER; note = 2'-O-methyluridine-3'-phosphate
  modified_base 20: mod_base = OTHER; note = 2'-O-methylcytidine-3'-phosphate
  modified_base 21: mod_base = OTHER; note = 2'-O-methyladenosine-3'-phosphorothioate
  modified_base 22: mod_base = OTHER; note = 2'-O-methylguanosine-3'-phosphorothioate
  modified_base 23: mod_base = OTHER; note = 2'-O-methyluridine-3'-phosphate
tgtaaaatgaagatagattcagt

SEQ ID NO: 1639 - RNA, 23 nt, synthetic construct
  source 1..23: mol_type = other RNA
  modified_base 1: mod_base = OTHER; note = Vinyl-phosphonate 2'-O-methyluridine-3'-phosphorothioate
  modified_base 2: mod_base = OTHER; note = 2'-fluoroadenosine-3'-phosphorothioate
  modified_base 3: mod_base = OTHER; note = 2'-O-methyladenosine-3'-phosphate
  modified_base 4: mod_base = OTHER; note = 2'-O-methyladenosine-3'-phosphate
  modified_base 5: mod_base = OTHER; note = 2'-O-methylguanosine-3'-phosphate
  modified_base 6: mod_base = OTHER; note = 2'-fluoroguanosine-3'-phosphate
  modified_base 7: mod_base = OTHER; note = 2'-O-methyladenosine-3'-phosphate
  modified_base 8: mod_base = OTHER; note = 2'-fluoroadenosine-3'-phosphate
  modified_base 9: mod_base = OTHER; note = 2'-fluorocytidine-3'-phosphate
  modified_base 10: mod_base = OTHER; note = 2'-O-methyladenosine-3'-phosphate
  modified_base 11: mod_base = OTHER; note = 2'-O-methyladenosine-3'-phosphate
  modified_base 12: mod_base = OTHER; note = 2'-O-methylguanosine-3'-phosphate
  modified_base 13: mod_base = OTHER; note = 2'-O-methyluridine-3'-phosphate
  modified_base 14: mod_base = OTHER; note = 2'-fluorouridine-3'-phosphate
  modified_base 15: mod_base = OTHER; note = 2'-O-methyluridine-3'-phosphate
  modified_base 16: mod_base = OTHER; note = 2'-fluoroadenosine-3'-phosphate
  modified_base 17: mod_base = OTHER; note = 2'-O-methylguanosine-3'-phosphate
  modified_base 18: mod_base = OTHER; note = 2'-O-methyluridine-3'-phosphate
  modified_base 19: mod_base = OTHER; note = 2'-O-methylguanosine-3'-phosphate
  modified_base 20: mod_base = OTHER; note = 2'-O-methylguanosine-3'-phosphate
  modified_base 21: mod_base = OTHER; note = 2'-O-methyluridine-3'-phosphorothioate
  modified_base 22: mod_base = OTHER; note = 2'-O-methyluridine-3'-phosphorothioate
  modified_base 23: mod_base = OTHER; note = 2'-O-methylcytidine-3'-phosphate
taaaggaacaagtttagtggttc

SEQ ID NO: 1640 - RNA, 23 nt, synthetic construct
  source 1..23: mol_type = other RNA
  modified_base 1: mod_base = OTHER; note = Vinyl-phosphonate 2'-O-methyluridine-3'-phosphorothioate
  modified_base 2: mod_base = OTHER; note = 2'-fluorouridine -3'-phosphorothioate
  modified_base 3: mod_base = OTHER; note = 2'-O-methylguanosine-3'-phosphate
  modified_base 4: mod_base = OTHER; note = 2'-O-methyluridine-3'-phosphate
  modified_base 5: mod_base = OTHER; note = 2'-O-methyladenosine-3'-phosphate
  modified_base 6: mod_base = OTHER; note = 2'-fluoroadenosine-3'-phosphate
  modified_base 7: mod_base = OTHER; note = 2'-O-methylguanosine-3'-phosphate
  modified_base 8: mod_base = OTHER; note = 2'-fluoroguanosine-3'-phosphate
  modified_base 9: mod_base = OTHER; note = 2'-fluoroadenosine-3'-phosphate
  modified_base 10: mod_base = OTHER; note = 2'-O-methylguanosine-3'-phosphate
  modified_base 11: mod_base = OTHER; note = 2'-O-methyluridine-3'-phosphate
  modified_base 12: mod_base = OTHER; note = 2'-O-methyladenosine-3'-phosphate
  modified_base 13: mod_base = OTHER; note = 2'-O-methyladenosine-3'-phosphate
  modified_base 14: mod_base = OTHER; note = 2'-fluoroadenosine-3'-phosphate
  modified_base 15: mod_base = OTHER; note = 2'-O-methylguanosine-3'-phosphate
  modified_base 16: mod_base = OTHER; note = 2'-fluoroadenosine-3'-phosphate
  modified_base 17: mod_base = OTHER; note = 2'-O-methyladenosine-3'-phosphate
  modified_base 18: mod_base = OTHER; note = 2'-O-methylcytidine-3'-phosphate
  modified_base 19: mod_base = OTHER; note = 2'-O-methyladenosine-3'-phosphate
  modified_base 20: mod_base = OTHER; note = 2'-O-methylcytidine-3'-phosphate
  modified_base 21: mod_base = OTHER; note = 2'-O-methyluridine-3'-phosphorothioate
  modified_base 22: mod_base = OTHER; note = 2'-O-methylguanosine-3'-phosphorothioate
  modified_base 23: mod_base = OTHER; note = 2'-O-methyladenosine-3'-phosphate
ttgtaaggagtaaagaacactga

SEQ ID NO: 1641 - RNA, 23 nt, synthetic construct
  source 1..23: mol_type = other RNA
  modified_base 1: mod_base = OTHER; note = Vinyl-phosphonate 2'-O-methyluridine-3'-phosphorothioate
  modified_base 2: mod_base = OTHER; note = 2'-fluorouridine -3'-phosphorothioate
  modified_base 3: mod_base = OTHER; note = 2'-O-methyladenosine-3'-phosphate
  modified_base 4: mod_base = OTHER; note = 2'-O-methyladenosine-3'-phosphate
  modified_base 5: mod_base = OTHER; note = 2'-O-methyluridine-3'-phosphate
  modified_base 6: mod_base = OTHER; note = 2'-fluorocytidine-3'-phosphate
  modified_base 7: mod_base = OTHER; note = 2'-O-methylcytidine-3'-phosphate
  modified_base 8: mod_base = OTHER; note = 2'-fluorouridine-3'-phosphate
  modified_base 9: mod_base = OTHER; note = 2'-fluoroguanosine-3'-phosphate
  modified_base 10: mod_base = OTHER; note = 2'-O-methyluridine-3'-phosphate
  modified_base 11: mod_base = OTHER; note = 2'-O-methyluridine-3'-phosphate
  modified_base 12: mod_base = OTHER; note = 2'-O-methyladenosine-3'-phosphate
  modified_base 13: mod_base = OTHER; note = 2'-O-methyladenosine-3'-phosphate
  modified_base 14: mod_base = OTHER; note = 2'-fluoroguanosine-3'-phosphate
  modified_base 15: mod_base = OTHER; note = 2'-O-methyladenosine-3'-phosphate
  modified_base 16: mod_base = OTHER; note = 2'-fluoroguanosine-3'-phosphate
  modified_base 17: mod_base = OTHER; note = 2'-O-methyluridine-3'-phosphate
  modified_base 18: mod_base = OTHER; note = 2'-O-methyladenosine-3'-phosphate
  modified_base 19: mod_base = OTHER; note = 2'-O-methyladenosine-3'-phosphate
  modified_base 20: mod_base = OTHER; note = 2'-O-methyladenosine-3'-phosphate
  modified_base 21: mod_base = OTHER; note = 2'-O-methylguanosine-3'-phosphorothioate
  modified_base 22: mod_base = OTHER; note = 2'-O-methylguanosine-3'-phosphorothioate
  modified_base 23: mod_base = OTHER; note = 2'-O-methyladenosine-3'-phosphate
ttaatcctgttaagagtaaagga

SEQ ID NO: 1642 - RNA, 23 nt, synthetic construct
  source 1..23: mol_type = other RNA
  modified_base 1: mod_base = OTHER; note = Vinyl-phosphonate 2'-O-methyluridine-3'-phosphorothioate
  modified_base 2: mod_base = OTHER; note = 2'-fluoroguanosine-3'-phosphorothioate
  modified_base 3: mod_base = OTHER; note = 2'-O-methyluridine-3'-phosphate
  modified_base 4: mod_base = OTHER; note = 2'-O-methyladenosine-3'-phosphate
  modified_base 5: mod_base = OTHER; note = 2'-O-methyladenosine-3'-phosphate
  modified_base 6: mod_base = OTHER; note = 2'-fluorouridine-3'-phosphate
  modified_base 7: mod_base = OTHER; note = 2'-O-methyladenosine-3'-phosphate
  modified_base 8: mod_base = OTHER; note = 2'-fluorouridine-3'-phosphate
  modified_base 9: mod_base = OTHER; note = 2'-fluoroguanosine-3'-phosphate
  modified_base 10: mod_base = OTHER; note = 2'-O-methyluridine-3'-phosphate
  modified_base 11: mod_base = OTHER; note = 2'-O-methyluridine-3'-phosphate
  modified_base 12: mod_base = OTHER; note = 2'-O-methylcytidine-3'-phosphate
  modified_base 13: mod_base = OTHER; note = 2'-O-methyluridine-3'-phosphate
  modified_base 14: mod_base = OTHER; note = 2'-fluorouridine-3'-phosphate
  modified_base 15: mod_base = OTHER; note = 2'-O-methyladenosine-3'-phosphate
  modified_base 16: mod_base = OTHER; note = 2'-fluoroguanosine-3'-phosphate
  modified_base 17: mod_base = OTHER; note = 2'-O-methylguanosine-3'-phosphate
  modified_base 18: mod_base = OTHER; note = 2'-O-methyluridine-3'-phosphate
  modified_base 19: mod_base = OTHER; note = 2'-O-methyladenosine-3'-phosphate
  modified_base 20: mod_base = OTHER; note = 2'-O-methyluridine-3'-phosphate
  modified_base 21: mod_base = OTHER; note = 2'-O-methyladenosine-3'-phosphorothioate
  modified_base 22: mod_base = OTHER; note = 2'-O-methyladenosine-3'-phosphorothioate
  modified_base 23: mod_base = OTHER; note = 2'-O-methylguanosine-3'-phosphate
tgtaatatgttcttaggtataag

SEQ ID NO: 1643 - RNA, 23 nt, synthetic construct
  source 1..23: mol_type = other RNA
  modified_base 1: mod_base = OTHER; note = Vinyl-phosphonate 2'-O-methyluridine-3'-phosphorothioate
  modified_base 2: mod_base = OTHER; note = 2'-fluorouridine -3'-phosphorothioate
  modified_base 3: mod_base = OTHER; note = 2'-O-methyluridine-3'-phosphate
  modified_base 4: mod_base = OTHER; note = 2'-O-methylguanosine-3'-phosphate
  modified_base 5: mod_base = OTHER; note = 2'-O-methylguanosine-3'-phosphate
  modified_base 6: mod_base = OTHER; note = 2'-fluoroadenosine-3'-phosphate
  modified_base 7: mod_base = OTHER; note = 2'-O-methyluridine-3'-phosphate
  modified_base 8: mod_base = OTHER; note = 2'-fluorocytidine-3'-phosphate
  modified_base 9: mod_base = OTHER; note = 2'-fluoroadenosine-3'-phosphate
  modified_base 10: mod_base = OTHER; note = 2'-O-methyluridine-3'-phosphate
  modified_base 11: mod_base = OTHER; note = 2'-O-methylcytidine-3'-phosphate
  modified_base 12: mod_base = OTHER; note = 2'-O-methyluridine-3'-phosphate
  modified_base 13: mod_base = OTHER; note = 2'-O-methylcytidine-3'-phosphate
  modified_base 14: mod_base = OTHER; note = 2'-fluoroadenosine-3'-phosphate
  modified_base 15: mod_base = OTHER; note = 2'-O-methylguanosine-3'-phosphate
  modified_base 16: mod_base = OTHER; note = 2'-fluorouridine-3'-phosphate
  modified_base 17: mod_base = OTHER; note = 2'-O-methyladenosine-3'-phosphate
  modified_base 18: mod_base = OTHER; note = 2'-O-methylguanosine-3'-phosphate
  modified_base 19: mod_base = OTHER; note = 2'-O-methyladenosine-3'-phosphate
  modified_base 20: mod_base = OTHER; note = 2'-O-methyladenosine-3'-phosphate
  modified_base 21: mod_base = OTHER; note = 2'-O-methylguanosine-3'-phosphorothioate
  modified_base 22: mod_base = OTHER; note = 2'-O-methyladenosine-3'-phosphorothioate
  modified_base 23: mod_base = OTHER; note = 2'-O-methyladenosine-3'-phosphate
tttggatcatctcagtagaagaa

SEQ ID NO: 1644 - RNA, 23 nt, synthetic construct
  source 1..23: mol_type = other RNA
  modified_base 1: mod_base = OTHER; note = Vinyl-phosphonate 2'-O-methyluridine-3'-phosphorothioate
  modified_base 2: mod_base = OTHER; note = 2'-fluorouridine -3'-phosphorothioate
  modified_base 3: mod_base = OTHER; note = 2'-O-methyladenosine-3'-phosphate
  modified_base 4: mod_base = OTHER; note = 2'-O-methylcytidine-3'-phosphate
  modified_base 5: mod_base = OTHER; note = 2'-O-methyluridine-3'-phosphate
  modified_base 6: mod_base = OTHER; note = 2'-fluorocytidine-3'-phosphate
  modified_base 7: mod_base = OTHER; note = 2'-O-methyluridine-3'-phosphate
  modified_base 8: mod_base = OTHER; note = 2'-fluoroadenosine-3'-phosphate
  modified_base 9: mod_base = OTHER; note = 2'-fluorouridine-3'-phosphate
  modified_base 10: mod_base = OTHER; note = 2'-O-methylguanosine-3'-phosphate
  modified_base 11: mod_base = OTHER; note = 2'-O-methyladenosine-3'-phosphate
  modified_base 12: mod_base = OTHER; note = 2'-O-methylguanosine-3'-phosphate
  modified_base 13: mod_base = OTHER; note = 2'-O-methyladenosine-3'-phosphate
  modified_base 14: mod_base = OTHER; note = 2'-fluoroadenosine-3'-phosphate
  modified_base 15: mod_base = OTHER; note = 2'-O-methyladenosine-3'-phosphate
  modified_base 16: mod_base = OTHER; note = 2'-fluoroadenosine-3'-phosphate
  modified_base 17: mod_base = OTHER; note = 2'-O-methyluridine-3'-phosphate
  modified_base 18: mod_base = OTHER; note = 2'-O-methyladenosine-3'-phosphate
  modified_base 19: mod_base = OTHER; note = 2'-O-methylcytidine-3'-phosphate
  modified_base 20: mod_base = OTHER; note = 2'-O-methyladenosine-3'-phosphate
  modified_base 21: mod_base = OTHER; note = 2'-O-methylguanosine-3'-phosphorothioate
  modified_base 22: mod_base = OTHER; note = 2'-O-methyladenosine-3'-phosphorothioate
  modified_base 23: mod_base = OTHER; note = 2'-O-methyladenosine-3'-phosphate
ttactctatgagaaaatacagaa

SEQ ID NO: 1645 - RNA, 23 nt, synthetic construct
  source 1..23: mol_type = other RNA
  modified_base 1: mod_base = OTHER; note = Vinyl-phosphonate 2'-O-methyluridine-3'-phosphorothioate
  modified_base 2: mod_base = OTHER; note = 2'-fluorouridine -3'-phosphorothioate
  modified_base 3: mod_base = OTHER; note = 2'-O-methyladenosine-3'-phosphate
  modified_base 4: mod_base = OTHER; note = 2'-O-methylcytidine-3'-phosphate
  modified_base 5: mod_base = OTHER; note = 2'-O-methyladenosine-3'-phosphate
  modified_base 6: mod_base = OTHER; note = 2'-fluoroadenosine-3'-phosphate
  modified_base 7: mod_base = OTHER; note = 2'-O-methylcytidine-3'-phosphate
  modified_base 8: mod_base = OTHER; note = 2'-fluorouridine-3'-phosphate
  modified_base 9: mod_base = OTHER; note = 2'-fluoroguanosine-3'-phosphate
  modified_base 10: mod_base = OTHER; note = 2'-O-methyladenosine-3'-phosphate
  modified_base 11: mod_base = OTHER; note = 2'-O-methyladenosine-3'-phosphate
  modified_base 12: mod_base = OTHER; note = 2'-O-methyladenosine-3'-phosphate
  modified_base 13: mod_base = OTHER; note = 2'-O-methylguanosine-3'-phosphate
  modified_base 14: mod_base = OTHER; note = 2'-fluoroadenosine-3'-phosphate
  modified_base 15: mod_base = OTHER; note = 2'-O-methylguanosine-3'-phosphate
  modified_base 16: mod_base = OTHER; note = 2'-fluoroadenosine-3'-phosphate
  modified_base 17: mod_base = OTHER; note = 2'-O-methyladenosine-3'-phosphate
  modified_base 18: mod_base = OTHER; note = 2'-O-methyladenosine-3'-phosphate
  modified_base 19: mod_base = OTHER; note = 2'-O-methyladenosine-3'-phosphate
  modified_base 20: mod_base = OTHER; note = 2'-O-methylguanosine-3'-phosphate
  modified_base 21: mod_base = OTHER; note = 2'-O-methyluridine-3'-phosphorothioate
  modified_base 22: mod_base = OTHER; note = 2'-O-methyladenosine-3'-phosphorothioate
  modified_base 23: mod_base = OTHER; note = 2'-O-methyluridine-3'-phosphate
ttacaactgaaagagaaaagtat

SEQ ID NO: 1646 - RNA, 23 nt, synthetic construct
  source 1..23: mol_type = other RNA
  modified_base 1: mod_base = OTHER; note = Vinyl-phosphonate 2'-O-methyluridine-3'-phosphorothioate
  modified_base 2: mod_base = OTHER; note = 2'-fluorouridine -3'-phosphorothioate
  modified_base 3: mod_base = OTHER; note = 2'-O-methyluridine-3'-phosphate
  modified_base 4: mod_base = OTHER; note = 2'-O-methylcytidine-3'-phosphate
  modified_base 5: mod_base = OTHER; note = 2'-O-methyladenosine-3'-phosphate
  modified_base 6: mod_base = OTHER; note = 2'-fluorocytidine-3'-phosphate
  modified_base 7: mod_base = OTHER; note = 2'-O-methyladenosine-3'-phosphate
  modified_base 8: mod_base = OTHER; note = 2'-fluoroguanosine-3'-phosphate
  modified_base 9: mod_base = OTHER; note = 2'-fluoroadenosine-3'-phosphate
  modified_base 10: mod_base = OTHER; note = 2'-O-methylcytidine-3'-phosphate
  modified_base 11: mod_base = OTHER; note = 2'-O-methyluridine-3'-phosphate
  modified_base 12: mod_base = OTHER; note = 2'-O-methyladenosine-3'-phosphate
  modified_base 13: mod_base = OTHER; note = 2'-O-methylguanosine-3'-phosphate
  modified_base 14: mod_base = OTHER; note = 2'-fluoroadenosine-3'-phosphate
  modified_base 15: mod_base = OTHER; note = 2'-O-methyladenosine-3'-phosphate
  modified_base 16: mod_base = OTHER; note = 2'-fluoroadenosine-3'-phosphate
  modified_base 17: mod_base = OTHER; note = 2'-O-methyluridine-3'-phosphate
  modified_base 18: mod_base = OTHER; note = 2'-O-methyluridine-3'-phosphate
  modified_base 19: mod_base = OTHER; note = 2'-O-methyladenosine-3'-phosphate
  modified_base 20: mod_base = OTHER; note = 2'-O-methyladenosine-3'-phosphate
  modified_base 21: mod_base = OTHER; note = 2'-O-methyluridine-3'-phosphorothioate
  modified_base 22: mod_base = OTHER; note = 2'-O-methylguanosine-3'-phosphorothioate
  modified_base 23: mod_base = OTHER; note = 2'-O-methyladenosine-3'-phosphate
tttcacagactagaaattaatga

SEQ ID NO: 1647 - RNA, 23 nt, synthetic construct
  source 1..23: mol_type = other RNA
  modified_base 1: mod_base = OTHER; note = Vinyl-phosphonate 2'-O-methyluridine-3'-phosphorothioate
  modified_base 2: mod_base = OTHER; note = 2'-fluoroguanosine-3'-phosphorothioate
  modified_base 3: mod_base = OTHER; note = 2'-O-methyluridine-3'-phosphate
  modified_base 4: mod_base = OTHER; note = 2'-O-methylguanosine-3'-phosphate
  modified_base 5: mod_base = OTHER; note = 2'-O-methyladenosine-3'-phosphate
  modified_base 6: mod_base = OTHER; note = 2'-fluoroadenosine-3'-phosphate
  modified_base 7: mod_base = OTHER; note = 2'-O-methyladenosine-3'-phosphate
  modified_base 8: mod_base = OTHER; note = 2'-fluorocytidine-3'-phosphate
  modified_base 9: mod_base = OTHER; note = 2'-fluorocytidine-3'-phosphate
  modified_base 10: mod_base = OTHER; note = 2'-O-methyluridine-3'-phosphate
  modified_base 11: mod_base = OTHER; note = 2'-O-methylcytidine-3'-phosphate
  modified_base 12: mod_base = OTHER; note = 2'-O-methyluridine-3'-phosphate
  modified_base 13: mod_base = OTHER; note = 2'-O-methyluridine-3'-phosphate
  modified_base 14: mod_base = OTHER; note = 2'-fluoroadenosine-3'-phosphate
  modified_base 15: mod_base = OTHER; note = 2'-O-methyluridine-3'-phosphate
  modified_base 16: mod_base = OTHER; note = 2'-fluoroadenosine-3'-phosphate
  modified_base 17: mod_base = OTHER; note = 2'-O-methylcytidine-3'-phosphate
  modified_base 18: mod_base = OTHER; note = 2'-O-methyladenosine-3'-phosphate
  modified_base 19: mod_base = OTHER; note = 2'-O-methylguanosine-3'-phosphate
  modified_base 20: mod_base = OTHER; note = 2'-O-methyladenosine-3'-phosphate
  modified_base 21: mod_base = OTHER; note = 2'-O-methylguanosine-3'-phosphorothioate
  modified_base 22: mod_base = OTHER; note = 2'-O-methyladenosine-3'-phosphorothioate
  modified_base 23: mod_base = OTHER; note = 2'-O-methyladenosine-3'-phosphate
tgtgaaacctcttatacagagaa

SEQ ID NO: 1648 - RNA, 23 nt, synthetic construct
  source 1..23: mol_type = other RNA
  modified_base 1: mod_base = OTHER; note = Vinyl-phosphonate 2'-O-methyluridine-3'-phosphorothioate
  modified_base 2: mod_base = OTHER; note = 2'-fluoroguanosine-3'-phosphorothioate
  modified_base 3: mod_base = OTHER; note = 2'-O-methyluridine-3'-phosphate
  modified_base 4: mod_base = OTHER; note = 2'-O-methyladenosine-3'-phosphate
  modified_base 5: mod_base = OTHER; note = 2'-O-methyluridine-3'-phosphate
  modified_base 6: mod_base = OTHER; note = 2'-fluorouridine-3'-phosphate
  modified_base 7: mod_base = OTHER; note = 2'-O-methyladenosine-3'-phosphate
  modified_base 8: mod_base = OTHER; note = 2'-fluoroguanosine-3'-phosphate
  modified_base 9: mod_base = OTHER; note = 2'-fluorouridine-3'-phosphate
  modified_base 10: mod_base = OTHER; note = 2'-O-methyladenosine-3'-phosphate
  modified_base 11: mod_base = OTHER; note = 2'-O-methylcytidine-3'-phosphate
  modified_base 12: mod_base = OTHER; note = 2'-O-methyluridine-3'-phosphate
  modified_base 13: mod_base = OTHER; note = 2'-O-methyluridine-3'-phosphate
  modified_base 14: mod_base = OTHER; note = 2'-fluorouridine-3'-phosphate
  modified_base 15: mod_base = OTHER; note = 2'-O-methylguanosine-3'-phosphate
  modified_base 16: mod_base = OTHER; note = 2'-fluoroadenosine-3'-phosphate
  modified_base 17: mod_base = OTHER; note = 2'-O-methyladenosine-3'-phosphate
  modified_base 18: mod_base = OTHER; note = 2'-O-methyladenosine-3'-phosphate
  modified_base 19: mod_base = OTHER; note = 2'-O-methylguanosine-3'-phosphate
  modified_base 20: mod_base = OTHER; note = 2'-O-methyluridine-3'-phosphate
  modified_base 21: mod_base = OTHER; note = 2'-O-methylcytidine-3'-phosphorothioate
  modified_base 22: mod_base = OTHER; note = 2'-O-methyladenosine-3'-phosphorothioate
  modified_base 23: mod_base = OTHER; note = 2'-O-methyladenosine-3'-phosphate
tgtattagtactttgaaagtcaa

SEQ ID NO: 1649 - RNA, 23 nt, synthetic construct
  source 1..23: mol_type = other RNA
  modified_base 1: mod_base = OTHER; note = Vinyl-phosphonate 2'-O-methyluridine-3'-phosphorothioate
  modified_base 2: mod_base = OTHER; note = 2'-fluoroadenosine-3'-phosphorothioate
  modified_base 3: mod_base = OTHER; note = 2'-O-methyladenosine-3'-phosphate
  modified_base 4: mod_base = OTHER; note = 2'-O-methyladenosine-3'-phosphate
  modified_base 5: mod_base = OTHER; note = 2'-O-methylcytidine-3'-phosphate
  modified_base 6: mod_base = OTHER; note = 2'-fluorouridine-3'-phosphate
  modified_base 7: mod_base = OTHER; note = 2'-O-methyluridine-3'-phosphate
  modified_base 8: mod_base = OTHER; note = 2'-fluorouridine-3'-phosphate
  modified_base 9: mod_base = OTHER; note = 2'-fluoroguanosine-3'-phosphate
  modified_base 10: mod_base = OTHER; note = 2'-O-methyluridine-3'-phosphate
  modified_base 11: mod_base = OTHER; note = 2'-O-methyladenosine-3'-phosphate
  modified_base 12: mod_base = OTHER; note = 2'-O-methyluridine-3'-phosphate
  modified_base 13: mod_base = OTHER; note = 2'-O-methyladenosine-3'-phosphate
  modified_base 14: mod_base = OTHER; note = 2'-fluoroadenosine-3'-phosphate
  modified_base 15: mod_base = OTHER; note = 2'-O-methyluridine-3'-phosphate
  modified_base 16: mod_base = OTHER; note = 2'-fluoroguanosine-3'-phosphate
  modified_base 17: mod_base = OTHER; note = 2'-O-methylguanosine-3'-phosphate
  modified_base 18: mod_base = OTHER; note = 2'-O-methylcytidine-3'-phosphate
  modified_base 19: mod_base = OTHER; note = 2'-O-methyladenosine-3'-phosphate
  modified_base 20: mod_base = OTHER; note = 2'-O-methyladenosine-3'-phosphate
  modified_base 21: mod_base = OTHER; note = 2'-O-methyladenosine-3'-phosphorothioate
  modified_base 22: mod_base = OTHER; note = 2'-O-methylcytidine-3'-phosphorothioate
  modified_base 23: mod_base = OTHER; note = 2'-O-methyladenosine-3'-phosphate
taaactttgtataatggcaaaca

SEQ ID NO: 1650 - RNA, 23 nt, synthetic construct
  source 1..23: mol_type = other RNA
  modified_base 1: mod_base = OTHER; note = Vinyl-phosphonate 2'-O-methyluridine-3'-phosphorothioate
  modified_base 2: mod_base = OTHER; note = 2'-fluoroguanosine-3'-phosphorothioate
  modified_base 3: mod_base = OTHER; note = 2'-O-methyladenosine-3'-phosphate
  modified_base 4: mod_base = OTHER; note = 2'-O-methylguanosine-3'-phosphate
  modified_base 5: mod_base = OTHER; note = 2'-O-methylguanosine-3'-phosphate
  modified_base 6: mod_base = OTHER; note = 2'-fluorouridine-3'-phosphate
  modified_base 7: mod_base = OTHER; note = 2'-O-methyladenosine-3'-phosphate
  modified_base 8: mod_base = OTHER; note = 2'-fluorouridine-3'-phosphate
  modified_base 9: mod_base = OTHER; note = 2'-fluoroguanosine-3'-phosphate
  modified_base 10: mod_base = OTHER; note = 2'-O-methyluridine-3'-phosphate
  modified_base 11: mod_base = OTHER; note = 2'-O-methylcytidine-3'-phosphate
  modified_base 12: mod_base = OTHER; note = 2'-O-methylguanosine-3'-phosphate
  modified_base 13: mod_base = OTHER; note = 2'-O-methyladenosine-3'-phosphate
  modified_base 14: mod_base = OTHER; note = 2'-fluorouridine-3'-phosphate
  modified_base 15: mod_base = OTHER; note = 2'-O-methyladenosine-3'-phosphate
  modified_base 16: mod_base = OTHER; note = 2'-fluoroguanosine-3'-phosphate
  modified_base 17: mod_base = OTHER; note = 2'-O-methyluridine-3'-phosphate
  modified_base 18: mod_base = OTHER; note = 2'-O-methylguanosine-3'-phosphate
  modified_base 19: mod_base = OTHER; note = 2'-O-methyluridine-3'-phosphate
  modified_base 20: mod_base = OTHER; note = 2'-O-methyluridine-3'-phosphate
  modified_base 21: mod_base = OTHER; note = 2'-O-methylcytidine-3'-phosphorothioate
  modified_base 22: mod_base = OTHER; note = 2'-O-methyladenosine-3'-phosphorothioate
  modified_base 23: mod_base = OTHER; note = 2'-O-methylguanosine-3'-phosphate
tgaggtatgtcgatagtgttcag

SEQ ID NO: 1651 - RNA, 23 nt, synthetic construct
  source 1..23: mol_type = other RNA
  modified_base 1: mod_base = OTHER; note = Vinyl-phosphonate 2'-O-methyluridine-3'-phosphorothioate
  modified_base 2: mod_base = OTHER; note = 2'-fluorouridine -3'-phosphorothioate
  modified_base 3: mod_base = OTHER; note = 2'-O-methyladenosine-3'-phosphate
  modified_base 4: mod_base = OTHER; note = 2'-O-methyluridine-3'-phosphate
  modified_base 5: mod_base = OTHER; note = 2'-O-methyluridine-3'-phosphate
  modified_base 6: mod_base = OTHER; note = 2'-fluoroadenosine-3'-phosphate
  modified_base 7: mod_base = OTHER; note = 2'-O-methylguanosine-3'-phosphate
  modified_base 8: mod_base = OTHER; note = 2'-fluorouridine-3'-phosphate
  modified_base 9: mod_base = OTHER; note = 2'-fluoroadenosine-3'-phosphate
  modified_base 10: mod_base = OTHER; note = 2'-O-methyladenosine-3'-phosphate
  modified_base 11: mod_base = OTHER; note = 2'-O-methyladenosine-3'-phosphate
  modified_base 12: mod_base = OTHER; note = 2'-O-methyluridine-3'-phosphate
  modified_base 13: mod_base = OTHER; note = 2'-O-methylguanosine-3'-phosphate
  modified_base 14: mod_base = OTHER; note = 2'-fluorouridine-3'-phosphate
  modified_base 15: mod_base = OTHER; note = 2'-O-methylcytidine-3'-phosphate
  modified_base 16: mod_base = OTHER; note = 2'-fluoroadenosine-3'-phosphate
  modified_base 17: mod_base = OTHER; note = 2'-O-methyluridine-3'-phosphate
  modified_base 18: mod_base = OTHER; note = 2'-O-methyluridine-3'-phosphate
  modified_base 19: mod_base = OTHER; note = 2'-O-methylcytidine-3'-phosphate
  modified_base 20: mod_base = OTHER; note = 2'-O-methyluridine-3'-phosphate
  modified_base 21: mod_base = OTHER; note = 2'-O-methyladenosine-3'-phosphorothioate
  modified_base 22: mod_base = OTHER; note = 2'-O-methylcytidine-3'-phosphorothioate
  modified_base 23: mod_base = OTHER; note = 2'-O-methylguanosine-3'-phosphate
ttattagtaaatgtcattctacg

SEQ ID NO: 1652 - RNA, 23 nt, synthetic construct
  source 1..23: mol_type = other RNA
  modified_base 1: mod_base = OTHER; note = Vinyl-phosphonate 2'-O-methyluridine-3'-phosphorothioate
  modified_base 2: mod_base = OTHER; note = 2'-fluorouridine -3'-phosphorothioate
  modified_base 3: mod_base = OTHER; note = 2'-O-methyladenosine-3'-phosphate
  modified_base 4: mod_base = OTHER; note = 2'-O-methyladenosine-3'-phosphate
  modified_base 5: mod_base = OTHER; note = 2'-O-methyladenosine-3'-phosphate
  modified_base 6: mod_base = OTHER; note = 2'-fluorocytidine-3'-phosphate
  modified_base 7: mod_base = OTHER; note = 2'-O-methyladenosine-3'-phosphate
  modified_base 8: mod_base = OTHER; note = 2'-fluorouridine-3'-phosphate
  modified_base 9: mod_base = OTHER; note = 2'-fluorouridine-3'-phosphate
  modified_base 10: mod_base = OTHER; note = 2'-O-methyluridine-3'-phosphate
  modified_base 11: mod_base = OTHER; note = 2'-O-methylcytidine-3'-phosphate
  modified_base 12: mod_base = OTHER; note = 2'-O-methyluridine-3'-phosphate
  modified_base 13: mod_base = OTHER; note = 2'-O-methyladenosine-3'-phosphate
  modified_base 14: mod_base = OTHER; note = 2'-fluoroadenosine-3'-phosphate
  modified_base 15: mod_base = OTHER; note = 2'-O-methylguanosine-3'-phosphate
  modified_base 16: mod_base = OTHER; note = 2'-fluorouridine-3'-phosphate
  modified_base 17: mod_base = OTHER; note = 2'-O-methyladenosine-3'-phosphate
  modified_base 18: mod_base = OTHER; note = 2'-O-methylguanosine-3'-phosphate
  modified_base 19: mod_base = OTHER; note = 2'-O-methylcytidine-3'-phosphate
  modified_base 20: mod_base = OTHER; note = 2'-O-methyluridine-3'-phosphate
  modified_base 21: mod_base = OTHER; note = 2'-O-methyluridine-3'-phosphorothioate
  modified_base 22: mod_base = OTHER; note = 2'-O-methylguanosine-3'-phosphorothioate
  modified_base 23: mod_base = OTHER; note = 2'-O-methyluridine-3'-phosphate
ttaaacatttctaagtagcttgt

SEQ ID NO: 1653 - RNA, 23 nt, synthetic construct
  source 1..23: mol_type = other RNA
  modified_base 1: mod_base = OTHER; note = Vinyl-phosphonate 2'-O-methyluridine-3'-phosphorothioate
  modified_base 2: mod_base = OTHER; note = 2'-fluoroadenosine-3'-phosphorothioate
  modified_base 3: mod_base = OTHER; note = 2'-O-methyladenosine-3'-phosphate
  modified_base 4: mod_base = OTHER; note = 2'-O-methyluridine-3'-phosphate
  modified_base 5: mod_base = OTHER; note = 2'-O-methylcytidine-3'-phosphate
  modified_base 6: mod_base = OTHER; note = 2'-fluorouridine-3'-phosphate
  modified_base 7: mod_base = OTHER; note = 2'-O-methylcytidine-3'-phosphate
  modified_base 8: mod_base = OTHER; note = 2'-fluorouridine-3'-phosphate
  modified_base 9: mod_base = OTHER; note = 2'-fluoroguanosine-3'-phosphate
  modified_base 10: mod_base = OTHER; note = 2'-O-methyladenosine-3'-phosphate
  modified_base 11: mod_base = OTHER; note = 2'-O-methylguanosine-3'-phosphate
  modified_base 12: mod_base = OTHER; note = 2'-O-methyladenosine-3'-phosphate
  modified_base 13: mod_base = OTHER; note = 2'-O-methylguanosine-3'-phosphate
  modified_base 14: mod_base = OTHER; note = 2'-fluorouridine-3'-phosphate
  modified_base 15: mod_base = OTHER; note = 2'-O-methyladenosine-3'-phosphate
  modified_base 16: mod_base = OTHER; note = 2'-fluorocytidine-3'-phosphate
  modified_base 17: mod_base = OTHER; note = 2'-O-methyluridine-3'-phosphate
  modified_base 18: mod_base = OTHER; note = 2'-O-methyladenosine-3'-phosphate
  modified_base 19: mod_base = OTHER; note = 2'-O-methyladenosine-3'-phosphate
  modified_base 20: mod_base = OTHER; note = 2'-O-methylguanosine-3'-phosphate
  modified_base 21: mod_base = OTHER; note = 2'-O-methylguanosine-3'-phosphorothioate
  modified_base 22: mod_base = OTHER; note = 2'-O-methylguanosine-3'-phosphorothioate
  modified_base 23: mod_base = OTHER; note = 2'-O-methyladenosine-3'-phosphate
taatctctgagagtactaaggga

SEQ ID NO: 1654 - RNA, 23 nt, synthetic construct
  source 1..23: mol_type = other RNA
  modified_base 1: mod_base = OTHER; note = Vinyl-phosphonate 2'-O-methyluridine-3'-phosphorothioate
  modified_base 2: mod_base = OTHER; note = 2'-fluoroadenosine-3'-phosphorothioate
  modified_base 3: mod_base = OTHER; note = 2'-O-methyluridine-3'-phosphate
  modified_base 4: mod_base = OTHER; note = 2'-O-methyluridine-3'-phosphate
  modified_base 5: mod_base = OTHER; note = 2'-O-methyladenosine-3'-phosphate
  modified_base 6: mod_base = OTHER; note = 2'-fluorocytidine-3'-phosphate
  modified_base 7: mod_base = OTHER; note = 2'-O-methylguanosine-3'-phosphate
  modified_base 8: mod_base = OTHER; note = 2'-fluorouridine-3'-phosphate
  modified_base 9: mod_base = OTHER; note = 2'-fluorouridine-3'-phosphate
  modified_base 10: mod_base = OTHER; note = 2'-O-methyladenosine-3'-phosphate
  modified_base 11: mod_base = OTHER; note = 2'-O-methylguanosine-3'-phosphate
  modified_base 12: mod_base = OTHER; note = 2'-O-methyluridine-3'-phosphate
  modified_base 13: mod_base = OTHER; note = 2'-O-methylguanosine-3'-phosphate
  modified_base 14: mod_base = OTHER; note = 2'-fluorouridine-3'-phosphate
  modified_base 15: mod_base = OTHER; note = 2'-O-methylguanosine-3'-phosphate
  modified_base 16: mod_base = OTHER; note = 2'-fluorocytidine-3'-phosphate
  modified_base 17: mod_base = OTHER; note = 2'-O-methyladenosine-3'-phosphate
  modified_base 18: mod_base = OTHER; note = 2'-O-methyluridine-3'-phosphate
  modified_base 19: mod_base = OTHER; note = 2'-O-methyluridine-3'-phosphate
  modified_base 20: mod_base = OTHER; note = 2'-O-methylcytidine-3'-phosphate
  modified_base 21: mod_base = OTHER; note = 2'-O-methyladenosine-3'-phosphorothioate
  modified_base 22: mod_base = OTHER; note = 2'-O-methyladenosine-3'-phosphorothioate
  modified_base 23: mod_base = OTHER; note = 2'-O-methylguanosine-3'-phosphate
tattacgttagtgtgcattcaag

SEQ ID NO: 1655 - RNA, 23 nt, synthetic construct
  source 1..23: mol_type = other RNA
  modified_base 1: mod_base = OTHER; note = Vinyl-phosphonate 2'-O-methyluridine-3'-phosphorothioate
  modified_base 2: mod_base = OTHER; note = 2'-fluorouridine -3'-phosphorothioate
  modified_base 3: mod_base = OTHER; note = 2'-O-methyladenosine-3'-phosphate
  modified_base 4: mod_base = OTHER; note = 2'-O-methyladenosine-3'-phosphate
  modified_base 5: mod_base = OTHER; note = 2'-O-methyluridine-3'-phosphate
  modified_base 6: mod_base = OTHER; note = 2'-fluorouridine-3'-phosphate
  modified_base 7: mod_base = OTHER; note = 2'-O-methyladenosine-3'-phosphate
  modified_base 8: mod_base = OTHER; note = 2'-fluorouridine-3'-phosphate
  modified_base 9: mod_base = OTHER; note = 2'-fluorocytidine-3'-phosphate
  modified_base 10: mod_base = OTHER; note = 2'-O-methyladenosine-3'-phosphate
  modified_base 11: mod_base = OTHER; note = 2'-O-methyluridine-3'-phosphate
  modified_base 12: mod_base = OTHER; note = 2'-O-methylcytidine-3'-phosphate
  modified_base 13: mod_base = OTHER; note = 2'-O-methyladenosine-3'-phosphate
  modified_base 14: mod_base = OTHER; note = 2'-fluorouridine-3'-phosphate
  modified_base 15: mod_base = OTHER; note = 2'-O-methyluridine-3'-phosphate
  modified_base 16: mod_base = OTHER; note = 2'-fluoroadenosine-3'-phosphate
  modified_base 17: mod_base = OTHER; note = 2'-O-methylguanosine-3'-phosphate
  modified_base 18: mod_base = OTHER; note = 2'-O-methylguanosine-3'-phosphate
  modified_base 19: mod_base = OTHER; note = 2'-O-methylcytidine-3'-phosphate
  modified_base 20: mod_base = OTHER; note = 2'-O-methyluridine-3'-phosphate
  modified_base 21: mod_base = OTHER; note = 2'-O-methyluridine-3'-phosphorothioate
  modified_base 22: mod_base = OTHER; note = 2'-O-methyluridine-3'-phosphorothioate
  modified_base 23: mod_base = OTHER; note = 2'-O-methylguanosine-3'-phosphate
ttaattatcatcattaggctttg

SEQ ID NO: 1656 - RNA, 23 nt, synthetic construct
  source 1..23: mol_type = other RNA
  modified_base 1: mod_base = OTHER; note = Vinyl-phosphonate 2'-O-methyluridine-3'-phosphorothioate
  modified_base 2: mod_base = OTHER; note = 2'-fluorouridine -3'-phosphorothioate
  modified_base 3: mod_base = OTHER; note = 2'-O-methyladenosine-3'-phosphate
  modified_base 4: mod_base = OTHER; note = 2'-O-methyluridine-3'-phosphate
  modified_base 5: mod_base = OTHER; note = 2'-O-methylguanosine-3'-phosphate
  modified_base 6: mod_base = OTHER; note = 2'-fluoroguanosine-3'-phosphate
  modified_base 7: mod_base = OTHER; note = 2'-O-methylguanosine-3'-phosphate
  modified_base 8: mod_base = OTHER; note = 2'-fluoroadenosine-3'-phosphate
  modified_base 9: mod_base = OTHER; note = 2'-fluorouridine-3'-phosphate
  modified_base 10: mod_base = OTHER; note = 2'-O-methyladenosine-3'-phosphate
  modified_base 11: mod_base = OTHER; note = 2'-O-methylguanosine-3'-phosphate
  modified_base 12: mod_base = OTHER; note = 2'-O-methyluridine-3'-phosphate
  modified_base 13: mod_base = OTHER; note = 2'-O-methyladenosine-3'-phosphate
  modified_base 14: mod_base = OTHER; note = 2'-fluoroadenosine-3'-phosphate
  modified_base 15: mod_base = OTHER; note = 2'-O-methyladenosine-3'-phosphate
  modified_base 16: mod_base = OTHER; note = 2'-fluoroadenosine-3'-phosphate
  modified_base 17: mod_base = OTHER; note = 2'-O-methyladenosine-3'-phosphate
  modified_base 18: mod_base = OTHER; note = 2'-O-methylguanosine-3'-phosphate
  modified_base 19: mod_base = OTHER; note = 2'-O-methyluridine-3'-phosphate
  modified_base 20: mod_base = OTHER; note = 2'-O-methyluridine-3'-phosphate
  modified_base 21: mod_base = OTHER; note = 2'-O-methyluridine-3'-phosphorothioate
  modified_base 22: mod_base = OTHER; note = 2'-O-methylcytidine-3'-phosphorothioate
  modified_base 23: mod_base = OTHER; note = 2'-O-methylcytidine-3'-phosphate
ttatgggatagtaaaaagtttcc

SEQ ID NO: 1657 - RNA, 23 nt, synthetic construct
  source 1..23: mol_type = other RNA
  modified_base 1: mod_base = OTHER; note = Vinyl-phosphonate 2'-O-methyluridine-3'-phosphorothioate
  modified_base 2: mod_base = OTHER; note = 2'-fluorouridine -3'-phosphorothioate
  modified_base 3: mod_base = OTHER; note = 2'-O-methyladenosine-3'-phosphate
  modified_base 4: mod_base = OTHER; note = 2'-O-methylcytidine-3'-phosphate
  modified_base 5: mod_base = OTHER; note = 2'-O-methyluridine-3'-phosphate
  modified_base 6: mod_base = OTHER; note = 2'-fluorouridine-3'-phosphate
  modified_base 7: mod_base = OTHER; note = 2'-O-methyladenosine-3'-phosphate
  modified_base 8: mod_base = OTHER; note = 2'-fluoroadenosine-3'-phosphate
  modified_base 9: mod_base = OTHER; note = 2'-fluoroguanosine-3'-phosphate
  modified_base 10: mod_base = OTHER; note = 2'-O-methyladenosine-3'-phosphate
  modified_base 11: mod_base = OTHER; note = 2'-O-methylguanosine-3'-phosphate
  modified_base 12: mod_base = OTHER; note = 2'-O-methyluridine-3'-phosphate
  modified_base 13: mod_base = OTHER; note = 2'-O-methyladenosine-3'-phosphate
  modified_base 14: mod_base = OTHER; note = 2'-fluorouridine-3'-phosphate
  modified_base 15: mod_base = OTHER; note = 2'-O-methylcytidine-3'-phosphate
  modified_base 16: mod_base = OTHER; note = 2'-fluoroadenosine-3'-phosphate
  modified_base 17: mod_base = OTHER; note = 2'-O-methylguanosine-3'-phosphate
  modified_base 18: mod_base = OTHER; note = 2'-O-methylcytidine-3'-phosphate
  modified_base 19: mod_base = OTHER; note = 2'-O-methyluridine-3'-phosphate
  modified_base 20: mod_base = OTHER; note = 2'-O-methyladenosine-3'-phosphate
  modified_base 21: mod_base = OTHER; note = 2'-O-methylguanosine-3'-phosphorothioate
  modified_base 22: mod_base = OTHER; note = 2'-O-methylcytidine-3'-phosphorothioate
  modified_base 23: mod_base = OTHER; note = 2'-O-methyluridine-3'-phosphate
ttacttaagagtatcagctagct

SEQ ID NO: 1658 - RNA, 23 nt, synthetic construct
  source 1..23: mol_type = other RNA
  modified_base 1: mod_base = OTHER; note = Vinyl-phosphonate 2'-O-methyluridine-3'-phosphorothioate
  modified_base 2: mod_base = OTHER; note = 2'-fluorouridine -3'-phosphorothioate
  modified_base 3: mod_base = OTHER; note = 2'-O-methyladenosine-3'-phosphate
  modified_base 4: mod_base = OTHER; note = 2'-O-methylguanosine-3'-phosphate
  modified_base 5: mod_base = OTHER; note = 2'-O-methyladenosine-3'-phosphate
  modified_base 6: mod_base = OTHER; note = 2'-fluoroguanosine-3'-phosphate
  modified_base 7: mod_base = OTHER; note = 2'-O-methyluridine-3'-phosphate
  modified_base 8: mod_base = OTHER; note = 2'-fluorouridine-3'-phosphate
  modified_base 9: mod_base = OTHER; note = 2'-fluoroadenosine-3'-phosphate
  modified_base 10: mod_base = OTHER; note = 2'-O-methyluridine-3'-phosphate
  modified_base 11: mod_base = OTHER; note = 2'-O-methylcytidine-3'-phosphate
  modified_base 12: mod_base = OTHER; note = 2'-O-methyluridine-3'-phosphate
  modified_base 13: mod_base = OTHER; note = 2'-O-methyluridine-3'-phosphate
  modified_base 14: mod_base = OTHER; note = 2'-fluorouridine-3'-phosphate
  modified_base 15: mod_base = OTHER; note = 2'-O-methyluridine-3'-phosphate
  modified_base 16: mod_base = OTHER; note = 2'-fluorocytidine-3'-phosphate
  modified_base 17: mod_base = OTHER; note = 2'-O-methyladenosine-3'-phosphate
  modified_base 18: mod_base = OTHER; note = 2'-O-methyluridine-3'-phosphate
  modified_base 19: mod_base = OTHER; note = 2'-O-methylguanosine-3'-phosphate
  modified_base 20: mod_base = OTHER; note = 2'-O-methylcytidine-3'-phosphate
  modified_base 21: mod_base = OTHER; note = 2'-O-methyluridine-3'-phosphorothioate
  modified_base 22: mod_base = OTHER; note = 2'-O-methylguanosine-3'-phosphorothioate
  modified_base 23: mod_base = OTHER; note = 2'-O-methylcytidine-3'-phosphate
ttagagttatcttttcatgctgc

SEQ ID NO: 1659 - RNA, 23 nt, synthetic construct
  source 1..23: mol_type = other RNA
  modified_base 1: mod_base = OTHER; note = Vinyl-phosphonate 2'-O-methyluridine-3'-phosphorothioate
  modified_base 2: mod_base = OTHER; note = 2'-fluoroadenosine-3'-phosphorothioate
  modified_base 3: mod_base = OTHER; note = 2'-O-methylcytidine-3'-phosphate
  modified_base 4: mod_base = OTHER; note = 2'-O-methyluridine-3'-phosphate
  modified_base 5: mod_base = OTHER; note = 2'-O-methyladenosine-3'-phosphate
  modified_base 6: mod_base = OTHER; note = 2'-fluoroadenosine-3'-phosphate
  modified_base 7: mod_base = OTHER; note = 2'-O-methyluridine-3'-phosphate
  modified_base 8: mod_base = OTHER; note = 2'-fluoroadenosine-3'-phosphate
  modified_base 9: mod_base = OTHER; note = 2'-fluoroguanosine-3'-phosphate
  modified_base 10: mod_base = OTHER; note = 2'-O-methylcytidine-3'-phosphate
  modified_base 11: mod_base = OTHER; note = 2'-O-methyladenosine-3'-phosphate
  modified_base 12: mod_base = OTHER; note = 2'-O-methyluridine-3'-phosphate
  modified_base 13: mod_base = OTHER; note = 2'-O-methyladenosine-3'-phosphate
  modified_base 14: mod_base = OTHER; note = 2'-fluoroadenosine-3'-phosphate
  modified_base 15: mod_base = OTHER; note = 2'-O-methyluridine-3'-phosphate
  modified_base 16: mod_base = OTHER; note = 2'-fluoroguanosine-3'-phosphate
  modified_base 17: mod_base = OTHER; note = 2'-O-methylguanosine-3'-phosphate
  modified_base 18: mod_base = OTHER; note = 2'-O-methylcytidine-3'-phosphate
  modified_base 19: mod_base = OTHER; note = 2'-O-methyluridine-3'-phosphate
  modified_base 20: mod_base = OTHER; note = 2'-O-methyluridine-3'-phosphate
  modified_base 21: mod_base = OTHER; note = 2'-O-methyladenosine-3'-phosphorothioate
  modified_base 22: mod_base = OTHER; note = 2'-O-methylguanosine-3'-phosphorothioate
  modified_base 23: mod_base = OTHER; note = 2'-O-methyluridine-3'-phosphate
tactaatagcataatggcttagt

SEQ ID NO: 1660 - RNA, 23 nt, synthetic construct
  source 1..23: mol_type = other RNA
  modified_base 1: mod_base = OTHER; note = Vinyl-phosphonate 2'-O-methyluridine-3'-phosphorothioate
  modified_base 2: mod_base = OTHER; note = 2'-fluorouridine -3'-phosphorothioate
  modified_base 3: mod_base = OTHER; note = 2'-O-methyladenosine-3'-phosphate
  modified_base 4: mod_base = OTHER; note = 2'-O-methyluridine-3'-phosphate
  modified_base 5: mod_base = OTHER; note = 2'-O-methylguanosine-3'-phosphate
  modified_base 6: mod_base = OTHER; note = 2'-fluorouridine-3'-phosphate
  modified_base 7: mod_base = OTHER; note = 2'-O-methyluridine-3'-phosphate
  modified_base 8: mod_base = OTHER; note = 2'-fluoroadenosine-3'-phosphate
  modified_base 9: mod_base = OTHER; note = 2'-fluoroguanosine-3'-phosphate
  modified_base 10: mod_base = OTHER; note = 2'-O-methylcytidine-3'-phosphate
  modified_base 11: mod_base = OTHER; note = 2'-O-methyluridine-3'-phosphate
  modified_base 12: mod_base = OTHER; note = 2'-O-methyladenosine-3'-phosphate
  modified_base 13: mod_base = OTHER; note = 2'-O-methyladenosine-3'-phosphate
  modified_base 14: mod_base = OTHER; note = 2'-fluoroadenosine-3'-phosphate
  modified_base 15: mod_base = OTHER; note = 2'-O-methyladenosine-3'-phosphate
  modified_base 16: mod_base = OTHER; note = 2'-fluoroguanosine-3'-phosphate
  modified_base 17: mod_base = OTHER; note = 2'-O-methylcytidine-3'-phosphate
  modified_base 18: mod_base = OTHER; note = 2'-O-methyluridine-3'-phosphate
  modified_base 19: mod_base = OTHER; note = 2'-O-methyladenosine-3'-phosphate
  modified_base 20: mod_base = OTHER; note = 2'-O-methylguanosine-3'-phosphate
  modified_base 21: mod_base = OTHER; note = 2'-O-methyladenosine-3'-phosphorothioate
  modified_base 22: mod_base = OTHER; note = 2'-O-methyladenosine-3'-phosphorothioate
  modified_base 23: mod_base = OTHER; note = 2'-O-methyluridine-3'-phosphate
ttatgttagctaaaagctagaat

SEQ ID NO: 1661 - RNA, 23 nt, synthetic construct
  source 1..23: mol_type = other RNA
  modified_base 1: mod_base = OTHER; note = Vinyl-phosphonate 2'-O-methyluridine-3'-phosphorothioate
  modified_base 2: mod_base = OTHER; note = 2'-fluorouridine -3'-phosphorothioate
  modified_base 3: mod_base = OTHER; note = 2'-O-methylguanosine-3'-phosphate
  modified_base 4: mod_base = OTHER; note = 2'-O-methyladenosine-3'-phosphate
  modified_base 5: mod_base = OTHER; note = 2'-O-methyladenosine-3'-phosphate
  modified_base 6: mod_base = OTHER; note = 2'-fluoroguanosine-3'-phosphate
  modified_base 7: mod_base = OTHER; note = 2'-O-methyluridine-3'-phosphate
  modified_base 8: mod_base = OTHER; note = 2'-fluorouridine-3'-phosphate
  modified_base 9: mod_base = OTHER; note = 2'-fluorouridine-3'-phosphate
  modified_base 10: mod_base = OTHER; note = 2'-O-methylguanosine-3'-phosphate
  modified_base 11: mod_base = OTHER; note = 2'-O-methyladenosine-3'-phosphate
  modified_base 12: mod_base = OTHER; note = 2'-O-methyladenosine-3'-phosphate
  modified_base 13: mod_base = OTHER; note = 2'-O-methylguanosine-3'-phosphate
  modified_base 14: mod_base = OTHER; note = 2'-fluoroadenosine-3'-phosphate
  modified_base 15: mod_base = OTHER; note = 2'-O-methyladenosine-3'-phosphate
  modified_base 16: mod_base = OTHER; note = 2'-fluorouridine-3'-phosphate
  modified_base 17: mod_base = OTHER; note = 2'-O-methylcytidine-3'-phosphate
  modified_base 18: mod_base = OTHER; note = 2'-O-methyladenosine-3'-phosphate
  modified_base 19: mod_base = OTHER; note = 2'-O-methylcytidine-3'-phosphate
  modified_base 20: mod_base = OTHER; note = 2'-O-methyladenosine-3'-phosphate
  modified_base 21: mod_base = OTHER; note = 2'-O-methylcytidine-3'-phosphorothioate
  modified_base 22: mod_base = OTHER; note = 2'-O-methyladenosine-3'-phosphorothioate
  modified_base 23: mod_base = OTHER; note = 2'-O-methyladenosine-3'-phosphate
ttgaagtttgaagaatcacacaa

SEQ ID NO: 1662 - RNA, 23 nt, synthetic construct
  source 1..23: mol_type = other RNA
  modified_base 1: mod_base = OTHER; note = Vinyl-phosphonate 2'-O-methyluridine-3'-phosphorothioate
  modified_base 2: mod_base = OTHER; note = 2'-fluoroadenosine-3'-phosphorothioate
  modified_base 3: mod_base = OTHER; note = 2'-O-methyladenosine-3'-phosphate
  modified_base 4: mod_base = OTHER; note = 2'-O-methyladenosine-3'-phosphate
  modified_base 5: mod_base = OTHER; note = 2'-O-methyladenosine-3'-phosphate
  modified_base 6: mod_base = OTHER; note = 2'-fluorocytidine-3'-phosphate
  modified_base 7: mod_base = OTHER; note = 2'-O-methyluridine-3'-phosphate
  modified_base 8: mod_base = OTHER; note = 2'-fluoroguanosine-3'-phosphate
  modified_base 9: mod_base = OTHER; note = 2'-fluorouridine-3'-phosphate
  modified_base 10: mod_base = OTHER; note = 2'-O-methyluridine-3'-phosphate
  modified_base 11: mod_base = OTHER; note = 2'-O-methyladenosine-3'-phosphate
  modified_base 12: mod_base = OTHER; note = 2'-O-methylguanosine-3'-phosphate
  modified_base 13: mod_base = OTHER; note = 2'-O-methylguanosine-3'-phosphate
  modified_base 14: mod_base = OTHER; note = 2'-fluorouridine-3'-phosphate
  modified_base 15: mod_base = OTHER; note = 2'-O-methylcytidine-3'-phosphate
  modified_base 16: mod_base = OTHER; note = 2'-fluorouridine-3'-phosphate
  modified_base 17: mod_base = OTHER; note = 2'-O-methylguanosine-3'-phosphate
  modified_base 18: mod_base = OTHER; note = 2'-O-methylguanosine-3'-phosphate
  modified_base 19: mod_base = OTHER; note = 2'-O-methyladenosine-3'-phosphate
  modified_base 20: mod_base = OTHER; note = 2'-O-methylguanosine-3'-phosphate
  modified_base 21: mod_base = OTHER; note = 2'-O-methyladenosine-3'-phosphorothioate
  modified_base 22: mod_base = OTHER; note = 2'-O-methylguanosine-3'-phosphorothioate
  modified_base 23: mod_base = OTHER; note = 2'-O-methyladenosine-3'-phosphate
taaaactgttaggtctggagaga

SEQ ID NO: 1663 - RNA, 23 nt, synthetic construct
  source 1..23: mol_type = other RNA
  modified_base 1: mod_base = OTHER; note = Vinyl-phosphonate 2'-O-methyluridine-3'-phosphorothioate
  modified_base 2: mod_base = OTHER; note = 2'-fluorocytidine-3'-phosphorothioate
  modified_base 3: mod_base = OTHER; note = 2'-O-methyladenosine-3'-phosphate
  modified_base 4: mod_base = OTHER; note = 2'-O-methyladenosine-3'-phosphate
  modified_base 5: mod_base = OTHER; note = 2'-O-methylguanosine-3'-phosphate
  modified_base 6: mod_base = OTHER; note = 2'-fluoroguanosine-3'-phosphate
  modified_base 7: mod_base = OTHER; note = 2'-O-methylcytidine-3'-phosphate
  modified_base 8: mod_base = OTHER; note = 2'-fluorouridine-3'-phosphate
  modified_base 9: mod_base = OTHER; note = 2'-fluoroadenosine-3'-phosphate
  modified_base 10: mod_base = OTHER; note = 2'-O-methylguanosine-3'-phosphate
  modified_base 11: mod_base = OTHER; note = 2'-O-methyladenosine-3'-phosphate
  modified_base 12: mod_base = OTHER; note = 2'-O-methyluridine-3'-phosphate
  modified_base 13: mod_base = OTHER; note = 2'-O-methylguanosine-3'-phosphate
  modified_base 14: mod_base = OTHER; note = 2'-fluoroadenosine-3'-phosphate
  modified_base 15: mod_base = OTHER; note = 2'-O-methyladenosine-3'-phosphate
  modified_base 16: mod_base = OTHER; note = 2'-fluoroadenosine-3'-phosphate
  modified_base 17: mod_base = OTHER; note = 2'-O-methyladenosine-3'-phosphate
  modified_base 18: mod_base = OTHER; note = 2'-O-methyladenosine-3'-phosphate
  modified_base 19: mod_base = OTHER; note = 2'-O-methyladenosine-3'-phosphate
  modified_base 20: mod_base = OTHER; note = 2'-O-methyladenosine-3'-phosphate
  modified_base 21: mod_base = OTHER; note = 2'-O-methylguanosine-3'-phosphorothioate
  modified_base 22: mod_base = OTHER; note = 2'-O-methyladenosine-3'-phosphorothioate
  modified_base 23: mod_base = OTHER; note = 2'-O-methyladenosine-3'-phosphate
tcaaggctagatgaaaaaaagaa

SEQ ID NO: 1664 - RNA, 23 nt, synthetic construct
  source 1..23: mol_type = other RNA
  modified_base 1: mod_base = OTHER; note = Vinyl-phosphonate 2'-O-methyluridine-3'-phosphorothioate
  modified_base 2: mod_base = OTHER; note = 2'-fluoroadenosine-3'-phosphorothioate
  modified_base 3: mod_base = OTHER; note = 2'-O-methylguanosine-3'-phosphate
  modified_base 4: mod_base = OTHER; note = 2'-O-methyladenosine-3'-phosphate
  modified_base 5: mod_base = OTHER; note = 2'-O-methyluridine-3'-phosphate
  modified_base 6: mod_base = OTHER; note = 2'-fluoroguanosine-3'-phosphate
  modified_base 7: mod_base = OTHER; note = 2'-O-methyluridine-3'-phosphate
  modified_base 8: mod_base = OTHER; note = 2'-fluorocytidine-3'-phosphate
  modified_base 9: mod_base = OTHER; note = 2'-fluoroadenosine-3'-phosphate
  modified_base 10: mod_base = OTHER; note = 2'-O-methyladenosine-3'-phosphate
  modified_base 11: mod_base = OTHER; note = 2'-O-methylguanosine-3'-phosphate
  modified_base 12: mod_base = OTHER; note = 2'-O-methyladenosine-3'-phosphate
  modified_base 13: mod_base = OTHER; note = 2'-O-methyladenosine-3'-phosphate
  modified_base 14: mod_base = OTHER; note = 2'-fluorouridine-3'-phosphate
  modified_base 15: mod_base = OTHER; note = 2'-O-methyluridine-3'-phosphate
  modified_base 16: mod_base = OTHER; note = 2'-fluoroadenosine-3'-phosphate
  modified_base 17: mod_base = OTHER; note = 2'-O-methyluridine-3'-phosphate
  modified_base 18: mod_base = OTHER; note = 2'-O-methyluridine-3'-phosphate
  modified_base 19: mod_base = OTHER; note = 2'-O-methyluridine-3'-phosphate
  modified_base 20: mod_base = OTHER; note = 2'-O-methyluridine-3'-phosphate
  modified_base 21: mod_base = OTHER; note = 2'-O-methylguanosine-3'-phosphorothioate
  modified_base 22: mod_base = OTHER; note = 2'-O-methyladenosine-3'-phosphorothioate
  modified_base 23: mod_base = OTHER; note = 2'-O-methylcytidine-3'-phosphate
tagatgtcaagaattattttgac

SEQ ID NO: 1665 - RNA, 23 nt, synthetic construct
  source 1..23: mol_type = other RNA
  modified_base 1: mod_base = OTHER; note = Vinyl-phosphonate 2'-O-methyluridine-3'-phosphorothioate
  modified_base 2: mod_base = OTHER; note = 2'-fluorouridine -3'-phosphorothioate
  modified_base 3: mod_base = OTHER; note = 2'-O-methyluridine-3'-phosphate
  modified_base 4: mod_base = OTHER; note = 2'-O-methyladenosine-3'-phosphate
  modified_base 5: mod_base = OTHER; note = 2'-O-methyluridine-3'-phosphate
  modified_base 6: mod_base = OTHER; note = 2'-fluorouridine-3'-phosphate
  modified_base 7: mod_base = OTHER; note = 2'-O-methyluridine-3'-phosphate
  modified_base 8: mod_base = OTHER; note = 2'-fluorouridine-3'-phosphate
  modified_base 9: mod_base = OTHER; note = 2'-fluorocytidine-3'-phosphate
  modified_base 10: mod_base = OTHER; note = 2'-O-methyladenosine-3'-phosphate
  modified_base 11: mod_base = OTHER; note = 2'-O-methylguanosine-3'-phosphate
  modified_base 12: mod_base = OTHER; note = 2'-O-methyladenosine-3'-phosphate
  modified_base 13: mod_base = OTHER; note = 2'-O-methyladenosine-3'-phosphate
  modified_base 14: mod_base = OTHER; note = 2'-fluoroadenosine-3'-phosphate
  modified_base 15: mod_base = OTHER; note = 2'-O-methylguanosine-3'-phosphate
  modified_base 16: mod_base = OTHER; note = 2'-fluorouridine-3'-phosphate
  modified_base 17: mod_base = OTHER; note = 2'-O-methylguanosine-3'-phosphate
  modified_base 18: mod_base = OTHER; note = 2'-O-methyladenosine-3'-phosphate
  modified_base 19: mod_base = OTHER; note = 2'-O-methyluridine-3'-phosphate
  modified_base 20: mod_base = OTHER; note = 2'-O-methylguanosine-3'-phosphate
  modified_base 21: mod_base = OTHER; note = 2'-O-methylcytidine-3'-phosphorothioate
  modified_base 22: mod_base = OTHER; note = 2'-O-methyluridine-3'-phosphorothioate
  modified_base 23: mod_base = OTHER; note = 2'-O-methylguanosine-3'-phosphate
tttattttcagaaagtgatgctg

SEQ ID NO: 1666 - RNA, 23 nt, synthetic construct
  source 1..23: mol_type = other RNA
  modified_base 1: mod_base = OTHER; note = Vinyl-phosphonate 2'-O-methyluridine-3'-phosphorothioate
  modified_base 2: mod_base = OTHER; note = 2'-fluoroadenosine-3'-phosphorothioate
  modified_base 3: mod_base = OTHER; note = 2'-O-methyluridine-3'-phosphate
  modified_base 4: mod_base = OTHER; note = 2'-O-methyladenosine-3'-phosphate
  modified_base 5: mod_base = OTHER; note = 2'-O-methylguanosine-3'-phosphate
  modified_base 6: mod_base = OTHER; note = 2'-fluorouridine-3'-phosphate
  modified_base 7: mod_base = OTHER; note = 2'-O-methyladenosine-3'-phosphate
  modified_base 8: mod_base = OTHER; note = 2'-fluorouridine-3'-phosphate
  modified_base 9: mod_base = OTHER; note = 2'-fluoroguanosine-3'-phosphate
  modified_base 10: mod_base = OTHER; note = 2'-O-methyluridine-3'-phosphate
  modified_base 11: mod_base = OTHER; note = 2'-O-methyluridine-3'-phosphate
  modified_base 12: mod_base = OTHER; note = 2'-O-methyluridine-3'-phosphate
  modified_base 13: mod_base = OTHER; note = 2'-O-methylcytidine-3'-phosphate
  modified_base 14: mod_base = OTHER; note = 2'-fluoroadenosine-3'-phosphate
  modified_base 15: mod_base = OTHER; note = 2'-O-methylcytidine-3'-phosphate
  modified_base 16: mod_base = OTHER; note = 2'-fluoroadenosine-3'-phosphate
  modified_base 17: mod_base = OTHER; note = 2'-O-methyladenosine-3'-phosphate
  modified_base 18: mod_base = OTHER; note = 2'-O-methyladenosine-3'-phosphate
  modified_base 19: mod_base = OTHER; note = 2'-O-methyladenosine-3'-phosphate
  modified_base 20: mod_base = OTHER; note = 2'-O-methylguanosine-3'-phosphate
  modified_base 21: mod_base = OTHER; note = 2'-O-methyladenosine-3'-phosphorothioate
  modified_base 22: mod_base = OTHER; note = 2'-O-methyluridine-3'-phosphorothioate
  modified_base 23: mod_base = OTHER; note = 2'-O-methylguanosine-3'-phosphate
tatagtatgtttcacaaaagatg

SEQ ID NO: 1667 - RNA, 23 nt, synthetic construct
  source 1..23: mol_type = other RNA
  modified_base 1: mod_base = OTHER; note = Vinyl-phosphonate 2'-O-methyluridine-3'-phosphorothioate
  modified_base 2: mod_base = OTHER; note = 2'-fluorouridine -3'-phosphorothioate
  modified_base 3: mod_base = OTHER; note = 2'-O-methyluridine-3'-phosphate
  modified_base 4: mod_base = OTHER; note = 2'-O-methyladenosine-3'-phosphate
  modified_base 5: mod_base = OTHER; note = 2'-O-methylguanosine-3'-phosphate
  modified_base 6: mod_base = OTHER; note = 2'-fluorocytidine-3'-phosphate
  modified_base 7: mod_base = OTHER; note = 2'-O-methylcytidine-3'-phosphate
  modified_base 8: mod_base = OTHER; note = 2'-fluorouridine-3'-phosphate
  modified_base 9: mod_base = OTHER; note = 2'-fluoroadenosine-3'-phosphate
  modified_base 10: mod_base = OTHER; note = 2'-O-methyluridine-3'-phosphate
  modified_base 11: mod_base = OTHER; note = 2'-O-methylguanosine-3'-phosphate
  modified_base 12: mod_base = OTHER; note = 2'-O-methylguanosine-3'-phosphate
  modified_base 13: mod_base = OTHER; note = 2'-O-methyladenosine-3'-phosphate
  modified_base 14: mod_base = OTHER; note = 2'-fluoroadenosine-3'-phosphate
  modified_base 15: mod_base = OTHER; note = 2'-O-methylguanosine-3'-phosphate
  modified_base 16: mod_base = OTHER; note = 2'-fluoroadenosine-3'-phosphate
  modified_base 17: mod_base = OTHER; note = 2'-O-methyladenosine-3'-phosphate
  modified_base 18: mod_base = OTHER; note = 2'-O-methyladenosine-3'-phosphate
  modified_base 19: mod_base = OTHER; note = 2'-O-methyluridine-3'-phosphate
  modified_base 20: mod_base = OTHER; note = 2'-O-methyladenosine-3'-phosphate
  modified_base 21: mod_base = OTHER; note = 2'-O-methylguanosine-3'-phosphorothioate
  modified_base 22: mod_base = OTHER; note = 2'-O-methyladenosine-3'-phosphorothioate
  modified_base 23: mod_base = OTHER; note = 2'-O-methyladenosine-3'-phosphate
tttagcctatggaagaaatagaa

SEQ ID NO: 1668 - RNA, 23 nt, synthetic construct
  source 1..23: mol_type = other RNA
  modified_base 1: mod_base = OTHER; note = Vinyl-phosphonate 2'-O-methyluridine-3'-phosphorothioate
  modified_base 2: mod_base = OTHER; note = 2'-fluorouridine -3'-phosphorothioate
  modified_base 3: mod_base = OTHER; note = 2'-O-methyluridine-3'-phosphate
  modified_base 4: mod_base = OTHER; note = 2'-O-methylguanosine-3'-phosphate
  modified_base 5: mod_base = OTHER; note = 2'-O-methyluridine-3'-phosphate
  modified_base 6: mod_base = OTHER; note = 2'-fluorouridine-3'-phosphate
  modified_base 7: mod_base = OTHER; note = 2'-O-methyladenosine-3'-phosphate
  modified_base 8: mod_base = OTHER; note = 2'-fluoroadenosine-3'-phosphate
  modified_base 9: mod_base = OTHER; note = 2'-fluorocytidine-3'-phosphate
  modified_base 10: mod_base = OTHER; note = 2'-O-methyladenosine-3'-phosphate
  modified_base 11: mod_base = OTHER; note = 2'-O-methylcytidine-3'-phosphate
  modified_base 12: mod_base = OTHER; note = 2'-O-methyluridine-3'-phosphate
  modified_base 13: mod_base = OTHER; note = 2'-O-methyluridine-3'-phosphate
  modified_base 14: mod_base = OTHER; note = 2'-fluorocytidine-3'-phosphate
  modified_base 15: mod_base = OTHER; note = 2'-O-methyladenosine-3'-phosphate
  modified_base 16: mod_base = OTHER; note = 2'-fluorouridine-3'-phosphate
  modified_base 17: mod_base = OTHER; note = 2'-O-methyluridine-3'-phosphate
  modified_base 18: mod_base = OTHER; note = 2'-O-methylguanosine-3'-phosphate
  modified_base 19: mod_base = OTHER; note = 2'-O-methyladenosine-3'-phosphate
  modified_base 20: mod_base = OTHER; note = 2'-O-methyladenosine-3'-phosphate
  modified_base 21: mod_base = OTHER; note = 2'-O-methylguanosine-3'-phosphorothioate
  modified_base 22: mod_base = OTHER; note = 2'-O-methyladenosine-3'-phosphorothioate
  modified_base 23: mod_base = OTHER; note = 2'-O-methylguanosine-3'-phosphate
tttgttaacacttcattgaagag

SEQ ID NO: 1669 - RNA, 23 nt, synthetic construct
  source 1..23: mol_type = other RNA
  modified_base 1: mod_base = OTHER; note = Vinyl-phosphonate 2'-O-methyluridine-3'-phosphorothioate
  modified_base 2: mod_base = OTHER; note = 2'-fluoroguanosine-3'-phosphorothioate
  modified_base 3: mod_base = OTHER; note = 2'-O-methyladenosine-3'-phosphate
  modified_base 4: mod_base = OTHER; note = 2'-O-methyladenosine-3'-phosphate
  modified_base 5: mod_base = OTHER; note = 2'-O-methyladenosine-3'-phosphate
  modified_base 6: mod_base = OTHER; note = 2'-fluoroguanosine-3'-phosphate
  modified_base 7: mod_base = OTHER; note = 2'-O-methyluridine-3'-phosphate
  modified_base 8: mod_base = OTHER; note = 2'-fluoroadenosine-3'-phosphate
  modified_base 9: mod_base = OTHER; note = 2'-fluoroguanosine-3'-phosphate
  modified_base 10: mod_base = OTHER; note = 2'-O-methyladenosine-3'-phosphate
  modified_base 11: mod_base = OTHER; note = 2'-O-methyladenosine-3'-phosphate
  modified_base 12: mod_base = OTHER; note = 2'-O-methyluridine-3'-phosphate
  modified_base 13: mod_base = OTHER; note = 2'-O-methylguanosine-3'-phosphate
  modified_base 14: mod_base = OTHER; note = 2'-fluoroadenosine-3'-phosphate
  modified_base 15: mod_base = OTHER; note = 2'-O-methyladenosine-3'-phosphate
  modified_base 16: mod_base = OTHER; note = 2'-fluoroguanosine-3'-phosphate
  modified_base 17: mod_base = OTHER; note = 2'-O-methylguanosine-3'-phosphate
  modified_base 18: mod_base = OTHER; note = 2'-O-methylcytidine-3'-phosphate
  modified_base 19: mod_base = OTHER; note = 2'-O-methyladenosine-3'-phosphate
  modified_base 20: mod_base = OTHER; note = 2'-O-methyladenosine-3'-phosphate
  modified_base 21: mod_base = OTHER; note = 2'-O-methyladenosine-3'-phosphorothioate
  modified_base 22: mod_base = OTHER; note = 2'-O-methyladenosine-3'-phosphorothioate
  modified_base 23: mod_base = OTHER; note = 2'-O-methylcytidine-3'-phosphate
tgaaagtagaatgaaggcaaaac

SEQ ID NO: 1670 - RNA, 23 nt, synthetic construct
  source 1..23: mol_type = other RNA
  modified_base 1: mod_base = OTHER; note = Vinyl-phosphonate 2'-O-methyluridine-3'-phosphorothioate
  modified_base 2: mod_base = OTHER; note = 2'-fluorouridine -3'-phosphorothioate
  modified_base 3: mod_base = OTHER; note = 2'-O-methyluridine-3'-phosphate
  modified_base 4: mod_base = OTHER; note = 2'-O-methyluridine-3'-phosphate
  modified_base 5: mod_base = OTHER; note = 2'-O-methyladenosine-3'-phosphate
  modified_base 6: mod_base = OTHER; note = 2'-fluoroguanosine-3'-phosphate
  modified_base 7: mod_base = OTHER; note = 2'-O-methylguanosine-3'-phosphate
  modified_base 8: mod_base = OTHER; note = 2'-fluoroadenosine-3'-phosphate
  modified_base 9: mod_base = OTHER; note = 2'-fluorocytidine-3'-phosphate
  modified_base 10: mod_base = OTHER; note = 2'-O-methyladenosine-3'-phosphate
  modified_base 11: mod_base = OTHER; note = 2'-O-methyluridine-3'-phosphate
  modified_base 12: mod_base = OTHER; note = 2'-O-methyluridine-3'-phosphate
  modified_base 13: mod_base = OTHER; note = 2'-O-methyluridine-3'-phosphate
  modified_base 14: mod_base = OTHER; note = 2'-fluoroadenosine-3'-phosphate
  modified_base 15: mod_base = OTHER; note = 2'-O-methyladenosine-3'-phosphate
  modified_base 16: mod_base = OTHER; note = 2'-fluoroadenosine-3'-phosphate
  modified_base 17: mod_base = OTHER; note = 2'-O-methyladenosine-3'-phosphate
  modified_base 18: mod_base = OTHER; note = 2'-O-methyladenosine-3'-phosphate
  modified_base 19: mod_base = OTHER; note = 2'-O-methylcytidine-3'-phosphate
  modified_base 20: mod_base = OTHER; note = 2'-O-methylcytidine-3'-phosphate
  modified_base 21: mod_base = OTHER; note = 2'-O-methyluridine-3'-phosphorothioate
  modified_base 22: mod_base = OTHER; note = 2'-O-methylguanosine-3'-phosphorothioate
  modified_base 23: mod_base = OTHER; note = 2'-O-methyladenosine-3'-phosphate
ttttaggacatttaaaaacctga

SEQ ID NO: 1671 - RNA, 23 nt, synthetic construct
  source 1..23: mol_type = other RNA
  modified_base 1: mod_base = OTHER; note = Vinyl-phosphonate 2'-O-methyluridine-3'-phosphorothioate
  modified_base 2: mod_base = OTHER; note = 2'-fluorouridine -3'-phosphorothioate
  modified_base 3: mod_base = OTHER; note = 2'-O-methylguanosine-3'-phosphate
  modified_base 4: mod_base = OTHER; note = 2'-O-methyladenosine-3'-phosphate
  modified_base 5: mod_base = OTHER; note = 2'-O-methyladenosine-3'-phosphate
  modified_base 6: mod_base = OTHER; note = 2'-fluoroguanosine-3'-phosphate
  modified_base 7: mod_base = OTHER; note = 2'-O-methylguanosine-3'-phosphate
  modified_base 8: mod_base = OTHER; note = 2'-fluoroadenosine-3'-phosphate
  modified_base 9: mod_base = OTHER; note = 2'-fluorocytidine-3'-phosphate
  modified_base 10: mod_base = OTHER; note = 2'-O-methyluridine-3'-phosphate
  modified_base 11: mod_base = OTHER; note = 2'-O-methylcytidine-3'-phosphate
  modified_base 12: mod_base = OTHER; note = 2'-O-methyladenosine-3'-phosphate
  modified_base 13: mod_base = OTHER; note = 2'-O-methyladenosine-3'-phosphate
  modified_base 14: mod_base = OTHER; note = 2'-fluoroadenosine-3'-phosphate
  modified_base 15: mod_base = OTHER; note = 2'-O-methylguanosine-3'-phosphate
  modified_base 16: mod_base = OTHER; note = 2'-fluoroadenosine-3'-phosphate
  modified_base 17: mod_base = OTHER; note = 2'-O-methyluridine-3'-phosphate
  modified_base 18: mod_base = OTHER; note = 2'-O-methyladenosine-3'-phosphate
  modified_base 19: mod_base = OTHER; note = 2'-O-methyluridine-3'-phosphate
  modified_base 20: mod_base = OTHER; note = 2'-O-methyluridine-3'-phosphate
  modified_base 21: mod_base = OTHER; note = 2'-O-methylcytidine-3'-phosphorothioate
  modified_base 22: mod_base = OTHER; note = 2'-O-methyladenosine-3'-phosphorothioate
  modified_base 23: mod_base = OTHER; note = 2'-O-methylcytidine-3'-phosphate
ttgaaggactcaaagatattcac

SEQ ID NO: 1672 - RNA, 23 nt, synthetic construct
  source 1..23: mol_type = other RNA
  modified_base 1: mod_base = OTHER; note = Vinyl-phosphonate 2'-O-methyluridine-3'-phosphorothioate
  modified_base 2: mod_base = OTHER; note = 2'-fluoroadenosine-3'-phosphorothioate
  modified_base 3: mod_base = OTHER; note = 2'-O-methyluridine-3'-phosphate
  modified_base 4: mod_base = OTHER; note = 2'-O-methyluridine-3'-phosphate
  modified_base 5: mod_base = OTHER; note = 2'-O-methyladenosine-3'-phosphate
  modified_base 6: mod_base = OTHER; note = 2'-fluoroadenosine-3'-phosphate
  modified_base 7: mod_base = OTHER; note = 2'-O-methyluridine-3'-phosphate
  modified_base 8: mod_base = OTHER; note = 2'-fluorocytidine-3'-phosphate
  modified_base 9: mod_base = OTHER; note = 2'-fluorouridine-3'-phosphate
  modified_base 10: mod_base = OTHER; note = 2'-O-methyluridine-3'-phosphate
  modified_base 11: mod_base = OTHER; note = 2'-O-methyluridine-3'-phosphate
  modified_base 12: mod_base = OTHER; note = 2'-O-methylguanosine-3'-phosphate
  modified_base 13: mod_base = OTHER; note = 2'-O-methylguanosine-3'-phosphate
  modified_base 14: mod_base = OTHER; note = 2'-fluoroadenosine-3'-phosphate
  modified_base 15: mod_base = OTHER; note = 2'-O-methyladenosine-3'-phosphate
  modified_base 16: mod_base = OTHER; note = 2'-fluoroguanosine-3'-phosphate
  modified_base 17: mod_base = OTHER; note = 2'-O-methyluridine-3'-phosphate
  modified_base 18: mod_base = OTHER; note = 2'-O-methylguanosine-3'-phosphate
  modified_base 19: mod_base = OTHER; note = 2'-O-methyluridine-3'-phosphate
  modified_base 20: mod_base = OTHER; note = 2'-O-methyluridine-3'-phosphate
  modified_base 21: mod_base = OTHER; note = 2'-O-methylcytidine-3'-phosphorothioate
  modified_base 22: mod_base = OTHER; note = 2'-O-methyladenosine-3'-phosphorothioate
  modified_base 23: mod_base = OTHER; note = 2'-O-methylguanosine-3'-phosphate
tattaatctttggaagtgttcag

SEQ ID NO: 1673 - RNA, 23 nt, synthetic construct
  source 1..23: mol_type = other RNA
  modified_base 1: mod_base = OTHER; note = Vinyl-phosphonate 2'-O-methyluridine-3'-phosphorothioate
  modified_base 2: mod_base = OTHER; note = 2'-fluoroadenosine-3'-phosphorothioate
  modified_base 3: mod_base = OTHER; note = 2'-O-methyluridine-3'-phosphate
  modified_base 4: mod_base = OTHER; note = 2'-O-methyluridine-3'-phosphate
  modified_base 5: mod_base = OTHER; note = 2'-O-methyluridine-3'-phosphate
  modified_base 6: mod_base = OTHER; note = 2'-fluoroguanosine-3'-phosphate
  modified_base 7: mod_base = OTHER; note = 2'-O-methyluridine-3'-phosphate
  modified_base 8: mod_base = OTHER; note = 2'-fluorouridine-3'-phosphate
  modified_base 9: mod_base = OTHER; note = 2'-fluoroadenosine-3'-phosphate
  modified_base 10: mod_base = OTHER; note = 2'-O-methylguanosine-3'-phosphate
  modified_base 11: mod_base = OTHER; note = 2'-O-methyladenosine-3'-phosphate
  modified_base 12: mod_base = OTHER; note = 2'-O-methylcytidine-3'-phosphate
  modified_base 13: mod_base = OTHER; note = 2'-O-methyladenosine-3'-phosphate
  modified_base 14: mod_base = OTHER; note = 2'-fluoroadenosine-3'-phosphate
  modified_base 15: mod_base = OTHER; note = 2'-O-methyladenosine-3'-phosphate
  modified_base 16: mod_base = OTHER; note = 2'-fluoroadenosine-3'-phosphate
  modified_base 17: mod_base = OTHER; note = 2'-O-methyluridine-3'-phosphate
  modified_base 18: mod_base = OTHER; note = 2'-O-methyluridine-3'-phosphate
  modified_base 19: mod_base = OTHER; note = 2'-O-methyluridine-3'-phosphate
  modified_base 20: mod_base = OTHER; note = 2'-O-methyladenosine-3'-phosphate
  modified_base 21: mod_base = OTHER; note = 2'-O-methylguanosine-3'-phosphorothioate
  modified_base 22: mod_base = OTHER; note = 2'-O-methylguanosine-3'-phosphorothioate
  modified_base 23: mod_base = OTHER; note = 2'-O-methylcytidine-3'-phosphate
tatttgttagacaaaatttaggc

SEQ ID NO: 1674 - RNA, 23 nt, synthetic construct
  source 1..23: mol_type = other RNA
  modified_base 1: mod_base = OTHER; note = Vinyl-phosphonate 2'-O-methyluridine-3'-phosphorothioate
  modified_base 2: mod_base = OTHER; note = 2'-fluoroadenosine-3'-phosphorothioate
  modified_base 3: mod_base = OTHER; note = 2'-O-methylguanosine-3'-phosphate
  modified_base 4: mod_base = OTHER; note = 2'-O-methylcytidine-3'-phosphate
  modified_base 5: mod_base = OTHER; note = 2'-O-methyladenosine-3'-phosphate
  modified_base 6: mod_base = OTHER; note = 2'-fluoroadenosine-3'-phosphate
  modified_base 7: mod_base = OTHER; note = 2'-O-methyluridine-3'-phosphate
  modified_base 8: mod_base = OTHER; note = 2'-fluorouridine-3'-phosphate
  modified_base 9: mod_base = OTHER; note = 2'-fluorouridine-3'-phosphate
  modified_base 10: mod_base = OTHER; note = 2'-O-methyluridine-3'-phosphate
  modified_base 11: mod_base = OTHER; note = 2'-O-methyladenosine-3'-phosphate
  modified_base 12: mod_base = OTHER; note = 2'-O-methyladenosine-3'-phosphate
  modified_base 13: mod_base = OTHER; note = 2'-O-methylguanosine-3'-phosphate
  modified_base 14: mod_base = OTHER; note = 2'-fluorouridine-3'-phosphate
  modified_base 15: mod_base = OTHER; note = 2'-O-methyluridine-3'-phosphate
  modified_base 16: mod_base = OTHER; note = 2'-fluoroguanosine-3'-phosphate
  modified_base 17: mod_base = OTHER; note = 2'-O-methyluridine-3'-phosphate
  modified_base 18: mod_base = OTHER; note = 2'-O-methyluridine-3'-phosphate
  modified_base 19: mod_base = OTHER; note = 2'-O-methyluridine-3'-phosphate
  modified_base 20: mod_base = OTHER; note = 2'-O-methyladenosine-3'-phosphate
  modified_base 21: mod_base = OTHER; note = 2'-O-methylcytidine-3'-phosphorothioate
  modified_base 22: mod_base = OTHER; note = 2'-O-methyluridine-3'-phosphorothioate
  modified_base 23: mod_base = OTHER; note = 2'-O-methylcytidine-3'-phosphate
tagcaattttaagttgtttactc

SEQ ID NO: 1675 - RNA, 23 nt, synthetic construct
  source 1..23: mol_type = other RNA
  modified_base 1: mod_base = OTHER; note = Vinyl-phosphonate 2'-O-methyluridine-3'-phosphorothioate
  modified_base 2: mod_base = OTHER; note = 2'-fluorocytidine-3'-phosphorothioate
  modified_base 3: mod_base = OTHER; note = 2'-O-methyluridine-3'-phosphate
  modified_base 4: mod_base = OTHER; note = 2'-O-methylguanosine-3'-phosphate
  modified_base 5: mod_base = OTHER; note = 2'-O-methyladenosine-3'-phosphate
  modified_base 6: mod_base = OTHER; note = 2'-fluoroguanosine-3'-phosphate
  modified_base 7: mod_base = OTHER; note = 2'-O-methyluridine-3'-phosphate
  modified_base 8: mod_base = OTHER; note = 2'-fluoroguanosine-3'-phosphate
  modified_base 9: mod_base = OTHER; note = 2'-fluoroadenosine-3'-phosphate
  modified_base 10: mod_base = OTHER; note = 2'-O-methylguanosine-3'-phosphate
  modified_base 11: mod_base = OTHER; note = 2'-O-methyluridine-3'-phosphate
  modified_base 12: mod_base = OTHER; note = 2'-O-methyladenosine-3'-phosphate
  modified_base 13: mod_base = OTHER; note = 2'-O-methyladenosine-3'-phosphate
  modified_base 14: mod_base = OTHER; note = 2'-fluoroadenosine-3'-phosphate
  modified_base 15: mod_base = OTHER; note = 2'-O-methyluridine-3'-phosphate
  modified_base 16: mod_base = OTHER; note = 2'-fluorouridine-3'-phosphate
  modified_base 17: mod_base = OTHER; note = 2'-O-methyladenosine-3'-phosphate
  modified_base 18: mod_base = OTHER; note = 2'-O-methyluridine-3'-phosphate
  modified_base 19: mod_base = OTHER; note = 2'-O-methyluridine-3'-phosphate
  modified_base 20: mod_base = OTHER; note = 2'-O-methyluridine-3'-phosphate
  modified_base 21: mod_base = OTHER; note = 2'-O-methyluridine-3'-phosphorothioate
  modified_base 22: mod_base = OTHER; note = 2'-O-methyladenosine-3'-phosphorothioate
  modified_base 23: mod_base = OTHER; note = 2'-O-methylguanosine-3'-phosphate
tctgagtgagtaaattattttag

SEQ ID NO: 1676 - RNA, 23 nt, synthetic construct
  source 1..23: mol_type = other RNA
  modified_base 1: mod_base = OTHER; note = Vinyl-phosphonate 2'-O-methyluridine-3'-phosphorothioate
  modified_base 2: mod_base = OTHER; note = 2'-fluoroadenosine-3'-phosphorothioate
  modified_base 3: mod_base = OTHER; note = 2'-O-methylguanosine-3'-phosphate
  modified_base 4: mod_base = OTHER; note = 2'-O-methyladenosine-3'-phosphate
  modified_base 5: mod_base = OTHER; note = 2'-O-methylcytidine-3'-phosphate
  modified_base 6: mod_base = OTHER; note = 2'-fluorocytidine-3'-phosphate
  modified_base 7: mod_base = OTHER; note = 2'-O-methyladenosine-3'-phosphate
  modified_base 8: mod_base = OTHER; note = 2'-fluoroadenosine-3'-phosphate
  modified_base 9: mod_base = OTHER; note = 2'-fluorocytidine-3'-phosphate
  modified_base 10: mod_base = OTHER; note = 2'-O-methyladenosine-3'-phosphate
  modified_base 11: mod_base = OTHER; note = 2'-O-methylguanosine-3'-phosphate
  modified_base 12: mod_base = OTHER; note = 2'-O-methyladenosine-3'-phosphate
  modified_base 13: mod_base = OTHER; note = 2'-O-methyladenosine-3'-phosphate
  modified_base 14: mod_base = OTHER; note = 2'-fluorouridine-3'-phosphate
  modified_base 15: mod_base = OTHER; note = 2'-O-methyladenosine-3'-phosphate
  modified_base 16: mod_base = OTHER; note = 2'-fluoroguanosine-3'-phosphate
  modified_base 17: mod_base = OTHER; note = 2'-O-methyladenosine-3'-phosphate
  modified_base 18: mod_base = OTHER; note = 2'-O-methyluridine-3'-phosphate
  modified_base 19: mod_base = OTHER; note = 2'-O-methylguanosine-3'-phosphate
  modified_base 20: mod_base = OTHER; note = 2'-O-methyluridine-3'-phosphate
  modified_base 21: mod_base = OTHER; note = 2'-O-methylcytidine-3'-phosphorothioate
  modified_base 22: mod_base = OTHER; note = 2'-O-methyladenosine-3'-phosphorothioate
  modified_base 23: mod_base = OTHER; note = 2'-O-methylguanosine-3'-phosphate
tagaccaacagaatagatgtcag

SEQ ID NO: 1677 - RNA, 23 nt, synthetic construct
  source 1..23: mol_type = other RNA
  modified_base 1: mod_base = OTHER; note = Vinyl-phosphonate 2'-O-methyluridine-3'-phosphorothioate
  modified_base 2: mod_base = OTHER; note = 2'-fluoroadenosine-3'-phosphorothioate
  modified_base 3: mod_base = OTHER; note = 2'-O-methyladenosine-3'-phosphate
  modified_base 4: mod_base = OTHER; note = 2'-O-methyluridine-3'-phosphate
  modified_base 5: mod_base = OTHER; note = 2'-O-methyladenosine-3'-phosphate
  modified_base 6: mod_base = OTHER; note = 2'-fluorouridine-3'-phosphate
  modified_base 7: mod_base = OTHER; note = 2'-O-methyladenosine-3'-phosphate
  modified_base 8: mod_base = OTHER; note = 2'-fluoroadenosine-3'-phosphate
  modified_base 9: mod_base = OTHER; note = 2'-fluoroguanosine-3'-phosphate
  modified_base 10: mod_base = OTHER; note = 2'-O-methyladenosine-3'-phosphate
  modified_base 11: mod_base = OTHER; note = 2'-O-methylcytidine-3'-phosphate
  modified_base 12: mod_base = OTHER; note = 2'-O-methyluridine-3'-phosphate
  modified_base 13: mod_base = OTHER; note = 2'-O-methyladenosine-3'-phosphate
  modified_base 14: mod_base = OTHER; note = 2'-fluorocytidine-3'-phosphate
  modified_base 15: mod_base = OTHER; note = 2'-O-methyluridine-3'-phosphate
  modified_base 16: mod_base = OTHER; note = 2'-fluorocytidine-3'-phosphate
  modified_base 17: mod_base = OTHER; note = 2'-O-methyladenosine-3'-phosphate
  modified_base 18: mod_base = OTHER; note = 2'-O-methylguanosine-3'-phosphate
  modified_base 19: mod_base = OTHER; note = 2'-O-methyluridine-3'-phosphate
  modified_base 20: mod_base = OTHER; note = 2'-O-methyluridine-3'-phosphate
  modified_base 21: mod_base = OTHER; note = 2'-O-methyladenosine-3'-phosphorothioate
  modified_base 22: mod_base = OTHER; note = 2'-O-methylguanosine-3'-phosphorothioate
  modified_base 23: mod_base = OTHER; note = 2'-O-methylguanosine-3'-phosphate
taatataagactactcagttagg

SEQ ID NO: 1678 - RNA, 23 nt, synthetic construct
  source 1..23: mol_type = other RNA
  modified_base 1: mod_base = OTHER; note = Vinyl-phosphonate 2'-O-methyluridine-3'-phosphorothioate
  modified_base 2: mod_base = OTHER; note = 2'-fluorouridine -3'-phosphorothioate
  modified_base 3: mod_base = OTHER; note = 2'-O-methyluridine-3'-phosphate
  modified_base 4: mod_base = OTHER; note = 2'-O-methyladenosine-3'-phosphate
  modified_base 5: mod_base = OTHER; note = 2'-O-methylguanosine-3'-phosphate
  modified_base 6: mod_base = OTHER; note = 2'-fluoroadenosine-3'-phosphate
  modified_base 7: mod_base = OTHER; note = 2'-O-methyladenosine-3'-phosphate
  modified_base 8: mod_base = OTHER; note = 2'-fluoroguanosine-3'-phosphate
  modified_base 9: mod_base = OTHER; note = 2'-fluoroguanosine-3'-phosphate
  modified_base 10: mod_base = OTHER; note = 2'-O-methylcytidine-3'-phosphate
  modified_base 11: mod_base = OTHER; note = 2'-O-methyluridine-3'-phosphate
  modified_base 12: mod_base = OTHER; note = 2'-O-methyladenosine-3'-phosphate
  modified_base 13: mod_base = OTHER; note = 2'-O-methyladenosine-3'-phosphate
  modified_base 14: mod_base = OTHER; note = 2'-fluoroadenosine-3'-phosphate
  modified_base 15: mod_base = OTHER; note = 2'-O-methyluridine-3'-phosphate
  modified_base 16: mod_base = OTHER; note = 2'-fluorouridine-3'-phosphate
  modified_base 17: mod_base = OTHER; note = 2'-O-methylcytidine-3'-phosphate
  modified_base 18: mod_base = OTHER; note = 2'-O-methylcytidine-3'-phosphate
  modified_base 19: mod_base = OTHER; note = 2'-O-methyladenosine-3'-phosphate
  modified_base 20: mod_base = OTHER; note = 2'-O-methylguanosine-3'-phosphate
  modified_base 21: mod_base = OTHER; note = 2'-O-methyladenosine-3'-phosphorothioate
  modified_base 22: mod_base = OTHER; note = 2'-O-methylcytidine-3'-phosphorothioate
  modified_base 23: mod_base = OTHER; note = 2'-O-methylguanosine-3'-phosphate
tttagaaggctaaattccagacg

SEQ ID NO: 1679 - RNA, 23 nt, synthetic construct
  source 1..23: mol_type = other RNA
  modified_base 1: mod_base = OTHER; note = Vinyl-phosphonate 2'-O-methyluridine-3'-phosphorothioate
  modified_base 2: mod_base = OTHER; note = 2'-fluorouridine -3'-phosphorothioate
  modified_base 3: mod_base = OTHER; note = 2'-O-methyluridine-3'-phosphate
  modified_base 4: mod_base = OTHER; note = 2'-O-methylcytidine-3'-phosphate
  modified_base 5: mod_base = OTHER; note = 2'-O-methyladenosine-3'-phosphate
  modified_base 6: mod_base = OTHER; note = 2'-fluoroadenosine-3'-phosphate
  modified_base 7: mod_base = OTHER; note = 2'-O-methylguanosine-3'-phosphate
  modified_base 8: mod_base = OTHER; note = 2'-fluoroadenosine-3'-phosphate
  modified_base 9: mod_base = OTHER; note = 2'-fluoroguanosine-3'-phosphate
  modified_base 10: mod_base = OTHER; note = 2'-O-methyluridine-3'-phosphate
  modified_base 11: mod_base = OTHER; note = 2'-O-methyluridine-3'-phosphate
  modified_base 12: mod_base = OTHER; note = 2'-O-methylcytidine-3'-phosphate
  modified_base 13: mod_base = OTHER; note = 2'-O-methyladenosine-3'-phosphate
  modified_base 14: mod_base = OTHER; note = 2'-fluoroadenosine-3'-phosphate
  modified_base 15: mod_base = OTHER; note = 2'-O-methylguanosine-3'-phosphate
  modified_base 16: mod_base = OTHER; note = 2'-fluoroguanosine-3'-phosphate
  modified_base 17: mod_base = OTHER; note = 2'-O-methylcytidine-3'-phosphate
  modified_base 18: mod_base = OTHER; note = 2'-O-methyladenosine-3'-phosphate
  modified_base 19: mod_base = OTHER; note = 2'-O-methyluridine-3'-phosphate
  modified_base 20: mod_base = OTHER; note = 2'-O-methylguanosine-3'-phosphate
  modified_base 21: mod_base = OTHER; note = 2'-O-methyluridine-3'-phosphorothioate
  modified_base 22: mod_base = OTHER; note = 2'-O-methyluridine-3'-phosphorothioate
  modified_base 23: mod_base = OTHER; note = 2'-O-methyluridine-3'-phosphate
tttcaagagttcaaggcatgttt

SEQ ID NO: 1680 - RNA, 23 nt, synthetic construct
  source 1..23: mol_type = other RNA
  modified_base 1: mod_base = OTHER; note = Vinyl-phosphonate 2'-O-methyluridine-3'-phosphorothioate
  modified_base 2: mod_base = OTHER; note = 2'-fluoroadenosine-3'-phosphorothioate
  modified_base 3: mod_base = OTHER; note = 2'-O-methyladenosine-3'-phosphate
  modified_base 4: mod_base = OTHER; note = 2'-O-methylguanosine-3'-phosphate
  modified_base 5: mod_base = OTHER; note = 2'-O-methyluridine-3'-phosphate
  modified_base 6: mod_base = OTHER; note = 2'-fluoroguanosine-3'-phosphate
  modified_base 7: mod_base = OTHER; note = 2'-O-methylcytidine-3'-phosphate
  modified_base 8: mod_base = OTHER; note = 2'-fluoroadenosine-3'-phosphate
  modified_base 9: mod_base = OTHER; note = 2'-fluoroadenosine-3'-phosphate
  modified_base 10: mod_base = OTHER; note = 2'-O-methylguanosine-3'-phosphate
  modified_base 11: mod_base = OTHER; note = 2'-O-methyladenosine-3'-phosphate
  modified_base 12: mod_base = OTHER; note = 2'-O-methyladenosine-3'-phosphate
  modified_base 13: mod_base = OTHER; note = 2'-O-methylguanosine-3'-phosphate
  modified_base 14: mod_base = OTHER; note = 2'-fluorouridine-3'-phosphate
  modified_base 15: mod_base = OTHER; note = 2'-O-methylguanosine-3'-phosphate
  modified_base 16: mod_base = OTHER; note = 2'-fluorocytidine-3'-phosphate
  modified_base 17: mod_base = OTHER; note = 2'-O-methyluridine-3'-phosphate
  modified_base 18: mod_base = OTHER; note = 2'-O-methyluridine-3'-phosphate
  modified_base 19: mod_base = OTHER; note = 2'-O-methylguanosine-3'-phosphate
  modified_base 20: mod_base = OTHER; note = 2'-O-methyladenosine-3'-phosphate
  modified_base 21: mod_base = OTHER; note = 2'-O-methyluridine-3'-phosphorothioate
  modified_base 22: mod_base = OTHER; note = 2'-O-methyluridine-3'-phosphorothioate
  modified_base 23: mod_base = OTHER; note = 2'-O-methyluridine-3'-phosphate
taagtgcaagaagtgcttgattt

SEQ ID NO: 1681 - RNA, 23 nt, synthetic construct
  source 1..23: mol_type = other RNA
  modified_base 1: mod_base = OTHER; note = Vinyl-phosphonate 2'-O-methyluridine-3'-phosphorothioate
  modified_base 2: mod_base = OTHER; note = 2'-fluoroguanosine-3'-phosphorothioate
  modified_base 3: mod_base = OTHER; note = 2'-O-methyluridine-3'-phosphate
  modified_base 4: mod_base = OTHER; note = 2'-O-methyladenosine-3'-phosphate
  modified_base 5: mod_base = OTHER; note = 2'-O-methyluridine-3'-phosphate
  modified_base 6: mod_base = OTHER; note = 2'-fluoroadenosine-3'-phosphate
  modified_base 7: mod_base = OTHER; note = 2'-O-methyladenosine-3'-phosphate
  modified_base 8: mod_base = OTHER; note = 2'-fluoroadenosine-3'-phosphate
  modified_base 9: mod_base = OTHER; note = 2'-fluoroguanosine-3'-phosphate
  modified_base 10: mod_base = OTHER; note = 2'-O-methyladenosine-3'-phosphate
  modified_base 11: mod_base = OTHER; note = 2'-O-methyluridine-3'-phosphate
  modified_base 12: mod_base = OTHER; note = 2'-O-methylguanosine-3'-phosphate
  modified_base 13: mod_base = OTHER; note = 2'-O-methyladenosine-3'-phosphate
  modified_base 14: mod_base = OTHER; note = 2'-fluoroadenosine-3'-phosphate
  modified_base 15: mod_base = OTHER; note = 2'-O-methyladenosine-3'-phosphate
  modified_base 16: mod_base = OTHER; note = 2'-fluoroadenosine-3'-phosphate
  modified_base 17: mod_base = OTHER; note = 2'-O-methylguanosine-3'-phosphate
  modified_base 18: mod_base = OTHER; note = 2'-O-methylcytidine-3'-phosphate
  modified_base 19: mod_base = OTHER; note = 2'-O-methyladenosine-3'-phosphate
  modified_base 20: mod_base = OTHER; note = 2'-O-methyladenosine-3'-phosphate
  modified_base 21: mod_base = OTHER; note = 2'-O-methylguanosine-3'-phosphorothioate
  modified_base 22: mod_base = OTHER; note = 2'-O-methyluridine-3'-phosphorothioate
  modified_base 23: mod_base = OTHER; note = 2'-O-methylguanosine-3'-phosphate
tgtataaagatgaaaagcaagtg

SEQ ID NO: 1682 - RNA, 23 nt, synthetic construct
  source 1..23: mol_type = other RNA
  modified_base 1: mod_base = OTHER; note = Vinyl-phosphonate 2'-O-methyluridine-3'-phosphorothioate
  modified_base 2: mod_base = OTHER; note = 2'-fluoroguanosine-3'-phosphorothioate
  modified_base 3: mod_base = OTHER; note = 2'-O-methyladenosine-3'-phosphate
  modified_base 4: mod_base = OTHER; note = 2'-O-methyluridine-3'-phosphate
  modified_base 5: mod_base = OTHER; note = 2'-O-methyladenosine-3'-phosphate
  modified_base 6: mod_base = OTHER; note = 2'-fluorouridine-3'-phosphate
  modified_base 7: mod_base = OTHER; note = 2'-O-methyluridine-3'-phosphate
  modified_base 8: mod_base = OTHER; note = 2'-fluoroadenosine-3'-phosphate
  modified_base 9: mod_base = OTHER; note = 2'-fluorocytidine-3'-phosphate
  modified_base 10: mod_base = OTHER; note = 2'-O-methyladenosine-3'-phosphate
  modified_base 11: mod_base = OTHER; note = 2'-O-methyluridine-3'-phosphate
  modified_base 12: mod_base = OTHER; note = 2'-O-methyladenosine-3'-phosphate
  modified_base 13: mod_base = OTHER; note = 2'-O-methylguanosine-3'-phosphate
  modified_base 14: mod_base = OTHER; note = 2'-fluoroguanosine-3'-phosphate
  modified_base 15: mod_base = OTHER; note = 2'-O-methylguanosine-3'-phosphate
  modified_base 16: mod_base = OTHER; note = 2'-fluoroadenosine-3'-phosphate
  modified_base 17: mod_base = OTHER; note = 2'-O-methylguanosine-3'-phosphate
  modified_base 18: mod_base = OTHER; note = 2'-O-methyladenosine-3'-phosphate
  modified_base 19: mod_base = OTHER; note = 2'-O-methyladenosine-3'-phosphate
  modified_base 20: mod_base = OTHER; note = 2'-O-methyladenosine-3'-phosphate
  modified_base 21: mod_base = OTHER; note = 2'-O-methyladenosine-3'-phosphorothioate
  modified_base 22: mod_base = OTHER; note = 2'-O-methylguanosine-3'-phosphorothioate
  modified_base 23: mod_base = OTHER; note = 2'-O-methylcytidine-3'-phosphate
tgatattacatagggagaaaagc

SEQ ID NO: 1683 - RNA, 23 nt, synthetic construct
  source 1..23: mol_type = other RNA
  modified_base 1: mod_base = OTHER; note = Vinyl-phosphonate 2'-O-methyluridine-3'-phosphorothioate
  modified_base 2: mod_base = OTHER; note = 2'-fluorouridine -3'-phosphorothioate
  modified_base 3: mod_base = OTHER; note = 2'-O-methyluridine-3'-phosphate
  modified_base 4: mod_base = OTHER; note = 2'-O-methyluridine-3'-phosphate
  modified_base 5: mod_base = OTHER; note = 2'-O-methyladenosine-3'-phosphate
  modified_base 6: mod_base = OTHER; note = 2'-fluoroguanosine-3'-phosphate
  modified_base 7: mod_base = OTHER; note = 2'-O-methyladenosine-3'-phosphate
  modified_base 8: mod_base = OTHER; note = 2'-fluorocytidine-3'-phosphate
  modified_base 9: mod_base = OTHER; note = 2'-fluoroadenosine-3'-phosphate
  modified_base 10: mod_base = OTHER; note = 2'-O-methyluridine-3'-phosphate
  modified_base 11: mod_base = OTHER; note = 2'-O-methyladenosine-3'-phosphate
  modified_base 12: mod_base = OTHER; note = 2'-O-methylguanosine-3'-phosphate
  modified_base 13: mod_base = OTHER; note = 2'-O-methyladenosine-3'-phosphate
  modified_base 14: mod_base = OTHER; note = 2'-fluoroadenosine-3'-phosphate
  modified_base 15: mod_base = OTHER; note = 2'-O-methylguanosine-3'-phosphate
  modified_base 16: mod_base = OTHER; note = 2'-fluoroadenosine-3'-phosphate
  modified_base 17: mod_base = OTHER; note = 2'-O-methyladenosine-3'-phosphate
  modified_base 18: mod_base = OTHER; note = 2'-O-methyladenosine-3'-phosphate
  modified_base 19: mod_base = OTHER; note = 2'-O-methylguanosine-3'-phosphate
  modified_base 20: mod_base = OTHER; note = 2'-O-methylcytidine-3'-phosphate
  modified_base 21: mod_base = OTHER; note = 2'-O-methyladenosine-3'-phosphorothioate
  modified_base 22: mod_base = OTHER; note = 2'-O-methyluridine-3'-phosphorothioate
  modified_base 23: mod_base = OTHER; note = 2'-O-methyladenosine-3'-phosphate
ttttagacatagaagaaagcata

SEQ ID NO: 1684 - RNA, 23 nt, synthetic construct
  source 1..23: mol_type = other RNA
  modified_base 1: mod_base = OTHER; note = Vinyl-phosphonate 2'-O-methyluridine-3'-phosphorothioate
  modified_base 2: mod_base = OTHER; note = 2'-fluoroadenosine-3'-phosphorothioate
  modified_base 3: mod_base = OTHER; note = 2'-O-methylguanosine-3'-phosphate
  modified_base 4: mod_base = OTHER; note = 2'-O-methyladenosine-3'-phosphate
  modified_base 5: mod_base = OTHER; note = 2'-O-methylcytidine-3'-phosphate
  modified_base 6: mod_base = OTHER; note = 2'-fluoroguanosine-3'-phosphate
  modified_base 7: mod_base = OTHER; note = 2'-O-methyladenosine-3'-phosphate
  modified_base 8: mod_base = OTHER; note = 2'-fluorouridine-3'-phosphate
  modified_base 9: mod_base = OTHER; note = 2'-fluorouridine-3'-phosphate
  modified_base 10: mod_base = OTHER; note = 2'-O-methyluridine-3'-phosphate
  modified_base 11: mod_base = OTHER; note = 2'-O-methylguanosine-3'-phosphate
  modified_base 12: mod_base = OTHER; note = 2'-O-methylcytidine-3'-phosphate
  modified_base 13: mod_base = OTHER; note = 2'-O-methyluridine-3'-phosphate
  modified_base 14: mod_base = OTHER; note = 2'-fluoroadenosine-3'-phosphate
  modified_base 15: mod_base = OTHER; note = 2'-O-methyladenosine-3'-phosphate
  modified_base 16: mod_base = OTHER; note = 2'-fluoroguanosine-3'-phosphate
  modified_base 17: mod_base = OTHER; note = 2'-O-methylcytidine-3'-phosphate
  modified_base 18: mod_base = OTHER; note = 2'-O-methyladenosine-3'-phosphate
  modified_base 19: mod_base = OTHER; note = 2'-O-methylguanosine-3'-phosphate
  modified_base 20: mod_base = OTHER; note = 2'-O-methylguanosine-3'-phosphate
  modified_base 21: mod_base = OTHER; note = 2'-O-methyluridine-3'-phosphorothioate
  modified_base 22: mod_base = OTHER; note = 2'-O-methyluridine-3'-phosphorothioate
  modified_base 23: mod_base = OTHER; note = 2'-O-methylcytidine-3'-phosphate
tagacgatttgctaagcaggttc

SEQ ID NO: 1685 - RNA, 23 nt, synthetic construct
  source 1..23: mol_type = other RNA
  modified_base 1: mod_base = OTHER; note = Vinyl-phosphonate 2'-O-methyluridine-3'-phosphorothioate
  modified_base 2: mod_base = OTHER; note = 2'-fluoroguanosine-3'-phosphorothioate
  modified_base 3: mod_base = OTHER; note = 2'-O-methyluridine-3'-phosphate
  modified_base 4: mod_base = OTHER; note = 2'-O-methylguanosine-3'-phosphate
  modified_base 5: mod_base = OTHER; note = 2'-O-methyladenosine-3'-phosphate
  modified_base 6: mod_base = OTHER; note = 2'-fluoroadenosine-3'-phosphate
  modified_base 7: mod_base = OTHER; note = 2'-O-methyladenosine-3'-phosphate
  modified_base 8: mod_base = OTHER; note = 2'-fluoroguanosine-3'-phosphate
  modified_base 9: mod_base = OTHER; note = 2'-fluoroguanosine-3'-phosphate
  modified_base 10: mod_base = OTHER; note = 2'-O-methylguanosine-3'-phosphate
  modified_base 11: mod_base = OTHER; note = 2'-O-methyluridine-3'-phosphate
  modified_base 12: mod_base = OTHER; note = 2'-O-methyladenosine-3'-phosphate
  modified_base 13: mod_base = OTHER; note = 2'-O-methylguanosine-3'-phosphate
  modified_base 14: mod_base = OTHER; note = 2'-fluoroadenosine-3'-phosphate
  modified_base 15: mod_base = OTHER; note = 2'-O-methylguanosine-3'-phosphate
  modified_base 16: mod_base = OTHER; note = 2'-fluoroguanosine-3'-phosphate
  modified_base 17: mod_base = OTHER; note = 2'-O-methyladenosine-3'-phosphate
  modified_base 18: mod_base = OTHER; note = 2'-O-methyladenosine-3'-phosphate
  modified_base 19: mod_base = OTHER; note = 2'-O-methyluridine-3'-phosphate
  modified_base 20: mod_base = OTHER; note = 2'-O-methyladenosine-3'-phosphate
  modified_base 21: mod_base = OTHER; note = 2'-O-methyluridine-3'-phosphorothioate
  modified_base 22: mod_base = OTHER; note = 2'-O-methylcytidine-3'-phosphorothioate
  modified_base 23: mod_base = OTHER; note = 2'-O-methyluridine-3'-phosphate
tgtgaaagggtagaggaatatct

SEQ ID NO: 1686 - RNA, 23 nt, synthetic construct
  source 1..23: mol_type = other RNA
  modified_base 1: mod_base = OTHER; note = Vinyl-phosphonate 2'-O-methyluridine-3'-phosphorothioate
  modified_base 2: mod_base = OTHER; note = 2'-fluoroadenosine-3'-phosphorothioate
  modified_base 3: mod_base = OTHER; note = 2'-O-methyladenosine-3'-phosphate
  modified_base 4: mod_base = OTHER; note = 2'-O-methyladenosine-3'-phosphate
  modified_base 5: mod_base = OTHER; note = 2'-O-methylcytidine-3'-phosphate
  modified_base 6: mod_base = OTHER; note = 2'-fluorocytidine-3'-phosphate
  modified_base 7: mod_base = OTHER; note = 2'-O-methylcytidine-3'-phosphate
  modified_base 8: mod_base = OTHER; note = 2'-fluoroadenosine-3'-phosphate
  modified_base 9: mod_base = OTHER; note = 2'-fluoroadenosine-3'-phosphate
  modified_base 10: mod_base = OTHER; note = 2'-O-methyladenosine-3'-phosphate
  modified_base 11: mod_base = OTHER; note = 2'-O-methylguanosine-3'-phosphate
  modified_base 12: mod_base = OTHER; note = 2'-O-methyladenosine-3'-phosphate
  modified_base 13: mod_base = OTHER; note = 2'-O-methyladenosine-3'-phosphate
  modified_base 14: mod_base = OTHER; note = 2'-fluoroadenosine-3'-phosphate
  modified_base 15: mod_base = OTHER; note = 2'-O-methyladenosine-3'-phosphate
  modified_base 16: mod_base = OTHER; note = 2'-fluoroguanosine-3'-phosphate
  modified_base 17: mod_base = OTHER; note = 2'-O-methyluridine-3'-phosphate
  modified_base 18: mod_base = OTHER; note = 2'-O-methylguanosine-3'-phosphate
  modified_base 19: mod_base = OTHER; note = 2'-O-methylguanosine-3'-phosphate
  modified_base 20: mod_base = OTHER; note = 2'-O-methylguanosine-3'-phosphate
  modified_base 21: mod_base = OTHER; note = 2'-O-methyladenosine-3'-phosphorothioate
  modified_base 22: mod_base = OTHER; note = 2'-O-methyluridine-3'-phosphorothioate
  modified_base 23: mod_base = OTHER; note = 2'-O-methyluridine-3'-phosphate
taaacccaaagaaaagtgggatt

SEQ ID NO: 1687 - RNA, 23 nt, synthetic construct
  source 1..23: mol_type = other RNA
  modified_base 1: mod_base = OTHER; note = Vinyl-phosphonate 2'-O-methyluridine-3'-phosphorothioate
  modified_base 2: mod_base = OTHER; note = 2'-fluorouridine -3'-phosphorothioate
  modified_base 3: mod_base = OTHER; note = 2'-O-methyladenosine-3'-phosphate
  modified_base 4: mod_base = OTHER; note = 2'-O-methyladenosine-3'-phosphate
  modified_base 5: mod_base = OTHER; note = 2'-O-methylguanosine-3'-phosphate
  modified_base 6: mod_base = OTHER; note = 2'-fluorouridine-3'-phosphate
  modified_base 7: mod_base = OTHER; note = 2'-O-methyladenosine-3'-phosphate
  modified_base 8: mod_base = OTHER; note = 2'-fluorouridine-3'-phosphate
  modified_base 9: mod_base = OTHER; note = 2'-fluoroadenosine-3'-phosphate
  modified_base 10: mod_base = OTHER; note = 2'-O-methyluridine-3'-phosphate
  modified_base 11: mod_base = OTHER; note = 2'-O-methyladenosine-3'-phosphate
  modified_base 12: mod_base = OTHER; note = 2'-O-methylcytidine-3'-phosphate
  modified_base 13: mod_base = OTHER; note = 2'-O-methyladenosine-3'-phosphate
  modified_base 14: mod_base = OTHER; note = 2'-fluoroadenosine-3'-phosphate
  modified_base 15: mod_base = OTHER; note = 2'-O-methylguanosine-3'-phosphate
  modified_base 16: mod_base = OTHER; note = 2'-fluoroadenosine-3'-phosphate
  modified_base 17: mod_base = OTHER; note = 2'-O-methyladenosine-3'-phosphate
  modified_base 18: mod_base = OTHER; note = 2'-O-methylguanosine-3'-phosphate
  modified_base 19: mod_base = OTHER; note = 2'-O-methylcytidine-3'-phosphate
  modified_base 20: mod_base = OTHER; note = 2'-O-methylcytidine-3'-phosphate
  modified_base 21: mod_base = OTHER; note = 2'-O-methyluridine-3'-phosphorothioate
  modified_base 22: mod_base = OTHER; note = 2'-O-methylguanosine-3'-phosphorothioate
  modified_base 23: mod_base = OTHER; note = 2'-O-methylcytidine-3'-phosphate
ttaagtatatacaagaagcctgc

SEQ ID NO: 1688 - RNA, 23 nt, synthetic construct
  source 1..23: mol_type = other RNA
  modified_base 1: mod_base = OTHER; note = Vinyl-phosphonate 2'-O-methyluridine-3'-phosphorothioate
  modified_base 2: mod_base = OTHER; note = 2'-fluorocytidine-3'-phosphorothioate
  modified_base 3: mod_base = OTHER; note = 2'-O-methyluridine-3'-phosphate
  modified_base 4: mod_base = OTHER; note = 2'-O-methylguanosine-3'-phosphate
  modified_base 5: mod_base = OTHER; note = 2'-O-methyladenosine-3'-phosphate
  modified_base 6: mod_base = OTHER; note = 2'-fluoroadenosine-3'-phosphate
  modified_base 7: mod_base = OTHER; note = 2'-O-methyladenosine-3'-phosphate
  modified_base 8: mod_base = OTHER; note = 2'-fluorocytidine-3'-phosphate
  modified_base 9: mod_base = OTHER; note = 2'-fluoroadenosine-3'-phosphate
  modified_base 10: mod_base = OTHER; note = 2'-O-methylcytidine-3'-phosphate
  modified_base 11: mod_base = OTHER; note = 2'-O-methyladenosine-3'-phosphate
  modified_base 12: mod_base = OTHER; note = 2'-O-methylguanosine-3'-phosphate
  modified_base 13: mod_base = OTHER; note = 2'-O-methyladenosine-3'-phosphate
  modified_base 14: mod_base = OTHER; note = 2'-fluorouridine-3'-phosphate
  modified_base 15: mod_base = OTHER; note = 2'-O-methylcytidine-3'-phosphate
  modified_base 16: mod_base = OTHER; note = 2'-fluoroadenosine-3'-phosphate
  modified_base 17: mod_base = OTHER; note = 2'-O-methyladenosine-3'-phosphate
  modified_base 18: mod_base = OTHER; note = 2'-O-methylguanosine-3'-phosphate
  modified_base 19: mod_base = OTHER; note = 2'-O-methyluridine-3'-phosphate
  modified_base 20: mod_base = OTHER; note = 2'-O-methyluridine-3'-phosphate
  modified_base 21: mod_base = OTHER; note = 2'-O-methyluridine-3'-phosphorothioate
  modified_base 22: mod_base = OTHER; note = 2'-O-methylguanosine-3'-phosphorothioate
  modified_base 23: mod_base = OTHER; note = 2'-O-methyladenosine-3'-phosphate
tctgaaacacagatcaagtttga

SEQ ID NO: 1689 - RNA, 23 nt, synthetic construct
  source 1..23: mol_type = other RNA
  modified_base 1: mod_base = OTHER; note = Vinyl-phosphonate 2'-O-methyluridine-3'-phosphorothioate
  modified_base 2: mod_base = OTHER; note = 2'-fluoroguanosine-3'-phosphorothioate
  modified_base 3: mod_base = OTHER; note = 2'-O-methyladenosine-3'-phosphate
  modified_base 4: mod_base = OTHER; note = 2'-O-methyladenosine-3'-phosphate
  modified_base 5: mod_base = OTHER; note = 2'-O-methyluridine-3'-phosphate
  modified_base 6: mod_base = OTHER; note = 2'-fluorouridine-3'-phosphate
  modified_base 7: mod_base = OTHER; note = 2'-O-methyluridine-3'-phosphate
  modified_base 8: mod_base = OTHER; note = 2'-fluoroadenosine-3'-phosphate
  modified_base 9: mod_base = OTHER; note = 2'-fluoroguanosine-3'-phosphate
  modified_base 10: mod_base = OTHER; note = 2'-O-methylcytidine-3'-phosphate
  modified_base 11: mod_base = OTHER; note = 2'-O-methyladenosine-3'-phosphate
  modified_base 12: mod_base = OTHER; note = 2'-O-methyluridine-3'-phosphate
  modified_base 13: mod_base = OTHER; note = 2'-O-methyluridine-3'-phosphate
  modified_base 14: mod_base = OTHER; note = 2'-fluoroadenosine-3'-phosphate
  modified_base 15: mod_base = OTHER; note = 2'-O-methyladenosine-3'-phosphate
  modified_base 16: mod_base = OTHER; note = 2'-fluoroadenosine-3'-phosphate
  modified_base 17: mod_base = OTHER; note = 2'-O-methylguanosine-3'-phosphate
  modified_base 18: mod_base = OTHER; note = 2'-O-methylcytidine-3'-phosphate
  modified_base 19: mod_base = OTHER; note = 2'-O-methyladenosine-3'-phosphate
  modified_base 20: mod_base = OTHER; note = 2'-O-methyladenosine-3'-phosphate
  modified_base 21: mod_base = OTHER; note = 2'-O-methyladenosine-3'-phosphorothioate
  modified_base 22: mod_base = OTHER; note = 2'-O-methyladenosine-3'-phosphorothioate
  modified_base 23: mod_base = OTHER; note = 2'-O-methylguanosine-3'-phosphate
tgaatttagcattaaagcaaaag

SEQ ID NO: 1690 - RNA, 23 nt, synthetic construct
  source 1..23: mol_type = other RNA
  modified_base 1: mod_base = OTHER; note = Vinyl-phosphonate 2'-O-methyluridine-3'-phosphorothioate
  modified_base 2: mod_base = OTHER; note = 2'-fluoroadenosine-3'-phosphorothioate
  modified_base 3: mod_base = OTHER; note = 2'-O-methyluridine-3'-phosphate
  modified_base 4: mod_base = OTHER; note = 2'-O-methyladenosine-3'-phosphate
  modified_base 5: mod_base = OTHER; note = 2'-O-methylcytidine-3'-phosphate
  modified_base 6: mod_base = OTHER; note = 2'-fluoroadenosine-3'-phosphate
  modified_base 7: mod_base = OTHER; note = 2'-O-methyladenosine-3'-phosphate
  modified_base 8: mod_base = OTHER; note = 2'-fluoroadenosine-3'-phosphate
  modified_base 9: mod_base = OTHER; note = 2'-fluorouridine-3'-phosphate
  modified_base 10: mod_base = OTHER; note = 2'-O-methyladenosine-3'-phosphate
  modified_base 11: mod_base = OTHER; note = 2'-O-methyladenosine-3'-phosphate
  modified_base 12: mod_base = OTHER; note = 2'-O-methylcytidine-3'-phosphate
  modified_base 13: mod_base = OTHER; note = 2'-O-methyladenosine-3'-phosphate
  modified_base 14: mod_base = OTHER; note = 2'-fluoroguanosine-3'-phosphate
  modified_base 15: mod_base = OTHER; note = 2'-O-methylcytidine-3'-phosphate
  modified_base 16: mod_base = OTHER; note = 2'-fluorouridine-3'-phosphate
  modified_base 17: mod_base = OTHER; note = 2'-O-methyladenosine-3'-phosphate
  modified_base 18: mod_base = OTHER; note = 2'-O-methylguanosine-3'-phosphate
  modified_base 19: mod_base = OTHER; note = 2'-O-methyluridine-3'-phosphate
  modified_base 20: mod_base = OTHER; note = 2'-O-methylcytidine-3'-phosphate
  modified_base 21: mod_base = OTHER; note = 2'-O-methyluridine-3'-phosphorothioate
  modified_base 22: mod_base = OTHER; note = 2'-O-methyluridine-3'-phosphorothioate
  modified_base 23: mod_base = OTHER; note = 2'-O-methyluridine-3'-phosphate
tatacaaataacagctagtcttt

SEQ ID NO: 1691 - RNA, 23 nt, synthetic construct
  source 1..23: mol_type = other RNA
  modified_base 1: mod_base = OTHER; note = Vinyl-phosphonate 2'-O-methyluridine-3'-phosphorothioate
  modified_base 2: mod_base = OTHER; note = 2'-fluorouridine -3'-phosphorothioate
  modified_base 3: mod_base = OTHER; note = 2'-O-methyladenosine-3'-phosphate
  modified_base 4: mod_base = OTHER; note = 2'-O-methyluridine-3'-phosphate
  modified_base 5: mod_base = OTHER; note = 2'-O-methyluridine-3'-phosphate
  modified_base 6: mod_base = OTHER; note = 2'-fluorocytidine-3'-phosphate
  modified_base 7: mod_base = OTHER; note = 2'-O-methyladenosine-3'-phosphate
  modified_base 8: mod_base = OTHER; note = 2'-fluoroadenosine-3'-phosphate
  modified_base 9: mod_base = OTHER; note = 2'-fluoroguanosine-3'-phosphate
  modified_base 10: mod_base = OTHER; note = 2'-O-methylguanosine-3'-phosphate
  modified_base 11: mod_base = OTHER; note = 2'-O-methylguanosine-3'-phosphate
  modified_base 12: mod_base = OTHER; note = 2'-O-methyladenosine-3'-phosphate
  modified_base 13: mod_base = OTHER; note = 2'-O-methyladenosine-3'-phosphate
  modified_base 14: mod_base = OTHER; note = 2'-fluoroadenosine-3'-phosphate
  modified_base 15: mod_base = OTHER; note = 2'-O-methylguanosine-3'-phosphate
  modified_base 16: mod_base = OTHER; note = 2'-fluorouridine-3'-phosphate
  modified_base 17: mod_base = OTHER; note = 2'-O-methyladenosine-3'-phosphate
  modified_base 18: mod_base = OTHER; note = 2'-O-methylguanosine-3'-phosphate
  modified_base 19: mod_base = OTHER; note = 2'-O-methylguanosine-3'-phosphate
  modified_base 20: mod_base = OTHER; note = 2'-O-methyladenosine-3'-phosphate
  modified_base 21: mod_base = OTHER; note = 2'-O-methyladenosine-3'-phosphorothioate
  modified_base 22: mod_base = OTHER; note = 2'-O-methylguanosine-3'-phosphorothioate
  modified_base 23: mod_base = OTHER; note = 2'-O-methylcytidine-3'-phosphate
ttattcaagggaaagtaggaagc

SEQ ID NO: 1692 - RNA, 23 nt, synthetic construct
  source 1..23: mol_type = other RNA
  modified_base 1: mod_base = OTHER; note = Vinyl-phosphonate 2'-O-methyluridine-3'-phosphorothioate
  modified_base 2: mod_base = OTHER; note = 2'-fluoroguanosine-3'-phosphorothioate
  modified_base 3: mod_base = OTHER; note = 2'-O-methyladenosine-3'-phosphate
  modified_base 4: mod_base = OTHER; note = 2'-O-methylcytidine-3'-phosphate
  modified_base 5: mod_base = OTHER; note = 2'-O-methyluridine-3'-phosphate
  modified_base 6: mod_base = OTHER; note = 2'-fluorouridine-3'-phosphate
  modified_base 7: mod_base = OTHER; note = 2'-O-methylguanosine-3'-phosphate
  modified_base 8: mod_base = OTHER; note = 2'-fluoroadenosine-3'-phosphate
  modified_base 9: mod_base = OTHER; note = 2'-fluoroguanosine-3'-phosphate
  modified_base 10: mod_base = OTHER; note = 2'-O-methylcytidine-3'-phosphate
  modified_base 11: mod_base = OTHER; note = 2'-O-methyladenosine-3'-phosphate
  modified_base 12: mod_base = OTHER; note = 2'-O-methyluridine-3'-phosphate
  modified_base 13: mod_base = OTHER; note = 2'-O-methyluridine-3'-phosphate
  modified_base 14: mod_base = OTHER; note = 2'-fluorocytidine-3'-phosphate
  modified_base 15: mod_base = OTHER; note = 2'-O-methyladenosine-3'-phosphate
  modified_base 16: mod_base = OTHER; note = 2'-fluoroguanosine-3'-phosphate
  modified_base 17: mod_base = OTHER; note = 2'-O-methyluridine-3'-phosphate
  modified_base 18: mod_base = OTHER; note = 2'-O-methyluridine-3'-phosphate
  modified_base 19: mod_base = OTHER; note = 2'-O-methylcytidine-3'-phosphate
  modified_base 20: mod_base = OTHER; note = 2'-O-methyluridine-3'-phosphate
  modified_base 21: mod_base = OTHER; note = 2'-O-methylguanosine-3'-phosphorothioate
  modified_base 22: mod_base = OTHER; note = 2'-O-methylguanosine-3'-phosphorothioate
  modified_base 23: mod_base = OTHER; note = 2'-O-methyladenosine-3'-phosphate
tgacttgagcattcagttctgga

SEQ ID NO: 1693 - RNA, 23 nt, synthetic construct
  source 1..23: mol_type = other RNA
  modified_base 1: mod_base = OTHER; note = Vinyl-phosphonate 2'-O-methyluridine-3'-phosphorothioate
  modified_base 2: mod_base = OTHER; note = 2'-fluoroadenosine-3'-phosphorothioate
  modified_base 3: mod_base = OTHER; note = 2'-O-methyluridine-3'-phosphate
  modified_base 4: mod_base = OTHER; note = 2'-O-methylguanosine-3'-phosphate
  modified_base 5: mod_base = OTHER; note = 2'-O-methyladenosine-3'-phosphate
  modified_base 6: mod_base = OTHER; note = 2'-fluoroguanosine-3'-phosphate
  modified_base 7: mod_base = OTHER; note = 2'-O-methyladenosine-3'-phosphate
  modified_base 8: mod_base = OTHER; note = 2'-fluoroadenosine-3'-phosphate
  modified_base 9: mod_base = OTHER; note = 2'-fluoroadenosine-3'-phosphate
  modified_base 10: mod_base = OTHER; note = 2'-O-methyluridine-3'-phosphate
  modified_base 11: mod_base = OTHER; note = 2'-O-methyluridine-3'-phosphate
  modified_base 12: mod_base = OTHER; note = 2'-O-methyladenosine-3'-phosphate
  modified_base 13: mod_base = OTHER; note = 2'-O-methylguanosine-3'-phosphate
  modified_base 14: mod_base = OTHER; note = 2'-fluorouridine-3'-phosphate
  modified_base 15: mod_base = OTHER; note = 2'-O-methyladenosine-3'-phosphate
  modified_base 16: mod_base = OTHER; note = 2'-fluoroadenosine-3'-phosphate
  modified_base 17: mod_base = OTHER; note = 2'-O-methylcytidine-3'-phosphate
  modified_base 18: mod_base = OTHER; note = 2'-O-methyladenosine-3'-phosphate
  modified_base 19: mod_base = OTHER; note = 2'-O-methyladenosine-3'-phosphate
  modified_base 20: mod_base = OTHER; note = 2'-O-methylguanosine-3'-phosphate
  modified_base 21: mod_base = OTHER; note = 2'-O-methyladenosine-3'-phosphorothioate
  modified_base 22: mod_base = OTHER; note = 2'-O-methyladenosine-3'-phosphorothioate
  modified_base 23: mod_base = OTHER; note = 2'-O-methylcytidine-3'-phosphate
tatgagaaattagtaacaagaac

SEQ ID NO: 1694 - RNA, 23 nt, synthetic construct
  source 1..23: mol_type = other RNA
  modified_base 1: mod_base = OTHER; note = Vinyl-phosphonate 2'-O-methyluridine-3'-phosphorothioate
  modified_base 2: mod_base = OTHER; note = 2'-fluoroguanosine-3'-phosphorothioate
  modified_base 3: mod_base = OTHER; note = 2'-O-methyluridine-3'-phosphate
  modified_base 4: mod_base = OTHER; note = 2'-O-methyladenosine-3'-phosphate
  modified_base 5: mod_base = OTHER; note = 2'-O-methyluridine-3'-phosphate
  modified_base 6: mod_base = OTHER; note = 2'-fluoroadenosine-3'-phosphate
  modified_base 7: mod_base = OTHER; note = 2'-O-methyladenosine-3'-phosphate
  modified_base 8: mod_base = OTHER; note = 2'-fluoroadenosine-3'-phosphate
  modified_base 9: mod_base = OTHER; note = 2'-fluoroguanosine-3'-phosphate
  modified_base 10: mod_base = OTHER; note = 2'-O-methylguanosine-3'-phosphate
  modified_base 11: mod_base = OTHER; note = 2'-O-methylcytidine-3'-phosphate
  modified_base 12: mod_base = OTHER; note = 2'-O-methyluridine-3'-phosphate
  modified_base 13: mod_base = OTHER; note = 2'-O-methyladenosine-3'-phosphate
  modified_base 14: mod_base = OTHER; note = 2'-fluorouridine-3'-phosphate
  modified_base 15: mod_base = OTHER; note = 2'-O-methylcytidine-3'-phosphate
  modified_base 16: mod_base = OTHER; note = 2'-fluoroadenosine-3'-phosphate
  modified_base 17: mod_base = OTHER; note = 2'-O-methylcytidine-3'-phosphate
  modified_base 18: mod_base = OTHER; note = 2'-O-methyluridine-3'-phosphate
  modified_base 19: mod_base = OTHER; note = 2'-O-methylguanosine-3'-phosphate
  modified_base 20: mod_base = OTHER; note = 2'-O-methyladenosine-3'-phosphate
  modified_base 21: mod_base = OTHER; note = 2'-O-methylguanosine-3'-phosphorothioate
  modified_base 22: mod_base = OTHER; note = 2'-O-methyluridine-3'-phosphorothioate
  modified_base 23: mod_base = OTHER; note = 2'-O-methyluridine-3'-phosphate
tgtataaaggctatcactgagtt

SEQ ID NO: 1695 - RNA, 23 nt, synthetic construct
  source 1..23: mol_type = other RNA
  modified_base 1: mod_base = OTHER; note = Vinyl-phosphonate 2'-O-methyluridine-3'-phosphorothioate
  modified_base 2: mod_base = OTHER; note = 2'-fluoroguanosine-3'-phosphorothioate
  modified_base 3: mod_base = OTHER; note = 2'-O-methyladenosine-3'-phosphate
  modified_base 4: mod_base = OTHER; note = 2'-O-methyluridine-3'-phosphate
  modified_base 5: mod_base = OTHER; note = 2'-O-methylguanosine-3'-phosphate
  modified_base 6: mod_base = OTHER; note = 2'-fluorouridine-3'-phosphate
  modified_base 7: mod_base = OTHER; note = 2'-O-methyluridine-3'-phosphate
  modified_base 8: mod_base = OTHER; note = 2'-fluorouridine-3'-phosphate
  modified_base 9: mod_base = OTHER; note = 2'-fluorouridine-3'-phosphate
  modified_base 10: mod_base = OTHER; note = 2'-O-methyladenosine-3'-phosphate
  modified_base 11: mod_base = OTHER; note = 2'-O-methylguanosine-3'-phosphate
  modified_base 12: mod_base = OTHER; note = 2'-O-methylguanosine-3'-phosphate
  modified_base 13: mod_base = OTHER; note = 2'-O-methyladenosine-3'-phosphate
  modified_base 14: mod_base = OTHER; note = 2'-fluoroguanosine-3'-phosphate
  modified_base 15: mod_base = OTHER; note = 2'-O-methylcytidine-3'-phosphate
  modified_base 16: mod_base = OTHER; note = 2'-fluoroadenosine-3'-phosphate
  modified_base 17: mod_base = OTHER; note = 2'-O-methyluridine-3'-phosphate
  modified_base 18: mod_base = OTHER; note = 2'-O-methyladenosine-3'-phosphate
  modified_base 19: mod_base = OTHER; note = 2'-O-methyladenosine-3'-phosphate
  modified_base 20: mod_base = OTHER; note = 2'-O-methyladenosine-3'-phosphate
  modified_base 21: mod_base = OTHER; note = 2'-O-methyladenosine-3'-phosphorothioate
  modified_base 22: mod_base = OTHER; note = 2'-O-methylguanosine-3'-phosphorothioate
  modified_base 23: mod_base = OTHER; note = 2'-O-methyladenosine-3'-phosphate
tgatgttttaggagcataaaaga

SEQ ID NO: 1696 - RNA, 23 nt, synthetic construct
  source 1..23: mol_type = other RNA
  modified_base 1: mod_base = OTHER; note = Vinyl-phosphonate 2'-O-methyluridine-3'-phosphorothioate
  modified_base 2: mod_base = OTHER; note = 2'-fluorouridine -3'-phosphorothioate
  modified_base 3: mod_base = OTHER; note = 2'-O-methylguanosine-3'-phosphate
  modified_base 4: mod_base = OTHER; note = 2'-O-methyladenosine-3'-phosphate
  modified_base 5: mod_base = OTHER; note = 2'-O-methyladenosine-3'-phosphate
  modified_base 6: mod_base = OTHER; note = 2'-fluorocytidine-3'-phosphate
  modified_base 7: mod_base = OTHER; note = 2'-O-methyladenosine-3'-phosphate
  modified_base 8: mod_base = OTHER; note = 2'-fluorouridine-3'-phosphate
  modified_base 9: mod_base = OTHER; note = 2'-fluoroadenosine-3'-phosphate
  modified_base 10: mod_base = OTHER; note = 2'-O-methyladenosine-3'-phosphate
  modified_base 11: mod_base = OTHER; note = 2'-O-methylcytidine-3'-phosphate
  modified_base 12: mod_base = OTHER; note = 2'-O-methylcytidine-3'-phosphate
  modified_base 13: mod_base = OTHER; note = 2'-O-methyluridine-3'-phosphate
  modified_base 14: mod_base = OTHER; note = 2'-fluoroadenosine-3'-phosphate
  modified_base 15: mod_base = OTHER; note = 2'-O-methyladenosine-3'-phosphate
  modified_base 16: mod_base = OTHER; note = 2'-fluoroguanosine-3'-phosphate
  modified_base 17: mod_base = OTHER; note = 2'-O-methylguanosine-3'-phosphate
  modified_base 18: mod_base = OTHER; note = 2'-O-methyladenosine-3'-phosphate
  modified_base 19: mod_base = OTHER; note = 2'-O-methylguanosine-3'-phosphate
  modified_base 20: mod_base = OTHER; note = 2'-O-methyladenosine-3'-phosphate
  modified_base 21: mod_base = OTHER; note = 2'-O-methyladenosine-3'-phosphorothioate
  modified_base 22: mod_base = OTHER; note = 2'-O-methyluridine-3'-phosphorothioate
  modified_base 23: mod_base = OTHER; note = 2'-O-methyluridine-3'-phosphate
ttgaacataacctaaggagaatt

SEQ ID NO: 1697 - RNA, 23 nt, synthetic construct
  source 1..23: mol_type = other RNA
  modified_base 1: mod_base = OTHER; note = Vinyl-phosphonate 2'-O-methyluridine-3'-phosphorothioate
  modified_base 2: mod_base = OTHER; note = 2'-fluorouridine -3'-phosphorothioate
  modified_base 3: mod_base = OTHER; note = 2'-O-methyluridine-3'-phosphate
  modified_base 4: mod_base = OTHER; note = 2'-O-methyluridine-3'-phosphate
  modified_base 5: mod_base = OTHER; note = 2'-O-methyladenosine-3'-phosphate
  modified_base 6: mod_base = OTHER; note = 2'-fluorouridine-3'-phosphate
  modified_base 7: mod_base = OTHER; note = 2'-O-methylguanosine-3'-phosphate
  modified_base 8: mod_base = OTHER; note = 2'-fluorouridine-3'-phosphate
  modified_base 9: mod_base = OTHER; note = 2'-fluorocytidine-3'-phosphate
  modified_base 10: mod_base = OTHER; note = 2'-O-methyluridine-3'-phosphate
  modified_base 11: mod_base = OTHER; note = 2'-O-methylcytidine-3'-phosphate
  modified_base 12: mod_base = OTHER; note = 2'-O-methylguanosine-3'-phosphate
  modified_base 13: mod_base = OTHER; note = 2'-O-methyladenosine-3'-phosphate
  modified_base 14: mod_base = OTHER; note = 2'-fluorouridine-3'-phosphate
  modified_base 15: mod_base = OTHER; note = 2'-O-methylguanosine-3'-phosphate
  modified_base 16: mod_base = OTHER; note = 2'-fluoroadenosine-3'-phosphate
  modified_base 17: mod_base = OTHER; note = 2'-O-methylguanosine-3'-phosphate
  modified_base 18: mod_base = OTHER; note = 2'-O-methylcytidine-3'-phosphate
  modified_base 19: mod_base = OTHER; note = 2'-O-methyladenosine-3'-phosphate
  modified_base 20: mod_base = OTHER; note = 2'-O-methyladenosine-3'-phosphate
  modified_base 21: mod_base = OTHER; note = 2'-O-methyluridine-3'-phosphorothioate
  modified_base 22: mod_base = OTHER; note = 2'-O-methyladenosine-3'-phosphorothioate
  modified_base 23: mod_base = OTHER; note = 2'-O-methylguanosine-3'-phosphate
ttttatgtctcgatgagcaatag

SEQ ID NO: 1698 - RNA, 23 nt, synthetic construct
  source 1..23: mol_type = other RNA
  modified_base 1: mod_base = OTHER; note = Vinyl-phosphonate 2'-O-methyluridine-3'-phosphorothioate
  modified_base 2: mod_base = OTHER; note = 2'-fluorouridine -3'-phosphorothioate
  modified_base 3: mod_base = OTHER; note = 2'-O-methyladenosine-3'-phosphate
  modified_base 4: mod_base = OTHER; note = 2'-O-methyladenosine-3'-phosphate
  modified_base 5: mod_base = OTHER; note = 2'-O-methylguanosine-3'-phosphate
  modified_base 6: mod_base = OTHER; note = 2'-fluorouridine-3'-phosphate
  modified_base 7: mod_base = OTHER; note = 2'-O-methylguanosine-3'-phosphate
  modified_base 8: mod_base = OTHER; note = 2'-fluorouridine-3'-phosphate
  modified_base 9: mod_base = OTHER; note = 2'-fluoroguanosine-3'-phosphate
  modified_base 10: mod_base = OTHER; note = 2'-O-methyluridine-3'-phosphate
  modified_base 11: mod_base = OTHER; note = 2'-O-methyladenosine-3'-phosphate
  modified_base 12: mod_base = OTHER; note = 2'-O-methyluridine-3'-phosphate
  modified_base 13: mod_base = OTHER; note = 2'-O-methylguanosine-3'-phosphate
  modified_base 14: mod_base = OTHER; note = 2'-fluorouridine-3'-phosphate
  modified_base 15: mod_base = OTHER; note = 2'-O-methyladenosine-3'-phosphate
  modified_base 16: mod_base = OTHER; note = 2'-fluorocytidine-3'-phosphate
  modified_base 17: mod_base = OTHER; note = 2'-O-methyladenosine-3'-phosphate
  modified_base 18: mod_base = OTHER; note = 2'-O-methyladenosine-3'-phosphate
  modified_base 19: mod_base = OTHER; note = 2'-O-methyladenosine-3'-phosphate
  modified_base 20: mod_base = OTHER; note = 2'-O-methylguanosine-3'-phosphate
  modified_base 21: mod_base = OTHER; note = 2'-O-methylguanosine-3'-phosphorothioate
  modified_base 22: mod_base = OTHER; note = 2'-O-methyladenosine-3'-phosphorothioate
  modified_base 23: mod_base = OTHER; note = 2'-O-methyladenosine-3'-phosphate
ttaagtgtgtatgtacaaaggaa

SEQ ID NO: 1699 - RNA, 23 nt, synthetic construct
  source 1..23: mol_type = other RNA
  modified_base 1: mod_base = OTHER; note = Vinyl-phosphonate 2'-O-methyluridine-3'-phosphorothioate
  modified_base 2: mod_base = OTHER; note = 2'-fluorouridine -3'-phosphorothioate
  modified_base 3: mod_base = OTHER; note = 2'-O-methyluridine-3'-phosphate
  modified_base 4: mod_base = OTHER; note = 2'-O-methylcytidine-3'-phosphate
  modified_base 5: mod_base = OTHER; note = 2'-O-methyladenosine-3'-phosphate
  modified_base 6: mod_base = OTHER; note = 2'-fluorouridine-3'-phosphate
  modified_base 7: mod_base = OTHER; note = 2'-O-methylguanosine-3'-phosphate
  modified_base 8: mod_base = OTHER; note = 2'-fluorouridine-3'-phosphate
  modified_base 9: mod_base = OTHER; note = 2'-fluoroguanosine-3'-phosphate
  modified_base 10: mod_base = OTHER; note = 2'-O-methylcytidine-3'-phosphate
  modified_base 11: mod_base = OTHER; note = 2'-O-methyluridine-3'-phosphate
  modified_base 12: mod_base = OTHER; note = 2'-O-methylcytidine-3'-phosphate
  modified_base 13: mod_base = OTHER; note = 2'-O-methyluridine-3'-phosphate
  modified_base 14: mod_base = OTHER; note = 2'-fluorouridine-3'-phosphate
  modified_base 15: mod_base = OTHER; note = 2'-O-methylguanosine-3'-phosphate
  modified_base 16: mod_base = OTHER; note = 2'-fluoroguanosine-3'-phosphate
  modified_base 17: mod_base = OTHER; note = 2'-O-methyluridine-3'-phosphate
  modified_base 18: mod_base = OTHER; note = 2'-O-methyluridine-3'-phosphate
  modified_base 19: mod_base = OTHER; note = 2'-O-methylcytidine-3'-phosphate
  modified_base 20: mod_base = OTHER; note = 2'-O-methyladenosine-3'-phosphate
  modified_base 21: mod_base = OTHER; note = 2'-O-methyladenosine-3'-phosphorothioate
  modified_base 22: mod_base = OTHER; note = 2'-O-methylguanosine-3'-phosphorothioate
  modified_base 23: mod_base = OTHER; note = 2'-O-methyluridine-3'-phosphate
tttcatgtgctcttggttcaagt

SEQ ID NO: 1700 - RNA, 23 nt, synthetic construct
  source 1..23: mol_type = other RNA
  modified_base 1: mod_base = OTHER; note = Vinyl-phosphonate 2'-O-methyluridine-3'-phosphorothioate
  modified_base 2: mod_base = OTHER; note = 2'-fluorouridine -3'-phosphorothioate
  modified_base 3: mod_base = OTHER; note = 2'-O-methyluridine-3'-phosphate
  modified_base 4: mod_base = OTHER; note = 2'-O-methyladenosine-3'-phosphate
  modified_base 5: mod_base = OTHER; note = 2'-O-methylguanosine-3'-phosphate
  modified_base 6: mod_base = OTHER; note = 2'-fluoroadenosine-3'-phosphate
  modified_base 7: mod_base = OTHER; note = 2'-O-methylcytidine-3'-phosphate
  modified_base 8: mod_base = OTHER; note = 2'-fluorouridine-3'-phosphate
  modified_base 9: mod_base = OTHER; note = 2'-fluorouridine-3'-phosphate
  modified_base 10: mod_base = OTHER; note = 2'-O-methyluridine-3'-phosphate
  modified_base 11: mod_base = OTHER; note = 2'-O-methyladenosine-3'-phosphate
  modified_base 12: mod_base = OTHER; note = 2'-O-methyladenosine-3'-phosphate
  modified_base 13: mod_base = OTHER; note = 2'-O-methyladenosine-3'-phosphate
  modified_base 14: mod_base = OTHER; note = 2'-fluoroadenosine-3'-phosphate
  modified_base 15: mod_base = OTHER; note = 2'-O-methyluridine-3'-phosphate
  modified_base 16: mod_base = OTHER; note = 2'-fluorocytidine-3'-phosphate
  modified_base 17: mod_base = OTHER; note = 2'-O-methylcytidine-3'-phosphate
  modified_base 18: mod_base = OTHER; note = 2'-O-methylcytidine-3'-phosphate
  modified_base 19: mod_base = OTHER; note = 2'-O-methyluridine-3'-phosphate
  modified_base 20: mod_base = OTHER; note = 2'-O-methylguanosine-3'-phosphate
  modified_base 21: mod_base = OTHER; note = 2'-O-methyladenosine-3'-phosphorothioate
  modified_base 22: mod_base = OTHER; note = 2'-O-methylguanosine-3'-phosphorothioate
  modified_base 23: mod_base = OTHER; note = 2'-O-methylguanosine-3'-phosphate
tttagactttaaaatccctgagg

SEQ ID NO: 1701 - RNA, 23 nt, synthetic construct
  source 1..23: mol_type = other RNA
  modified_base 1: mod_base = OTHER; note = Vinyl-phosphonate 2'-O-methyluridine-3'-phosphorothioate
  modified_base 2: mod_base = OTHER; note = 2'-fluorouridine -3'-phosphorothioate
  modified_base 3: mod_base = OTHER; note = 2'-O-methyladenosine-3'-phosphate
  modified_base 4: mod_base = OTHER; note = 2'-O-methyluridine-3'-phosphate
  modified_base 5: mod_base = OTHER; note = 2'-O-methylcytidine-3'-phosphate
  modified_base 6: mod_base = OTHER; note = 2'-fluoroadenosine-3'-phosphate
  modified_base 7: mod_base = OTHER; note = 2'-O-methylcytidine-3'-phosphate
  modified_base 8: mod_base = OTHER; note = 2'-fluorouridine-3'-phosphate
  modified_base 9: mod_base = OTHER; note = 2'-fluorouridine-3'-phosphate
  modified_base 10: mod_base = OTHER; note = 2'-O-methyluridine-3'-phosphate
  modified_base 11: mod_base = OTHER; note = 2'-O-methyladenosine-3'-phosphate
  modified_base 12: mod_base = OTHER; note = 2'-O-methyluridine-3'-phosphate
  modified_base 13: mod_base = OTHER; note = 2'-O-methyladenosine-3'-phosphate
  modified_base 14: mod_base = OTHER; note = 2'-fluoroadenosine-3'-phosphate
  modified_base 15: mod_base = OTHER; note = 2'-O-methylguanosine-3'-phosphate
  modified_base 16: mod_base = OTHER; note = 2'-fluorocytidine-3'-phosphate
  modified_base 17: mod_base = OTHER; note = 2'-O-methyladenosine-3'-phosphate
  modified_base 18: mod_base = OTHER; note = 2'-O-methyladenosine-3'-phosphate
  modified_base 19: mod_base = OTHER; note = 2'-O-methylguanosine-3'-phosphate
  modified_base 20: mod_base = OTHER; note = 2'-O-methyluridine-3'-phosphate
  modified_base 21: mod_base = OTHER; note = 2'-O-methyladenosine-3'-phosphorothioate
  modified_base 22: mod_base = OTHER; note = 2'-O-methylcytidine-3'-phosphorothioate
  modified_base 23: mod_base = OTHER; note = 2'-O-methylcytidine-3'-phosphate
ttatcactttataagcaagtacc

SEQ ID NO: 1702 - RNA, 23 nt, synthetic construct
  source 1..23: mol_type = other RNA
  modified_base 1: mod_base = OTHER; note = Vinyl-phosphonate 2'-O-methyluridine-3'-phosphorothioate
  modified_base 2: mod_base = OTHER; note = 2'-fluorocytidine-3'-phosphorothioate
  modified_base 3: mod_base = OTHER; note = 2'-O-methyladenosine-3'-phosphate
  modified_base 4: mod_base = OTHER; note = 2'-O-methyladenosine-3'-phosphate
  modified_base 5: mod_base = OTHER; note = 2'-O-methylguanosine-3'-phosphate
  modified_base 6: mod_base = OTHER; note = 2'-fluoroguanosine-3'-phosphate
  modified_base 7: mod_base = OTHER; note = 2'-O-methyluridine-3'-phosphate
  modified_base 8: mod_base = OTHER; note = 2'-fluoroadenosine-3'-phosphate
  modified_base 9: mod_base = OTHER; note = 2'-fluoroguanosine-3'-phosphate
  modified_base 10: mod_base = OTHER; note = 2'-O-methylguanosine-3'-phosphate
  modified_base 11: mod_base = OTHER; note = 2'-O-methyluridine-3'-phosphate
  modified_base 12: mod_base = OTHER; note = 2'-O-methyluridine-3'-phosphate
  modified_base 13: mod_base = OTHER; note = 2'-O-methyluridine-3'-phosphate
  modified_base 14: mod_base = OTHER; note = 2'-fluoroadenosine-3'-phosphate
  modified_base 15: mod_base = OTHER; note = 2'-O-methylguanosine-3'-phosphate
  modified_base 16: mod_base = OTHER; note = 2'-fluoroadenosine-3'-phosphate
  modified_base 17: mod_base = OTHER; note = 2'-O-methyluridine-3'-phosphate
  modified_base 18: mod_base = OTHER; note = 2'-O-methylguanosine-3'-phosphate
  modified_base 19: mod_base = OTHER; note = 2'-O-methylcytidine-3'-phosphate
  modified_base 20: mod_base = OTHER; note = 2'-O-methyladenosine-3'-phosphate
  modified_base 21: mod_base = OTHER; note = 2'-O-methyluridine-3'-phosphorothioate
  modified_base 22: mod_base = OTHER; note = 2'-O-methylguanosine-3'-phosphorothioate
  modified_base 23: mod_base = OTHER; note = 2'-O-methylcytidine-3'-phosphate
tcaaggtaggtttagatgcatgc

SEQ ID NO: 1703 - RNA, 23 nt, synthetic construct
  source 1..23: mol_type = other RNA
  modified_base 1: mod_base = OTHER; note = Vinyl-phosphonate 2'-O-methyluridine-3'-phosphorothioate
  modified_base 2: mod_base = OTHER; note = 2'-fluorouridine -3'-phosphorothioate
  modified_base 3: mod_base = OTHER; note = 2'-O-methylcytidine-3'-phosphate
  modified_base 4: mod_base = OTHER; note = 2'-O-methyladenosine-3'-phosphate
  modified_base 5: mod_base = OTHER; note = 2'-O-methyluridine-3'-phosphate
  modified_base 6: mod_base = OTHER; note = 2'-fluoroadenosine-3'-phosphate
  modified_base 7: mod_base = OTHER; note = 2'-O-methyladenosine-3'-phosphate
  modified_base 8: mod_base = OTHER; note = 2'-fluorouridine-3'-phosphate
  modified_base 9: mod_base = OTHER; note = 2'-fluoroadenosine-3'-phosphate
  modified_base 10: mod_base = OTHER; note = 2'-O-methylguanosine-3'-phosphate
  modified_base 11: mod_base = OTHER; note = 2'-O-methyluridine-3'-phosphate
  modified_base 12: mod_base = OTHER; note = 2'-O-methylguanosine-3'-phosphate
  modified_base 13: mod_base = OTHER; note = 2'-O-methyluridine-3'-phosphate
  modified_base 14: mod_base = OTHER; note = 2'-fluorouridine-3'-phosphate
  modified_base 15: mod_base = OTHER; note = 2'-O-methyluridine-3'-phosphate
  modified_base 16: mod_base = OTHER; note = 2'-fluorouridine-3'-phosphate
  modified_base 17: mod_base = OTHER; note = 2'-O-methylcytidine-3'-phosphate
  modified_base 18: mod_base = OTHER; note = 2'-O-methylcytidine-3'-phosphate
  modified_base 19: mod_base = OTHER; note = 2'-O-methylcytidine-3'-phosphate
  modified_base 20: mod_base = OTHER; note = 2'-O-methyladenosine-3'-phosphate
  modified_base 21: mod_base = OTHER; note = 2'-O-methyladenosine-3'-phosphorothioate
  modified_base 22: mod_base = OTHER; note = 2'-O-methylguanosine-3'-phosphorothioate
  modified_base 23: mod_base = OTHER; note = 2'-O-methyluridine-3'-phosphate
ttcataatagtgttttcccaagt

SEQ ID NO: 1704 - RNA, 23 nt, synthetic construct
  source 1..23: mol_type = other RNA
  modified_base 1: mod_base = OTHER; note = Vinyl-phosphonate 2'-O-methyluridine-3'-phosphorothioate
  modified_base 2: mod_base = OTHER; note = 2'-fluorouridine -3'-phosphorothioate
  modified_base 3: mod_base = OTHER; note = 2'-O-methyluridine-3'-phosphate
  modified_base 4: mod_base = OTHER; note = 2'-O-methylcytidine-3'-phosphate
  modified_base 5: mod_base = OTHER; note = 2'-O-methyladenosine-3'-phosphate
  modified_base 6: mod_base = OTHER; note = 2'-fluorouridine-3'-phosphate
  modified_base 7: mod_base = OTHER; note = 2'-O-methyluridine-3'-phosphate
  modified_base 8: mod_base = OTHER; note = 2'-fluorouridine-3'-phosphate
  modified_base 9: mod_base = OTHER; note = 2'-fluorocytidine-3'-phosphate
  modified_base 10: mod_base = OTHER; note = 2'-O-methyluridine-3'-phosphate
  modified_base 11: mod_base = OTHER; note = 2'-O-methylcytidine-3'-phosphate
  modified_base 12: mod_base = OTHER; note = 2'-O-methyluridine-3'-phosphate
  modified_base 13: mod_base = OTHER; note = 2'-O-methyluridine-3'-phosphate
  modified_base 14: mod_base = OTHER; note = 2'-fluorouridine-3'-phosphate
  modified_base 15: mod_base = OTHER; note = 2'-O-methylguanosine-3'-phosphate
  modified_base 16: mod_base = OTHER; note = 2'-fluoroguanosine-3'-phosphate
  modified_base 17: mod_base = OTHER; note = 2'-O-methyladenosine-3'-phosphate
  modified_base 18: mod_base = OTHER; note = 2'-O-methylguanosine-3'-phosphate
  modified_base 19: mod_base = OTHER; note = 2'-O-methyluridine-3'-phosphate
  modified_base 20: mod_base = OTHER; note = 2'-O-methyluridine-3'-phosphate
  modified_base 21: mod_base = OTHER; note = 2'-O-methyluridine-3'-phosphorothioate
  modified_base 22: mod_base = OTHER; note = 2'-O-methylguanosine-3'-phosphorothioate
  modified_base 23: mod_base = OTHER; note = 2'-O-methyladenosine-3'-phosphate
tttcatttctctttggagtttga

SEQ ID NO: 1705 - RNA, 23 nt, synthetic construct
  source 1..23: mol_type = other RNA
  modified_base 1: mod_base = OTHER; note = Vinyl-phosphonate 2'-O-methyluridine-3'-phosphorothioate
  modified_base 2: mod_base = OTHER; note = 2'-fluoroadenosine-3'-phosphorothioate
  modified_base 3: mod_base = OTHER; note = 2'-O-methyluridine-3'-phosphate
  modified_base 4: mod_base = OTHER; note = 2'-O-methylguanosine-3'-phosphate
  modified_base 5: mod_base = OTHER; note = 2'-O-methyluridine-3'-phosphate
  modified_base 6: mod_base = OTHER; note = 2'-fluorouridine-3'-phosphate
  modified_base 7: mod_base = OTHER; note = 2'-O-methyluridine-3'-phosphate
  modified_base 8: mod_base = OTHER; note = 2'-fluorouridine-3'-phosphate
  modified_base 9: mod_base = OTHER; note = 2'-fluoroguanosine-3'-phosphate
  modified_base 10: mod_base = OTHER; note = 2'-O-methyladenosine-3'-phosphate
  modified_base 11: mod_base = OTHER; note = 2'-O-methyladenosine-3'-phosphate
  modified_base 12: mod_base = OTHER; note = 2'-O-methyladenosine-3'-phosphate
  modified_base 13: mod_base = OTHER; note = 2'-O-methyladenosine-3'-phosphate
  modified_base 14: mod_base = OTHER; note = 2'-fluoroadenosine-3'-phosphate
  modified_base 15: mod_base = OTHER; note = 2'-O-methyluridine-3'-phosphate
  modified_base 16: mod_base = OTHER; note = 2'-fluoroguanosine-3'-phosphate
  modified_base 17: mod_base = OTHER; note = 2'-O-methylcytidine-3'-phosphate
  modified_base 18: mod_base = OTHER; note = 2'-O-methylcytidine-3'-phosphate
  modified_base 19: mod_base = OTHER; note = 2'-O-methylcytidine-3'-phosphate
  modified_base 20: mod_base = OTHER; note = 2'-O-methyladenosine-3'-phosphate
  modified_base 21: mod_base = OTHER; note = 2'-O-methyluridine-3'-phosphorothioate
  modified_base 22: mod_base = OTHER; note = 2'-O-methyladenosine-3'-phosphorothioate
  modified_base 23: mod_base = OTHER; note = 2'-O-methyluridine-3'-phosphate
tatgttttgaaaaatgcccatat

SEQ ID NO: 1706 - RNA, 23 nt, synthetic construct
  source 1..23: mol_type = other RNA
  modified_base 1: mod_base = OTHER; note = Vinyl-phosphonate 2'-O-methyluridine-3'-phosphorothioate
  modified_base 2: mod_base = OTHER; note = 2'-fluorouridine -3'-phosphorothioate
  modified_base 3: mod_base = OTHER; note = 2'-O-methyluridine-3'-phosphate
  modified_base 4: mod_base = OTHER; note = 2'-O-methylguanosine-3'-phosphate
  modified_base 5: mod_base = OTHER; note = 2'-O-methyladenosine-3'-phosphate
  modified_base 6: mod_base = OTHER; note = 2'-fluoroguanosine-3'-phosphate
  modified_base 7: mod_base = OTHER; note = 2'-O-methyluridine-3'-phosphate
  modified_base 8: mod_base = OTHER; note = 2'-fluorocytidine-3'-phosphate
  modified_base 9: mod_base = OTHER; note = 2'-fluorocytidine-3'-phosphate
  modified_base 10: mod_base = OTHER; note = 2'-O-methyladenosine-3'-phosphate
  modified_base 11: mod_base = OTHER; note = 2'-O-methyladenosine-3'-phosphate
  modified_base 12: mod_base = OTHER; note = 2'-O-methylguanosine-3'-phosphate
  modified_base 13: mod_base = OTHER; note = 2'-O-methyluridine-3'-phosphate
  modified_base 14: mod_base = OTHER; note = 2'-fluorouridine-3'-phosphate
  modified_base 15: mod_base = OTHER; note = 2'-O-methylcytidine-3'-phosphate
  modified_base 16: mod_base = OTHER; note = 2'-fluorocytidine-3'-phosphate
  modified_base 17: mod_base = OTHER; note = 2'-O-methyladenosine-3'-phosphate
  modified_base 18: mod_base = OTHER; note = 2'-O-methyluridine-3'-phosphate
  modified_base 19: mod_base = OTHER; note = 2'-O-methyluridine-3'-phosphate
  modified_base 20: mod_base = OTHER; note = 2'-O-methyladenosine-3'-phosphate
  modified_base 21: mod_base = OTHER; note = 2'-O-methyluridine-3'-phosphorothioate
  modified_base 22: mod_base = OTHER; note = 2'-O-methylcytidine-3'-phosphorothioate
  modified_base 23: mod_base = OTHER; note = 2'-O-methyluridine-3'-phosphate
tttgagtccaagttccattatct

SEQ ID NO: 1707 - RNA, 23 nt, synthetic construct
  source 1..23: mol_type = other RNA
  modified_base 1: mod_base = OTHER; note = Vinyl-phosphonate 2'-O-methyluridine-3'-phosphorothioate
  modified_base 2: mod_base = OTHER; note = 2'-fluorouridine -3'-phosphorothioate
  modified_base 3: mod_base = OTHER; note = 2'-O-methyluridine-3'-phosphate
  modified_base 4: mod_base = OTHER; note = 2'-O-methylguanosine-3'-phosphate
  modified_base 5: mod_base = OTHER; note = 2'-O-methylguanosine-3'-phosphate
  modified_base 6: mod_base = OTHER; note = 2'-fluorouridine-3'-phosphate
  modified_base 7: mod_base = OTHER; note = 2'-O-methyluridine-3'-phosphate
  modified_base 8: mod_base = OTHER; note = 2'-fluorouridine-3'-phosphate
  modified_base 9: mod_base = OTHER; note = 2'-fluorocytidine-3'-phosphate
  modified_base 10: mod_base = OTHER; note = 2'-O-methylguanosine-3'-phosphate
  modified_base 11: mod_base = OTHER; note = 2'-O-methyluridine-3'-phosphate
  modified_base 12: mod_base = OTHER; note = 2'-O-methylcytidine-3'-phosphate
  modified_base 13: mod_base = OTHER; note = 2'-O-methyladenosine-3'-phosphate
  modified_base 14: mod_base = OTHER; note = 2'-fluorouridine-3'-phosphate
  modified_base 15: mod_base = OTHER; note = 2'-O-methylcytidine-3'-phosphate
  modified_base 16: mod_base = OTHER; note = 2'-fluorouridine-3'-phosphate
  modified_base 17: mod_base = OTHER; note = 2'-O-methyladenosine-3'-phosphate
  modified_base 18: mod_base = OTHER; note = 2'-O-methylcytidine-3'-phosphate
  modified_base 19: mod_base = OTHER; note = 2'-O-methyladenosine-3'-phosphate
  modified_base 20: mod_base = OTHER; note = 2'-O-methylcytidine-3'-phosphate
  modified_base 21: mod_base = OTHER; note = 2'-O-methyladenosine-3'-phosphorothioate
  modified_base 22: mod_base = OTHER; note = 2'-O-methyladenosine-3'-phosphorothioate
  modified_base 23: mod_base = OTHER; note = 2'-O-methyladenosine-3'-phosphate
tttggtttcgtcatctacacaaa

SEQ ID NO: 1708 - RNA, 23 nt, synthetic construct
  source 1..23: mol_type = other RNA
  modified_base 1: mod_base = OTHER; note = Vinyl-phosphonate 2'-O-methyluridine-3'-phosphorothioate
  modified_base 2: mod_base = OTHER; note = 2'-fluoroguanosine-3'-phosphorothioate
  modified_base 3: mod_base = OTHER; note = 2'-O-methyluridine-3'-phosphate
  modified_base 4: mod_base = OTHER; note = 2'-O-methylcytidine-3'-phosphate
  modified_base 5: mod_base = OTHER; note = 2'-O-methyluridine-3'-phosphate
  modified_base 6: mod_base = OTHER; note = 2'-fluorouridine-3'-phosphate
  modified_base 7: mod_base = OTHER; note = 2'-O-methyladenosine-3'-phosphate
  modified_base 8: mod_base = OTHER; note = 2'-fluorouridine-3'-phosphate
  modified_base 9: mod_base = OTHER; note = 2'-fluorocytidine-3'-phosphate
  modified_base 10: mod_base = OTHER; note = 2'-O-methyluridine-3'-phosphate
  modified_base 11: mod_base = OTHER; note = 2'-O-methyluridine-3'-phosphate
  modified_base 12: mod_base = OTHER; note = 2'-O-methyluridine-3'-phosphate
  modified_base 13: mod_base = OTHER; note = 2'-O-methylguanosine-3'-phosphate
  modified_base 14: mod_base = OTHER; note = 2'-fluoroadenosine-3'-phosphate
  modified_base 15: mod_base = OTHER; note = 2'-O-methylguanosine-3'-phosphate
  modified_base 16: mod_base = OTHER; note = 2'-fluoroguanosine-3'-phosphate
  modified_base 17: mod_base = OTHER; note = 2'-O-methyluridine-3'-phosphate
  modified_base 18: mod_base = OTHER; note = 2'-O-methyladenosine-3'-phosphate
  modified_base 19: mod_base = OTHER; note = 2'-O-methylguanosine-3'-phosphate
  modified_base 20: mod_base = OTHER; note = 2'-O-methyladenosine-3'-phosphate
  modified_base 21: mod_base = OTHER; note = 2'-O-methyladenosine-3'-phosphorothioate
  modified_base 22: mod_base = OTHER; note = 2'-O-methylcytidine-3'-phosphorothioate
  modified_base 23: mod_base = OTHER; note = 2'-O-methyladenosine-3'-phosphate
tgtcttatctttgaggtagaaca

SEQ ID NO: 1709 - RNA, 23 nt, synthetic construct
  source 1..23: mol_type = other RNA
  modified_base 1: mod_base = OTHER; note = Vinyl-phosphonate 2'-O-methyluridine-3'-phosphorothioate
  modified_base 2: mod_base = OTHER; note = 2'-fluoroadenosine-3'-phosphorothioate
  modified_base 3: mod_base = OTHER; note = 2'-O-methyladenosine-3'-phosphate
  modified_base 4: mod_base = OTHER; note = 2'-O-methyluridine-3'-phosphate
  modified_base 5: mod_base = OTHER; note = 2'-O-methyladenosine-3'-phosphate
  modified_base 6: mod_base = OTHER; note = 2'-fluoroadenosine-3'-phosphate
  modified_base 7: mod_base = OTHER; note = 2'-O-methylcytidine-3'-phosphate
  modified_base 8: mod_base = OTHER; note = 2'-fluorouridine-3'-phosphate
  modified_base 9: mod_base = OTHER; note = 2'-fluorocytidine-3'-phosphate
  modified_base 10: mod_base = OTHER; note = 2'-O-methyladenosine-3'-phosphate
  modified_base 11: mod_base = OTHER; note = 2'-O-methyladenosine-3'-phosphate
  modified_base 12: mod_base = OTHER; note = 2'-O-methyluridine-3'-phosphate
  modified_base 13: mod_base = OTHER; note = 2'-O-methyladenosine-3'-phosphate
  modified_base 14: mod_base = OTHER; note = 2'-fluorouridine-3'-phosphate
  modified_base 15: mod_base = OTHER; note = 2'-O-methylguanosine-3'-phosphate
  modified_base 16: mod_base = OTHER; note = 2'-fluorocytidine-3'-phosphate
  modified_base 17: mod_base = OTHER; note = 2'-O-methylcytidine-3'-phosphate
  modified_base 18: mod_base = OTHER; note = 2'-O-methyluridine-3'-phosphate
  modified_base 19: mod_base = OTHER; note = 2'-O-methyluridine-3'-phosphate
  modified_base 20: mod_base = OTHER; note = 2'-O-methylcytidine-3'-phosphate
  modified_base 21: mod_base = OTHER; note = 2'-O-methyluridine-3'-phosphorothioate
  modified_base 22: mod_base = OTHER; note = 2'-O-methyladenosine-3'-phosphorothioate
  modified_base 23: mod_base = OTHER; note = 2'-O-methyladenosine-3'-phosphate
taataactcaatatgccttctaa

SEQ ID NO: 1710 - RNA, 23 nt, synthetic construct
  source 1..23: mol_type = other RNA
  modified_base 1: mod_base = OTHER; note = Vinyl-phosphonate 2'-O-methyluridine-3'-phosphorothioate
  modified_base 2: mod_base = OTHER; note = 2'-fluoroadenosine-3'-phosphorothioate
  modified_base 3: mod_base = OTHER; note = 2'-O-methyladenosine-3'-phosphate
  modified_base 4: mod_base = OTHER; note = 2'-O-methyladenosine-3'-phosphate
  modified_base 5: mod_base = OTHER; note = 2'-O-methyluridine-3'-phosphate
  modified_base 6: mod_base = OTHER; note = 2'-fluoroadenosine-3'-phosphate
  modified_base 7: mod_base = OTHER; note = 2'-O-methylguanosine-3'-phosphate
  modified_base 8: mod_base = OTHER; note = 2'-fluorocytidine-3'-phosphate
  modified_base 9: mod_base = OTHER; note = 2'-fluoroadenosine-3'-phosphate
  modified_base 10: mod_base = OTHER; note = 2'-O-methylguanosine-3'-phosphate
  modified_base 11: mod_base = OTHER; note = 2'-O-methyladenosine-3'-phosphate
  modified_base 12: mod_base = OTHER; note = 2'-O-methyladenosine-3'-phosphate
  modified_base 13: mod_base = OTHER; note = 2'-O-methyladenosine-3'-phosphate
  modified_base 14: mod_base = OTHER; note = 2'-fluoroadenosine-3'-phosphate
  modified_base 15: mod_base = OTHER; note = 2'-O-methyladenosine-3'-phosphate
  modified_base 16: mod_base = OTHER; note = 2'-fluorocytidine-3'-phosphate
  modified_base 17: mod_base = OTHER; note = 2'-O-methyluridine-3'-phosphate
  modified_base 18: mod_base = OTHER; note = 2'-O-methylcytidine-3'-phosphate
  modified_base 19: mod_base = OTHER; note = 2'-O-methylcytidine-3'-phosphate
  modified_base 20: mod_base = OTHER; note = 2'-O-methyladenosine-3'-phosphate
  modified_base 21: mod_base = OTHER; note = 2'-O-methyluridine-3'-phosphorothioate
  modified_base 22: mod_base = OTHER; note = 2'-O-methylguanosine-3'-phosphorothioate
  modified_base 23: mod_base = OTHER; note = 2'-O-methyluridine-3'-phosphate
taaatagcagaaaaactccatgt

SEQ ID NO: 1711 - RNA, 23 nt, synthetic construct
  source 1..23: mol_type = other RNA
  modified_base 1: mod_base = OTHER; note = Vinyl-phosphonate 2'-O-methyluridine-3'-phosphorothioate
  modified_base 2: mod_base = OTHER; note = 2'-fluoroadenosine-3'-phosphorothioate
  modified_base 3: mod_base = OTHER; note = 2'-O-methylcytidine-3'-phosphate
  modified_base 4: mod_base = OTHER; note = 2'-O-methyladenosine-3'-phosphate
  modified_base 5: mod_base = OTHER; note = 2'-O-methyladenosine-3'-phosphate
  modified_base 6: mod_base = OTHER; note = 2'-fluoroadenosine-3'-phosphate
  modified_base 7: mod_base = OTHER; note = 2'-O-methylcytidine-3'-phosphate
  modified_base 8: mod_base = OTHER; note = 2'-fluorouridine-3'-phosphate
  modified_base 9: mod_base = OTHER; note = 2'-fluoroadenosine-3'-phosphate
  modified_base 10: mod_base = OTHER; note = 2'-O-methyladenosine-3'-phosphate
  modified_base 11: mod_base = OTHER; note = 2'-O-methyluridine-3'-phosphate
  modified_base 12: mod_base = OTHER; note = 2'-O-methylguanosine-3'-phosphate
  modified_base 13: mod_base = OTHER; note = 2'-O-methyladenosine-3'-phosphate
  modified_base 14: mod_base = OTHER; note = 2'-fluoroguanosine-3'-phosphate
  modified_base 15: mod_base = OTHER; note = 2'-O-methyladenosine-3'-phosphate
  modified_base 16: mod_base = OTHER; note = 2'-fluoroadenosine-3'-phosphate
  modified_base 17: mod_base = OTHER; note = 2'-O-methyladenosine-3'-phosphate
  modified_base 18: mod_base = OTHER; note = 2'-O-methylcytidine-3'-phosphate
  modified_base 19: mod_base = OTHER; note = 2'-O-methyluridine-3'-phosphate
  modified_base 20: mod_base = OTHER; note = 2'-O-methylguanosine-3'-phosphate
  modified_base 21: mod_base = OTHER; note = 2'-O-methyladenosine-3'-phosphorothioate
  modified_base 22: mod_base = OTHER; note = 2'-O-methylguanosine-3'-phosphorothioate
  modified_base 23: mod_base = OTHER; note = 2'-O-methylguanosine-3'-phosphate
tacaaactaatgagaaactgagg

SEQ ID NO: 1712 - RNA, 23 nt, synthetic construct
  source 1..23: mol_type = other RNA
  modified_base 1: mod_base = OTHER; note = Vinyl-phosphonate 2'-O-methyluridine-3'-phosphorothioate
  modified_base 2: mod_base = OTHER; note = 2'-fluorouridine -3'-phosphorothioate
  modified_base 3: mod_base = OTHER; note = 2'-O-methyluridine-3'-phosphate
  modified_base 4: mod_base = OTHER; note = 2'-O-methyluridine-3'-phosphate
  modified_base 5: mod_base = OTHER; note = 2'-O-methylcytidine-3'-phosphate
  modified_base 6: mod_base = OTHER; note = 2'-fluoroguanosine-3'-phosphate
  modified_base 7: mod_base = OTHER; note = 2'-O-methyluridine-3'-phosphate
  modified_base 8: mod_base = OTHER; note = 2'-fluorouridine-3'-phosphate
  modified_base 9: mod_base = OTHER; note = 2'-fluorocytidine-3'-phosphate
  modified_base 10: mod_base = OTHER; note = 2'-O-methyluridine-3'-phosphate
  modified_base 11: mod_base = OTHER; note = 2'-O-methyluridine-3'-phosphate
  modified_base 12: mod_base = OTHER; note = 2'-O-methyladenosine-3'-phosphate
  modified_base 13: mod_base = OTHER; note = 2'-O-methyluridine-3'-phosphate
  modified_base 14: mod_base = OTHER; note = 2'-fluoroadenosine-3'-phosphate
  modified_base 15: mod_base = OTHER; note = 2'-O-methyluridine-3'-phosphate
  modified_base 16: mod_base = OTHER; note = 2'-fluoroadenosine-3'-phosphate
  modified_base 17: mod_base = OTHER; note = 2'-O-methyluridine-3'-phosphate
  modified_base 18: mod_base = OTHER; note = 2'-O-methylguanosine-3'-phosphate
  modified_base 19: mod_base = OTHER; note = 2'-O-methylcytidine-3'-phosphate
  modified_base 20: mod_base = OTHER; note = 2'-O-methyladenosine-3'-phosphate
  modified_base 21: mod_base = OTHER; note = 2'-O-methylguanosine-3'-phosphorothioate
  modified_base 22: mod_base = OTHER; note = 2'-O-methyladenosine-3'-phosphorothioate
  modified_base 23: mod_base = OTHER; note = 2'-O-methyladenosine-3'-phosphate
ttttcgttcttatatatgcagaa

SEQ ID NO: 1713 - RNA, 23 nt, synthetic construct
  source 1..23: mol_type = other RNA
  modified_base 1: mod_base = OTHER; note = Vinyl-phosphonate 2'-O-methyluridine-3'-phosphorothioate
  modified_base 2: mod_base = OTHER; note = 2'-fluoroguanosine-3'-phosphorothioate
  modified_base 3: mod_base = OTHER; note = 2'-O-methyladenosine-3'-phosphate
  modified_base 4: mod_base = OTHER; note = 2'-O-methyladenosine-3'-phosphate
  modified_base 5: mod_base = OTHER; note = 2'-O-methyluridine-3'-phosphate
  modified_base 6: mod_base = OTHER; note = 2'-fluorouridine-3'-phosphate
  modified_base 7: mod_base = OTHER; note = 2'-O-methyluridine-3'-phosphate
  modified_base 8: mod_base = OTHER; note = 2'-fluoroadenosine-3'-phosphate
  modified_base 9: mod_base = OTHER; note = 2'-fluoroadenosine-3'-phosphate
  modified_base 10: mod_base = OTHER; note = 2'-O-methyluridine-3'-phosphate
  modified_base 11: mod_base = OTHER; note = 2'-O-methyladenosine-3'-phosphate
  modified_base 12: mod_base = OTHER; note = 2'-O-methyluridine-3'-phosphate
  modified_base 13: mod_base = OTHER; note = 2'-O-methyluridine-3'-phosphate
  modified_base 14: mod_base = OTHER; note = 2'-fluorouridine-3'-phosphate
  modified_base 15: mod_base = OTHER; note = 2'-O-methyluridine-3'-phosphate
  modified_base 16: mod_base = OTHER; note = 2'-fluoroguanosine-3'-phosphate
  modified_base 17: mod_base = OTHER; note = 2'-O-methylguanosine-3'-phosphate
  modified_base 18: mod_base = OTHER; note = 2'-O-methylcytidine-3'-phosphate
  modified_base 19: mod_base = OTHER; note = 2'-O-methyluridine-3'-phosphate
  modified_base 20: mod_base = OTHER; note = 2'-O-methylcytidine-3'-phosphate
  modified_base 21: mod_base = OTHER; note = 2'-O-methyladenosine-3'-phosphorothioate
  modified_base 22: mod_base = OTHER; note = 2'-O-methylguanosine-3'-phosphorothioate
  modified_base 23: mod_base = OTHER; note = 2'-O-methyladenosine-3'-phosphate
tgaatttaatattttggctcaga

SEQ ID NO: 1714 - RNA, 23 nt, synthetic construct
  source 1..23: mol_type = other RNA
  modified_base 1: mod_base = OTHER; note = Vinyl-phosphonate 2'-O-methyluridine-3'-phosphorothioate
  modified_base 2: mod_base = OTHER; note = 2'-fluoroadenosine-3'-phosphorothioate
  modified_base 3: mod_base = OTHER; note = 2'-O-methyladenosine-3'-phosphate
  modified_base 4: mod_base = OTHER; note = 2'-O-methyladenosine-3'-phosphate
  modified_base 5: mod_base = OTHER; note = 2'-O-methyladenosine-3'-phosphate
  modified_base 6: mod_base = OTHER; note = 2'-fluorocytidine-3'-phosphate
  modified_base 7: mod_base = OTHER; note = 2'-O-methyladenosine-3'-phosphate
  modified_base 8: mod_base = OTHER; note = 2'-fluoroguanosine-3'-phosphate
  modified_base 9: mod_base = OTHER; note = 2'-fluoroguanosine-3'-phosphate
  modified_base 10: mod_base = OTHER; note = 2'-O-methyladenosine-3'-phosphate
  modified_base 11: mod_base = OTHER; note = 2'-O-methyladenosine-3'-phosphate
  modified_base 12: mod_base = OTHER; note = 2'-O-methyladenosine-3'-phosphate
  modified_base 13: mod_base = OTHER; note = 2'-O-methyluridine-3'-phosphate
  modified_base 14: mod_base = OTHER; note = 2'-fluoroadenosine-3'-phosphate
  modified_base 15: mod_base = OTHER; note = 2'-O-methyluridine-3'-phosphate
  modified_base 16: mod_base = OTHER; note = 2'-fluorocytidine-3'-phosphate
  modified_base 17: mod_base = OTHER; note = 2'-O-methyladenosine-3'-phosphate
  modified_base 18: mod_base = OTHER; note = 2'-O-methyluridine-3'-phosphate
  modified_base 19: mod_base = OTHER; note = 2'-O-methyluridine-3'-phosphate
  modified_base 20: mod_base = OTHER; note = 2'-O-methylcytidine-3'-phosphate
  modified_base 21: mod_base = OTHER; note = 2'-O-methyluridine-3'-phosphorothioate
  modified_base 22: mod_base = OTHER; note = 2'-O-methyluridine-3'-phosphorothioate
  modified_base 23: mod_base = OTHER; note = 2'-O-methylguanosine-3'-phosphate
taaaacaggaaatatcattcttg

SEQ ID NO: 1715 - RNA, 23 nt, synthetic construct
  source 1..23: mol_type = other RNA
  modified_base 1: mod_base = OTHER; note = Vinyl-phosphonate 2'-O-methyluridine-3'-phosphorothioate
  modified_base 2: mod_base = OTHER; note = 2'-fluoroguanosine-3'-phosphorothioate
  modified_base 3: mod_base = OTHER; note = 2'-O-methylguanosine-3'-phosphate
  modified_base 4: mod_base = OTHER; note = 2'-O-methyladenosine-3'-phosphate
  modified_base 5: mod_base = OTHER; note = 2'-O-methyladenosine-3'-phosphate
  modified_base 6: mod_base = OTHER; note = 2'-fluoroguanosine-3'-phosphate
  modified_base 7: mod_base = OTHER; note = 2'-O-methyladenosine-3'-phosphate
  modified_base 8: mod_base = OTHER; note = 2'-fluorouridine-3'-phosphate
  modified_base 9: mod_base = OTHER; note = 2'-fluorouridine-3'-phosphate
  modified_base 10: mod_base = OTHER; note = 2'-O-methyluridine-3'-phosphate
  modified_base 11: mod_base = OTHER; note = 2'-O-methyladenosine-3'-phosphate
  modified_base 12: mod_base = OTHER; note = 2'-O-methyluridine-3'-phosphate
  modified_base 13: mod_base = OTHER; note = 2'-O-methyladenosine-3'-phosphate
  modified_base 14: mod_base = OTHER; note = 2'-fluorouridine-3'-phosphate
  modified_base 15: mod_base = OTHER; note = 2'-O-methyladenosine-3'-phosphate
  modified_base 16: mod_base = OTHER; note = 2'-fluoroguanosine-3'-phosphate
  modified_base 17: mod_base = OTHER; note = 2'-O-methyladenosine-3'-phosphate
  modified_base 18: mod_base = OTHER; note = 2'-O-methylguanosine-3'-phosphate
  modified_base 19: mod_base = OTHER; note = 2'-O-methylcytidine-3'-phosphate
  modified_base 20: mod_base = OTHER; note = 2'-O-methyladenosine-3'-phosphate
  modified_base 21: mod_base = OTHER; note = 2'-O-methylcytidine-3'-phosphorothioate
  modified_base 22: mod_base = OTHER; note = 2'-O-methyladenosine-3'-phosphorothioate
  modified_base 23: mod_base = OTHER; note = 2'-O-methyladenosine-3'-phosphate
tggaagatttatatagagcacaa

SEQ ID NO: 1716 - RNA, 23 nt, synthetic construct
  source 1..23: mol_type = other RNA
  modified_base 1: mod_base = OTHER; note = Vinyl-phosphonate 2'-O-methyluridine-3'-phosphorothioate
  modified_base 2: mod_base = OTHER; note = 2'-fluoroadenosine-3'-phosphorothioate
  modified_base 3: mod_base = OTHER; note = 2'-O-methyluridine-3'-phosphate
  modified_base 4: mod_base = OTHER; note = 2'-O-methyladenosine-3'-phosphate
  modified_base 5: mod_base = OTHER; note = 2'-O-methyladenosine-3'-phosphate
  modified_base 6: mod_base = OTHER; note = 2'-fluoroguanosine-3'-phosphate
  modified_base 7: mod_base = OTHER; note = 2'-O-methyladenosine-3'-phosphate
  modified_base 8: mod_base = OTHER; note = 2'-fluorouridine-3'-phosphate
  modified_base 9: mod_base = OTHER; note = 2'-fluoroguanosine-3'-phosphate
  modified_base 10: mod_base = OTHER; note = 2'-O-methylcytidine-3'-phosphate
  modified_base 11: mod_base = OTHER; note = 2'-O-methyluridine-3'-phosphate
  modified_base 12: mod_base = OTHER; note = 2'-O-methyluridine-3'-phosphate
  modified_base 13: mod_base = OTHER; note = 2'-O-methylcytidine-3'-phosphate
  modified_base 14: mod_base = OTHER; note = 2'-fluorouridine-3'-phosphate
  modified_base 15: mod_base = OTHER; note = 2'-O-methylcytidine-3'-phosphate
  modified_base 16: mod_base = OTHER; note = 2'-fluorouridine-3'-phosphate
  modified_base 17: mod_base = OTHER; note = 2'-O-methylguanosine-3'-phosphate
  modified_base 18: mod_base = OTHER; note = 2'-O-methyluridine-3'-phosphate
  modified_base 19: mod_base = OTHER; note = 2'-O-methyladenosine-3'-phosphate
  modified_base 20: mod_base = OTHER; note = 2'-O-methyladenosine-3'-phosphate
  modified_base 21: mod_base = OTHER; note = 2'-O-methyladenosine-3'-phosphorothioate
  modified_base 22: mod_base = OTHER; note = 2'-O-methyladenosine-3'-phosphorothioate
  modified_base 23: mod_base = OTHER; note = 2'-O-methyluridine-3'-phosphate
tataagatgcttctctgtaaaat

SEQ ID NO: 1717 - RNA, 23 nt, synthetic construct
  source 1..23: mol_type = other RNA
  modified_base 1: mod_base = OTHER; note = Vinyl-phosphonate 2'-O-methyluridine-3'-phosphorothioate
  modified_base 2: mod_base = OTHER; note = 2'-fluorouridine -3'-phosphorothioate
  modified_base 3: mod_base = OTHER; note = 2'-O-methylguanosine-3'-phosphate
  modified_base 4: mod_base = OTHER; note = 2'-O-methyluridine-3'-phosphate
  modified_base 5: mod_base = OTHER; note = 2'-O-methylcytidine-3'-phosphate
  modified_base 6: mod_base = OTHER; note = 2'-fluoroadenosine-3'-phosphate
  modified_base 7: mod_base = OTHER; note = 2'-O-methyluridine-3'-phosphate
  modified_base 8: mod_base = OTHER; note = 2'-fluoroguanosine-3'-phosphate
  modified_base 9: mod_base = OTHER; note = 2'-fluorocytidine-3'-phosphate
  modified_base 10: mod_base = OTHER; note = 2'-O-methyladenosine-3'-phosphate
  modified_base 11: mod_base = OTHER; note = 2'-O-methylguanosine-3'-phosphate
  modified_base 12: mod_base = OTHER; note = 2'-O-methyladenosine-3'-phosphate
  modified_base 13: mod_base = OTHER; note = 2'-O-methyladenosine-3'-phosphate
  modified_base 14: mod_base = OTHER; note = 2'-fluorocytidine-3'-phosphate
  modified_base 15: mod_base = OTHER; note = 2'-O-methyluridine-3'-phosphate
  modified_base 16: mod_base = OTHER; note = 2'-fluorocytidine-3'-phosphate
  modified_base 17: mod_base = OTHER; note = 2'-O-methyladenosine-3'-phosphate
  modified_base 18: mod_base = OTHER; note = 2'-O-methyladenosine-3'-phosphate
  modified_base 19: mod_base = OTHER; note = 2'-O-methylguanosine-3'-phosphate
  modified_base 20: mod_base = OTHER; note = 2'-O-methyladenosine-3'-phosphate
  modified_base 21: mod_base = OTHER; note = 2'-O-methylcytidine-3'-phosphorothioate
  modified_base 22: mod_base = OTHER; note = 2'-O-methyladenosine-3'-phosphorothioate
  modified_base 23: mod_base = OTHER; note = 2'-O-methyluridine-3'-phosphate
ttgtcatgcagaactcaagacat

SEQ ID NO: 1718 - RNA, 23 nt, synthetic construct
  source 1..23: mol_type = other RNA
  modified_base 1: mod_base = OTHER; note = Vinyl-phosphonate 2'-O-methyluridine-3'-phosphorothioate
  modified_base 2: mod_base = OTHER; note = 2'-fluoroguanosine-3'-phosphorothioate
  modified_base 3: mod_base = OTHER; note = 2'-O-methyluridine-3'-phosphate
  modified_base 4: mod_base = OTHER; note = 2'-O-methyladenosine-3'-phosphate
  modified_base 5: mod_base = OTHER; note = 2'-O-methyladenosine-3'-phosphate
  modified_base 6: mod_base = OTHER; note = 2'-fluoroadenosine-3'-phosphate
  modified_base 7: mod_base = OTHER; note = 2'-O-methyladenosine-3'-phosphate
  modified_base 8: mod_base = OTHER; note = 2'-fluorouridine-3'-phosphate
  modified_base 9: mod_base = OTHER; note = 2'-fluorouridine-3'-phosphate
  modified_base 10: mod_base = OTHER; note = 2'-O-methyladenosine-3'-phosphate
  modified_base 11: mod_base = OTHER; note = 2'-O-methyluridine-3'-phosphate
  modified_base 12: mod_base = OTHER; note = 2'-O-methyladenosine-3'-phosphate
  modified_base 13: mod_base = OTHER; note = 2'-O-methylguanosine-3'-phosphate
  modified_base 14: mod_base = OTHER; note = 2'-fluoroadenosine-3'-phosphate
  modified_base 15: mod_base = OTHER; note = 2'-O-methyluridine-3'-phosphate
  modified_base 16: mod_base = OTHER; note = 2'-fluorouridine-3'-phosphate
  modified_base 17: mod_base = OTHER; note = 2'-O-methyluridine-3'-phosphate
  modified_base 18: mod_base = OTHER; note = 2'-O-methylguanosine-3'-phosphate
  modified_base 19: mod_base = OTHER; note = 2'-O-methyladenosine-3'-phosphate
  modified_base 20: mod_base = OTHER; note = 2'-O-methyladenosine-3'-phosphate
  modified_base 21: mod_base = OTHER; note = 2'-O-methylguanosine-3'-phosphorothioate
  modified_base 22: mod_base = OTHER; note = 2'-O-methylguanosine-3'-phosphorothioate
  modified_base 23: mod_base = OTHER; note = 2'-O-methylguanosine-3'-phosphate
tgtaaaattatagatttgaaggg

SEQ ID NO: 1719 - RNA, 23 nt, synthetic construct
  source 1..23: mol_type = other RNA
  modified_base 1: mod_base = OTHER; note = Vinyl-phosphonate 2'-O-methyluridine-3'-phosphorothioate
  modified_base 2: mod_base = OTHER; note = 2'-fluoroadenosine-3'-phosphorothioate
  modified_base 3: mod_base = OTHER; note = 2'-O-methyladenosine-3'-phosphate
  modified_base 4: mod_base = OTHER; note = 2'-O-methyluridine-3'-phosphate
  modified_base 5: mod_base = OTHER; note = 2'-O-methyladenosine-3'-phosphate
  modified_base 6: mod_base = OTHER; note = 2'-fluoroguanosine-3'-phosphate
  modified_base 7: mod_base = OTHER; note = 2'-O-methyladenosine-3'-phosphate
  modified_base 8: mod_base = OTHER; note = 2'-fluoroguanosine-3'-phosphate
  modified_base 9: mod_base = OTHER; note = 2'-fluorouridine-3'-phosphate
  modified_base 10: mod_base = OTHER; note = 2'-O-methyluridine-3'-phosphate
  modified_base 11: mod_base = OTHER; note = 2'-O-methylcytidine-3'-phosphate
  modified_base 12: mod_base = OTHER; note = 2'-O-methyluridine-3'-phosphate
  modified_base 13: mod_base = OTHER; note = 2'-O-methyladenosine-3'-phosphate
  modified_base 14: mod_base = OTHER; note = 2'-fluorouridine-3'-phosphate
  modified_base 15: mod_base = OTHER; note = 2'-O-methyladenosine-3'-phosphate
  modified_base 16: mod_base = OTHER; note = 2'-fluorouridine-3'-phosphate
  modified_base 17: mod_base = OTHER; note = 2'-O-methylguanosine-3'-phosphate
  modified_base 18: mod_base = OTHER; note = 2'-O-methylcytidine-3'-phosphate
  modified_base 19: mod_base = OTHER; note = 2'-O-methyluridine-3'-phosphate
  modified_base 20: mod_base = OTHER; note = 2'-O-methyluridine-3'-phosphate
  modified_base 21: mod_base = OTHER; note = 2'-O-methylcytidine-3'-phosphorothioate
  modified_base 22: mod_base = OTHER; note = 2'-O-methyladenosine-3'-phosphorothioate
  modified_base 23: mod_base = OTHER; note = 2'-O-methylcytidine-3'-phosphate
taatagagttctatatgcttcac

SEQ ID NO: 1720 - RNA, 23 nt, synthetic construct
  source 1..23: mol_type = other RNA
  modified_base 1: mod_base = OTHER; note = Vinyl-phosphonate 2'-O-methyluridine-3'-phosphorothioate
  modified_base 2: mod_base = OTHER; note = 2'-fluorouridine -3'-phosphorothioate
  modified_base 3: mod_base = OTHER; note = 2'-O-methyluridine-3'-phosphate
  modified_base 4: mod_base = OTHER; note = 2'-O-methylguanosine-3'-phosphate
  modified_base 5: mod_base = OTHER; note = 2'-O-methyluridine-3'-phosphate
  modified_base 6: mod_base = OTHER; note = 2'-fluorouridine-3'-phosphate
  modified_base 7: mod_base = OTHER; note = 2'-O-methyladenosine-3'-phosphate
  modified_base 8: mod_base = OTHER; note = 2'-fluorouridine-3'-phosphate
  modified_base 9: mod_base = OTHER; note = 2'-fluorouridine-3'-phosphate
  modified_base 10: mod_base = OTHER; note = 2'-O-methyluridine-3'-phosphate
  modified_base 11: mod_base = OTHER; note = 2'-O-methyladenosine-3'-phosphate
  modified_base 12: mod_base = OTHER; note = 2'-O-methylguanosine-3'-phosphate
  modified_base 13: mod_base = OTHER; note = 2'-O-methyladenosine-3'-phosphate
  modified_base 14: mod_base = OTHER; note = 2'-fluoroadenosine-3'-phosphate
  modified_base 15: mod_base = OTHER; note = 2'-O-methylguanosine-3'-phosphate
  modified_base 16: mod_base = OTHER; note = 2'-fluorocytidine-3'-phosphate
  modified_base 17: mod_base = OTHER; note = 2'-O-methyladenosine-3'-phosphate
  modified_base 18: mod_base = OTHER; note = 2'-O-methylguanosine-3'-phosphate
  modified_base 19: mod_base = OTHER; note = 2'-O-methylcytidine-3'-phosphate
  modified_base 20: mod_base = OTHER; note = 2'-O-methyluridine-3'-phosphate
  modified_base 21: mod_base = OTHER; note = 2'-O-methylcytidine-3'-phosphorothioate
  modified_base 22: mod_base = OTHER; note = 2'-O-methyluridine-3'-phosphorothioate
  modified_base 23: mod_base = OTHER; note = 2'-O-methylcytidine-3'-phosphate
tttgttatttagaagcagctctc

SEQ ID NO: 1721 - RNA, 23 nt, synthetic construct
  source 1..23: mol_type = other RNA
  modified_base 1: mod_base = OTHER; note = Vinyl-phosphonate 2'-O-methyluridine-3'-phosphorothioate
  modified_base 2: mod_base = OTHER; note = 2'-fluoroadenosine-3'-phosphorothioate
  modified_base 3: mod_base = OTHER; note = 2'-O-methyluridine-3'-phosphate
  modified_base 4: mod_base = OTHER; note = 2'-O-methylguanosine-3'-phosphate
  modified_base 5: mod_base = OTHER; note = 2'-O-methyladenosine-3'-phosphate
  modified_base 6: mod_base = OTHER; note = 2'-fluorouridine-3'-phosphate
  modified_base 7: mod_base = OTHER; note = 2'-O-methylcytidine-3'-phosphate
  modified_base 8: mod_base = OTHER; note = 2'-fluoroadenosine-3'-phosphate
  modified_base 9: mod_base = OTHER; note = 2'-fluoroguanosine-3'-phosphate
  modified_base 10: mod_base = OTHER; note = 2'-O-methylguanosine-3'-phosphate
  modified_base 11: mod_base = OTHER; note = 2'-O-methyladenosine-3'-phosphate
  modified_base 12: mod_base = OTHER; note = 2'-O-methyladenosine-3'-phosphate
  modified_base 13: mod_base = OTHER; note = 2'-O-methyladenosine-3'-phosphate
  modified_base 14: mod_base = OTHER; note = 2'-fluorouridine-3'-phosphate
  modified_base 15: mod_base = OTHER; note = 2'-O-methyladenosine-3'-phosphate
  modified_base 16: mod_base = OTHER; note = 2'-fluorocytidine-3'-phosphate
  modified_base 17: mod_base = OTHER; note = 2'-O-methyladenosine-3'-phosphate
  modified_base 18: mod_base = OTHER; note = 2'-O-methylguanosine-3'-phosphate
  modified_base 19: mod_base = OTHER; note = 2'-O-methyluridine-3'-phosphate
  modified_base 20: mod_base = OTHER; note = 2'-O-methylcytidine-3'-phosphate
  modified_base 21: mod_base = OTHER; note = 2'-O-methyladenosine-3'-phosphorothioate
  modified_base 22: mod_base = OTHER; note = 2'-O-methylcytidine-3'-phosphorothioate
  modified_base 23: mod_base = OTHER; note = 2'-O-methyladenosine-3'-phosphate
tatgatcaggaaatacagtcaca

SEQ ID NO: 1722 - RNA, 23 nt, synthetic construct
  source 1..23: mol_type = other RNA
  modified_base 1: mod_base = OTHER; note = Vinyl-phosphonate 2'-O-methyluridine-3'-phosphorothioate
  modified_base 2: mod_base = OTHER; note = 2'-fluoroadenosine-3'-phosphorothioate
  modified_base 3: mod_base = OTHER; note = 2'-O-methylguanosine-3'-phosphate
  modified_base 4: mod_base = OTHER; note = 2'-O-methyladenosine-3'-phosphate
  modified_base 5: mod_base = OTHER; note = 2'-O-methyladenosine-3'-phosphate
  modified_base 6: mod_base = OTHER; note = 2'-fluoroguanosine-3'-phosphate
  modified_base 7: mod_base = OTHER; note = 2'-O-methyluridine-3'-phosphate
  modified_base 8: mod_base = OTHER; note = 2'-fluoroadenosine-3'-phosphate
  modified_base 9: mod_base = OTHER; note = 2'-fluorouridine-3'-phosphate
  modified_base 10: mod_base = OTHER; note = 2'-O-methyladenosine-3'-phosphate
  modified_base 11: mod_base = OTHER; note = 2'-O-methyluridine-3'-phosphate
  modified_base 12: mod_base = OTHER; note = 2'-O-methylcytidine-3'-phosphate
  modified_base 13: mod_base = OTHER; note = 2'-O-methylcytidine-3'-phosphate
  modified_base 14: mod_base = OTHER; note = 2'-fluorouridine-3'-phosphate
  modified_base 15: mod_base = OTHER; note = 2'-O-methyluridine-3'-phosphate
  modified_base 16: mod_base = OTHER; note = 2'-fluorocytidine-3'-phosphate
  modified_base 17: mod_base = OTHER; note = 2'-O-methyladenosine-3'-phosphate
  modified_base 18: mod_base = OTHER; note = 2'-O-methylguanosine-3'-phosphate
  modified_base 19: mod_base = OTHER; note = 2'-O-methyladenosine-3'-phosphate
  modified_base 20: mod_base = OTHER; note = 2'-O-methyladenosine-3'-phosphate
  modified_base 21: mod_base = OTHER; note = 2'-O-methylcytidine-3'-phosphorothioate
  modified_base 22: mod_base = OTHER; note = 2'-O-methylguanosine-3'-phosphorothioate
  modified_base 23: mod_base = OTHER; note = 2'-O-methylcytidine-3'-phosphate
tagaagtatatccttcagaacgc

SEQ ID NO: 1723 - RNA, 23 nt, synthetic construct
  source 1..23: mol_type = other RNA
  modified_base 1: mod_base = OTHER; note = Vinyl-phosphonate 2'-O-methyluridine-3'-phosphorothioate
  modified_base 2: mod_base = OTHER; note = 2'-fluoroadenosine-3'-phosphorothioate
  modified_base 3: mod_base = OTHER; note = 2'-O-methylguanosine-3'-phosphate
  modified_base 4: mod_base = OTHER; note = 2'-O-methyluridine-3'-phosphate
  modified_base 5: mod_base = OTHER; note = 2'-O-methyladenosine-3'-phosphate
  modified_base 6: mod_base = OTHER; note = 2'-fluorouridine-3'-phosphate
  modified_base 7: mod_base = OTHER; note = 2'-O-methyluridine-3'-phosphate
  modified_base 8: mod_base = OTHER; note = 2'-fluoroguanosine-3'-phosphate
  modified_base 9: mod_base = OTHER; note = 2'-fluoroadenosine-3'-phosphate
  modified_base 10: mod_base = OTHER; note = 2'-O-methyladenosine-3'-phosphate
  modified_base 11: mod_base = OTHER; note = 2'-O-methyluridine-3'-phosphate
  modified_base 12: mod_base = OTHER; note = 2'-O-methylcytidine-3'-phosphate
  modified_base 13: mod_base = OTHER; note = 2'-O-methyladenosine-3'-phosphate
  modified_base 14: mod_base = OTHER; note = 2'-fluorouridine-3'-phosphate
  modified_base 15: mod_base = OTHER; note = 2'-O-methylguanosine-3'-phosphate
  modified_base 16: mod_base = OTHER; note = 2'-fluorocytidine-3'-phosphate
  modified_base 17: mod_base = OTHER; note = 2'-O-methyluridine-3'-phosphate
  modified_base 18: mod_base = OTHER; note = 2'-O-methyluridine-3'-phosphate
  modified_base 19: mod_base = OTHER; note = 2'-O-methylcytidine-3'-phosphate
  modified_base 20: mod_base = OTHER; note = 2'-O-methyladenosine-3'-phosphate
  modified_base 21: mod_base = OTHER; note = 2'-O-methylcytidine-3'-phosphorothioate
  modified_base 22: mod_base = OTHER; note = 2'-O-methyladenosine-3'-phosphorothioate
  modified_base 23: mod_base = OTHER; note = 2'-O-methylguanosine-3'-phosphate
tagtattgaatcatgcttcacag

SEQ ID NO: 1724 - RNA, 23 nt, synthetic construct
  source 1..23: mol_type = other RNA
  modified_base 1: mod_base = OTHER; note = Vinyl-phosphonate 2'-O-methyluridine-3'-phosphorothioate
  modified_base 2: mod_base = OTHER; note = 2'-fluoroadenosine-3'-phosphorothioate
  modified_base 3: mod_base = OTHER; note = 2'-O-methyladenosine-3'-phosphate
  modified_base 4: mod_base = OTHER; note = 2'-O-methyladenosine-3'-phosphate
  modified_base 5: mod_base = OTHER; note = 2'-O-methyladenosine-3'-phosphate
  modified_base 6: mod_base = OTHER; note = 2'-fluorouridine-3'-phosphate
  modified_base 7: mod_base = OTHER; note = 2'-O-methylcytidine-3'-phosphate
  modified_base 8: mod_base = OTHER; note = 2'-fluorouridine-3'-phosphate
  modified_base 9: mod_base = OTHER; note = 2'-fluoroguanosine-3'-phosphate
  modified_base 10: mod_base = OTHER; note = 2'-O-methyluridine-3'-phosphate
  modified_base 11: mod_base = OTHER; note = 2'-O-methylguanosine-3'-phosphate
  modified_base 12: mod_base = OTHER; note = 2'-O-methyladenosine-3'-phosphate
  modified_base 13: mod_base = OTHER; note = 2'-O-methyladenosine-3'-phosphate
  modified_base 14: mod_base = OTHER; note = 2'-fluoroguanosine-3'-phosphate
  modified_base 15: mod_base = OTHER; note = 2'-O-methylcytidine-3'-phosphate
  modified_base 16: mod_base = OTHER; note = 2'-fluoroadenosine-3'-phosphate
  modified_base 17: mod_base = OTHER; note = 2'-O-methylguanosine-3'-phosphate
  modified_base 18: mod_base = OTHER; note = 2'-O-methylcytidine-3'-phosphate
  modified_base 19: mod_base = OTHER; note = 2'-O-methyladenosine-3'-phosphate
  modified_base 20: mod_base = OTHER; note = 2'-O-methyluridine-3'-phosphate
  modified_base 21: mod_base = OTHER; note = 2'-O-methyluridine-3'-phosphorothioate
  modified_base 22: mod_base = OTHER; note = 2'-O-methylcytidine-3'-phosphorothioate
  modified_base 23: mod_base = OTHER; note = 2'-O-methylguanosine-3'-phosphate
taaaatctgtgaagcagcattcg

SEQ ID NO: 1725 - RNA, 23 nt, synthetic construct
  source 1..23: mol_type = other RNA
  modified_base 1: mod_base = OTHER; note = Vinyl-phosphonate 2'-O-methyluridine-3'-phosphorothioate
  modified_base 2: mod_base = OTHER; note = 2'-fluorouridine -3'-phosphorothioate
  modified_base 3: mod_base = OTHER; note = 2'-O-methylcytidine-3'-phosphate
  modified_base 4: mod_base = OTHER; note = 2'-O-methyladenosine-3'-phosphate
  modified_base 5: mod_base = OTHER; note = 2'-O-methylguanosine-3'-phosphate
  modified_base 6: mod_base = OTHER; note = 2'-fluoroadenosine-3'-phosphate
  modified_base 7: mod_base = OTHER; note = 2'-O-methyluridine-3'-phosphate
  modified_base 8: mod_base = OTHER; note = 2'-fluorouridine-3'-phosphate
  modified_base 9: mod_base = OTHER; note = 2'-fluoroadenosine-3'-phosphate
  modified_base 10: mod_base = OTHER; note = 2'-O-methyladenosine-3'-phosphate
  modified_base 11: mod_base = OTHER; note = 2'-O-methylcytidine-3'-phosphate
  modified_base 12: mod_base = OTHER; note = 2'-O-methyladenosine-3'-phosphate
  modified_base 13: mod_base = OTHER; note = 2'-O-methyluridine-3'-phosphate
  modified_base 14: mod_base = OTHER; note = 2'-fluoroadenosine-3'-phosphate
  modified_base 15: mod_base = OTHER; note = 2'-O-methyladenosine-3'-phosphate
  modified_base 16: mod_base = OTHER; note = 2'-fluorocytidine-3'-phosphate
  modified_base 17: mod_base = OTHER; note = 2'-O-methylcytidine-3'-phosphate
  modified_base 18: mod_base = OTHER; note = 2'-O-methylcytidine-3'-phosphate
  modified_base 19: mod_base = OTHER; note = 2'-O-methyladenosine-3'-phosphate
  modified_base 20: mod_base = OTHER; note = 2'-O-methylcytidine-3'-phosphate
  modified_base 21: mod_base = OTHER; note = 2'-O-methyladenosine-3'-phosphorothioate
  modified_base 22: mod_base = OTHER; note = 2'-O-methylguanosine-3'-phosphorothioate
  modified_base 23: mod_base = OTHER; note = 2'-O-methyluridine-3'-phosphate
ttcagattaacataacccacagt

SEQ ID NO: 1726 - RNA, 23 nt, synthetic construct
  source 1..23: mol_type = other RNA
  modified_base 1: mod_base = OTHER; note = Vinyl-phosphonate 2'-O-methyluridine-3'-phosphorothioate
  modified_base 2: mod_base = OTHER; note = 2'-fluoroadenosine-3'-phosphorothioate
  modified_base 3: mod_base = OTHER; note = 2'-O-methyluridine-3'-phosphate
  modified_base 4: mod_base = OTHER; note = 2'-O-methylguanosine-3'-phosphate
  modified_base 5: mod_base = OTHER; note = 2'-O-methyladenosine-3'-phosphate
  modified_base 6: mod_base = OTHER; note = 2'-fluoroguanosine-3'-phosphate
  modified_base 7: mod_base = OTHER; note = 2'-O-methylcytidine-3'-phosphate
  modified_base 8: mod_base = OTHER; note = 2'-fluoroadenosine-3'-phosphate
  modified_base 9: mod_base = OTHER; note = 2'-fluorouridine-3'-phosphate
  modified_base 10: mod_base = OTHER; note = 2'-O-methyluridine-3'-phosphate
  modified_base 11: mod_base = OTHER; note = 2'-O-methylcytidine-3'-phosphate
  modified_base 12: mod_base = OTHER; note = 2'-O-methyluridine-3'-phosphate
  modified_base 13: mod_base = OTHER; note = 2'-O-methyluridine-3'-phosphate
  modified_base 14: mod_base = OTHER; note = 2'-fluorocytidine-3'-phosphate
  modified_base 15: mod_base = OTHER; note = 2'-O-methyluridine-3'-phosphate
  modified_base 16: mod_base = OTHER; note = 2'-fluoroguanosine-3'-phosphate
  modified_base 17: mod_base = OTHER; note = 2'-O-methyluridine-3'-phosphate
  modified_base 18: mod_base = OTHER; note = 2'-O-methyladenosine-3'-phosphate
  modified_base 19: mod_base = OTHER; note = 2'-O-methylcytidine-3'-phosphate
  modified_base 20: mod_base = OTHER; note = 2'-O-methyluridine-3'-phosphate
  modified_base 21: mod_base = OTHER; note = 2'-O-methylcytidine-3'-phosphorothioate
  modified_base 22: mod_base = OTHER; note = 2'-O-methyladenosine-3'-phosphorothioate
  modified_base 23: mod_base = OTHER; note = 2'-O-methylcytidine-3'-phosphate
tatgagcattcttctgtactcac

SEQ ID NO: 1727 - RNA, 23 nt, synthetic construct
  source 1..23: mol_type = other RNA
  modified_base 1: mod_base = OTHER; note = Vinyl-phosphonate 2'-O-methyluridine-3'-phosphorothioate
  modified_base 2: mod_base = OTHER; note = 2'-fluoroadenosine-3'-phosphorothioate
  modified_base 3: mod_base = OTHER; note = 2'-O-methyladenosine-3'-phosphate
  modified_base 4: mod_base = OTHER; note = 2'-O-methyladenosine-3'-phosphate
  modified_base 5: mod_base = OTHER; note = 2'-O-methyluridine-3'-phosphate
  modified_base 6: mod_base = OTHER; note = 2'-fluorocytidine-3'-phosphate
  modified_base 7: mod_base = OTHER; note = 2'-O-methyluridine-3'-phosphate
  modified_base 8: mod_base = OTHER; note = 2'-fluoroadenosine-3'-phosphate
  modified_base 9: mod_base = OTHER; note = 2'-fluoroguanosine-3'-phosphate
  modified_base 10: mod_base = OTHER; note = 2'-O-methylguanosine-3'-phosphate
  modified_base 11: mod_base = OTHER; note = 2'-O-methyladenosine-3'-phosphate
  modified_base 12: mod_base = OTHER; note = 2'-O-methyluridine-3'-phosphate
  modified_base 13: mod_base = OTHER; note = 2'-O-methylguanosine-3'-phosphate
  modified_base 14: mod_base = OTHER; note = 2'-fluoroadenosine-3'-phosphate
  modified_base 15: mod_base = OTHER; note = 2'-O-methyladenosine-3'-phosphate
  modified_base 16: mod_base = OTHER; note = 2'-fluoroadenosine-3'-phosphate
  modified_base 17: mod_base = OTHER; note = 2'-O-methyluridine-3'-phosphate
  modified_base 18: mod_base = OTHER; note = 2'-O-methyladenosine-3'-phosphate
  modified_base 19: mod_base = OTHER; note = 2'-O-methylcytidine-3'-phosphate
  modified_base 20: mod_base = OTHER; note = 2'-O-methyladenosine-3'-phosphate
  modified_base 21: mod_base = OTHER; note = 2'-O-methylguanosine-3'-phosphorothioate
  modified_base 22: mod_base = OTHER; note = 2'-O-methylcytidine-3'-phosphorothioate
  modified_base 23: mod_base = OTHER; note = 2'-O-methyluridine-3'-phosphate
taaatctaggatgaaatacagct

SEQ ID NO: 1728 - RNA, 23 nt, synthetic construct
  source 1..23: mol_type = other RNA
  modified_base 1: mod_base = OTHER; note = Vinyl-phosphonate 2'-O-methyluridine-3'-phosphorothioate
  modified_base 2: mod_base = OTHER; note = 2'-fluorouridine -3'-phosphorothioate
  modified_base 3: mod_base = OTHER; note = 2'-O-methyluridine-3'-phosphate
  modified_base 4: mod_base = OTHER; note = 2'-O-methyluridine-3'-phosphate
  modified_base 5: mod_base = OTHER; note = 2'-O-methylcytidine-3'-phosphate
  modified_base 6: mod_base = OTHER; note = 2'-fluorocytidine-3'-phosphate
  modified_base 7: mod_base = OTHER; note = 2'-O-methyladenosine-3'-phosphate
  modified_base 8: mod_base = OTHER; note = 2'-fluoroguanosine-3'-phosphate
  modified_base 9: mod_base = OTHER; note = 2'-fluorocytidine-3'-phosphate
  modified_base 10: mod_base = OTHER; note = 2'-O-methyladenosine-3'-phosphate
  modified_base 11: mod_base = OTHER; note = 2'-O-methyluridine-3'-phosphate
  modified_base 12: mod_base = OTHER; note = 2'-O-methyluridine-3'-phosphate
  modified_base 13: mod_base = OTHER; note = 2'-O-methyluridine-3'-phosphate
  modified_base 14: mod_base = OTHER; note = 2'-fluoroadenosine-3'-phosphate
  modified_base 15: mod_base = OTHER; note = 2'-O-methylcytidine-3'-phosphate
  modified_base 16: mod_base = OTHER; note = 2'-fluorocytidine-3'-phosphate
  modified_base 17: mod_base = OTHER; note = 2'-O-methyladenosine-3'-phosphate
  modified_base 18: mod_base = OTHER; note = 2'-O-methylguanosine-3'-phosphate
  modified_base 19: mod_base = OTHER; note = 2'-O-methyladenosine-3'-phosphate
  modified_base 20: mod_base = OTHER; note = 2'-O-methyluridine-3'-phosphate
  modified_base 21: mod_base = OTHER; note = 2'-O-methyluridine-3'-phosphorothioate
  modified_base 22: mod_base = OTHER; note = 2'-O-methylguanosine-3'-phosphorothioate
  modified_base 23: mod_base = OTHER; note = 2'-O-methylcytidine-3'-phosphate
ttttccagcatttaccagattgc

SEQ ID NO: 1729 - RNA, 23 nt, synthetic construct
  source 1..23: mol_type = other RNA
  modified_base 1: mod_base = OTHER; note = Vinyl-phosphonate 2'-O-methyluridine-3'-phosphorothioate
  modified_base 2: mod_base = OTHER; note = 2'-fluoroadenosine-3'-phosphorothioate
  modified_base 3: mod_base = OTHER; note = 2'-O-methylcytidine-3'-phosphate
  modified_base 4: mod_base = OTHER; note = 2'-O-methylguanosine-3'-phosphate
  modified_base 5: mod_base = OTHER; note = 2'-O-methyladenosine-3'-phosphate
  modified_base 6: mod_base = OTHER; note = 2'-fluorouridine-3'-phosphate
  modified_base 7: mod_base = OTHER; note = 2'-O-methylcytidine-3'-phosphate
  modified_base 8: mod_base = OTHER; note = 2'-fluoroadenosine-3'-phosphate
  modified_base 9: mod_base = OTHER; note = 2'-fluoroguanosine-3'-phosphate
  modified_base 10: mod_base = OTHER; note = 2'-O-methylguanosine-3'-phosphate
  modified_base 11: mod_base = OTHER; note = 2'-O-methyluridine-3'-phosphate
  modified_base 12: mod_base = OTHER; note = 2'-O-methyladenosine-3'-phosphate
  modified_base 13: mod_base = OTHER; note = 2'-O-methyladenosine-3'-phosphate
  modified_base 14: mod_base = OTHER; note = 2'-fluorouridine-3'-phosphate
  modified_base 15: mod_base = OTHER; note = 2'-O-methylcytidine-3'-phosphate
  modified_base 16: mod_base = OTHER; note = 2'-fluorouridine-3'-phosphate
  modified_base 17: mod_base = OTHER; note = 2'-O-methylguanosine-3'-phosphate
  modified_base 18: mod_base = OTHER; note = 2'-O-methyladenosine-3'-phosphate
  modified_base 19: mod_base = OTHER; note = 2'-O-methylguanosine-3'-phosphate
  modified_base 20: mod_base = OTHER; note = 2'-O-methylcytidine-3'-phosphate
  modified_base 21: mod_base = OTHER; note = 2'-O-methyladenosine-3'-phosphorothioate
  modified_base 22: mod_base = OTHER; note = 2'-O-methyladenosine-3'-phosphorothioate
  modified_base 23: mod_base = OTHER; note = 2'-O-methyluridine-3'-phosphate
tacgatcaggtaatctgagcaat

SEQ ID NO: 1730 - RNA, 23 nt, synthetic construct
  source 1..23: mol_type = other RNA
  modified_base 1: mod_base = OTHER; note = Vinyl-phosphonate 2'-O-methyluridine-3'-phosphorothioate
  modified_base 2: mod_base = OTHER; note = 2'-fluoroadenosine-3'-phosphorothioate
  modified_base 3: mod_base = OTHER; note = 2'-O-methylcytidine-3'-phosphate
  modified_base 4: mod_base = OTHER; note = 2'-O-methylguanosine-3'-phosphate
  modified_base 5: mod_base = OTHER; note = 2'-O-methylcytidine-3'-phosphate
  modified_base 6: mod_base = OTHER; note = 2'-fluoroadenosine-3'-phosphate
  modified_base 7: mod_base = OTHER; note = 2'-O-methyladenosine-3'-phosphate
  modified_base 8: mod_base = OTHER; note = 2'-fluoroadenosine-3'-phosphate
  modified_base 9: mod_base = OTHER; note = 2'-fluorocytidine-3'-phosphate
  modified_base 10: mod_base = OTHER; note = 2'-O-methyluridine-3'-phosphate
  modified_base 11: mod_base = OTHER; note = 2'-O-methylcytidine-3'-phosphate
  modified_base 12: mod_base = OTHER; note = 2'-O-methylcytidine-3'-phosphate
  modified_base 13: mod_base = OTHER; note = 2'-O-methyladenosine-3'-phosphate
  modified_base 14: mod_base = OTHER; note = 2'-fluorouridine-3'-phosphate
  modified_base 15: mod_base = OTHER; note = 2'-O-methyladenosine-3'-phosphate
  modified_base 16: mod_base = OTHER; note = 2'-fluoroguanosine-3'-phosphate
  modified_base 17: mod_base = OTHER; note = 2'-O-methylcytidine-3'-phosphate
  modified_base 18: mod_base = OTHER; note = 2'-O-methyluridine-3'-phosphate
  modified_base 19: mod_base = OTHER; note = 2'-O-methylguanosine-3'-phosphate
  modified_base 20: mod_base = OTHER; note = 2'-O-methyluridine-3'-phosphate
  modified_base 21: mod_base = OTHER; note = 2'-O-methylcytidine-3'-phosphorothioate
  modified_base 22: mod_base = OTHER; note = 2'-O-methyladenosine-3'-phosphorothioate
  modified_base 23: mod_base = OTHER; note = 2'-O-methylguanosine-3'-phosphate
tacgcaaactccatagctgtcag

SEQ ID NO: 1731 - RNA, 23 nt, synthetic construct
  source 1..23: mol_type = other RNA
  modified_base 1: mod_base = OTHER; note = Vinyl-phosphonate 2'-O-methyluridine-3'-phosphorothioate
  modified_base 2: mod_base = OTHER; note = 2'-fluorouridine -3'-phosphorothioate
  modified_base 3: mod_base = OTHER; note = 2'-O-methyluridine-3'-phosphate
  modified_base 4: mod_base = OTHER; note = 2'-O-methylguanosine-3'-phosphate
  modified_base 5: mod_base = OTHER; note = 2'-O-methyluridine-3'-phosphate
  modified_base 6: mod_base = OTHER; note = 2'-fluoroadenosine-3'-phosphate
  modified_base 7: mod_base = OTHER; note = 2'-O-methyladenosine-3'-phosphate
  modified_base 8: mod_base = OTHER; note = 2'-fluoroguanosine-3'-phosphate
  modified_base 9: mod_base = OTHER; note = 2'-fluorouridine-3'-phosphate
  modified_base 10: mod_base = OTHER; note = 2'-O-methylguanosine-3'-phosphate
  modified_base 11: mod_base = OTHER; note = 2'-O-methyladenosine-3'-phosphate
  modified_base 12: mod_base = OTHER; note = 2'-O-methylguanosine-3'-phosphate
  modified_base 13: mod_base = OTHER; note = 2'-O-methylcytidine-3'-phosphate
  modified_base 14: mod_base = OTHER; note = 2'-fluoroadenosine-3'-phosphate
  modified_base 15: mod_base = OTHER; note = 2'-O-methyluridine-3'-phosphate
  modified_base 16: mod_base = OTHER; note = 2'-fluoroguanosine-3'-phosphate
  modified_base 17: mod_base = OTHER; note = 2'-O-methyluridine-3'-phosphate
  modified_base 18: mod_base = OTHER; note = 2'-O-methyluridine-3'-phosphate
  modified_base 19: mod_base = OTHER; note = 2'-O-methylcytidine-3'-phosphate
  modified_base 20: mod_base = OTHER; note = 2'-O-methyluridine-3'-phosphate
  modified_base 21: mod_base = OTHER; note = 2'-O-methyladenosine-3'-phosphorothioate
  modified_base 22: mod_base = OTHER; note = 2'-O-methyluridine-3'-phosphorothioate
  modified_base 23: mod_base = OTHER; note = 2'-O-methyladenosine-3'-phosphate
tttgtaagtgagcatgttctata

SEQ ID NO: 1732 - RNA, 23 nt, synthetic construct
  source 1..23: mol_type = other RNA
  modified_base 1: mod_base = OTHER; note = Vinyl-phosphonate 2'-O-methyluridine-3'-phosphorothioate
  modified_base 2: mod_base = OTHER; note = 2'-fluoroadenosine-3'-phosphorothioate
  modified_base 3: mod_base = OTHER; note = 2'-O-methyluridine-3'-phosphate
  modified_base 4: mod_base = OTHER; note = 2'-O-methyladenosine-3'-phosphate
  modified_base 5: mod_base = OTHER; note = 2'-O-methylguanosine-3'-phosphate
  modified_base 6: mod_base = OTHER; note = 2'-fluorouridine-3'-phosphate
  modified_base 7: mod_base = OTHER; note = 2'-O-methylguanosine-3'-phosphate
  modified_base 8: mod_base = OTHER; note = 2'-fluoroadenosine-3'-phosphate
  modified_base 9: mod_base = OTHER; note = 2'-fluoroadenosine-3'-phosphate
  modified_base 10: mod_base = OTHER; note = 2'-O-methyladenosine-3'-phosphate
  modified_base 11: mod_base = OTHER; note = 2'-O-methyluridine-3'-phosphate
  modified_base 12: mod_base = OTHER; note = 2'-O-methylguanosine-3'-phosphate
  modified_base 13: mod_base = OTHER; note = 2'-O-methyladenosine-3'-phosphate
  modified_base 14: mod_base = OTHER; note = 2'-fluoroadenosine-3'-phosphate
  modified_base 15: mod_base = OTHER; note = 2'-O-methylguanosine-3'-phosphate
  modified_base 16: mod_base = OTHER; note = 2'-fluorocytidine-3'-phosphate
  modified_base 17: mod_base = OTHER; note = 2'-O-methyladenosine-3'-phosphate
  modified_base 18: mod_base = OTHER; note = 2'-O-methyluridine-3'-phosphate
  modified_base 19: mod_base = OTHER; note = 2'-O-methyladenosine-3'-phosphate
  modified_base 20: mod_base = OTHER; note = 2'-O-methyladenosine-3'-phosphate
  modified_base 21: mod_base = OTHER; note = 2'-O-methyluridine-3'-phosphorothioate
  modified_base 22: mod_base = OTHER; note = 2'-O-methylcytidine-3'-phosphorothioate
  modified_base 23: mod_base = OTHER; note = 2'-O-methyladenosine-3'-phosphate
tatagtgaaatgaagcataatca

SEQ ID NO: 1733 - RNA, 23 nt, synthetic construct
  source 1..23: mol_type = other RNA
  modified_base 1: mod_base = OTHER; note = Vinyl-phosphonate 2'-O-methyluridine-3'-phosphorothioate
  modified_base 2: mod_base = OTHER; note = 2'-fluoroadenosine-3'-phosphorothioate
  modified_base 3: mod_base = OTHER; note = 2'-O-methylcytidine-3'-phosphate
  modified_base 4: mod_base = OTHER; note = 2'-O-methyluridine-3'-phosphate
  modified_base 5: mod_base = OTHER; note = 2'-O-methyluridine-3'-phosphate
  modified_base 6: mod_base = OTHER; note = 2'-fluorouridine-3'-phosphate
  modified_base 7: mod_base = OTHER; note = 2'-O-methyluridine-3'-phosphate
  modified_base 8: mod_base = OTHER; note = 2'-fluoroadenosine-3'-phosphate
  modified_base 9: mod_base = OTHER; note = 2'-fluorouridine-3'-phosphate
  modified_base 10: mod_base = OTHER; note = 2'-O-methylguanosine-3'-phosphate
  modified_base 11: mod_base = OTHER; note = 2'-O-methyladenosine-3'-phosphate
  modified_base 12: mod_base = OTHER; note = 2'-O-methylcytidine-3'-phosphate
  modified_base 13: mod_base = OTHER; note = 2'-O-methyluridine-3'-phosphate
  modified_base 14: mod_base = OTHER; note = 2'-fluorouridine-3'-phosphate
  modified_base 15: mod_base = OTHER; note = 2'-O-methylguanosine-3'-phosphate
  modified_base 16: mod_base = OTHER; note = 2'-fluorocytidine-3'-phosphate
  modified_base 17: mod_base = OTHER; note = 2'-O-methyluridine-3'-phosphate
  modified_base 18: mod_base = OTHER; note = 2'-O-methylguanosine-3'-phosphate
  modified_base 19: mod_base = OTHER; note = 2'-O-methyluridine-3'-phosphate
  modified_base 20: mod_base = OTHER; note = 2'-O-methyluridine-3'-phosphate
  modified_base 21: mod_base = OTHER; note = 2'-O-methylguanosine-3'-phosphorothioate
  modified_base 22: mod_base = OTHER; note = 2'-O-methylguanosine-3'-phosphorothioate
  modified_base 23: mod_base = OTHER; note = 2'-O-methyluridine-3'-phosphate
tacttttatgacttgctgttggt

SEQ ID NO: 1734 - RNA, 23 nt, synthetic construct
  source 1..23: mol_type = other RNA
  modified_base 1: mod_base = OTHER; note = Vinyl-phosphonate 2'-O-methyluridine-3'-phosphorothioate
  modified_base 2: mod_base = OTHER; note = 2'-fluorouridine -3'-phosphorothioate
  modified_base 3: mod_base = OTHER; note = 2'-O-methyluridine-3'-phosphate
  modified_base 4: mod_base = OTHER; note = 2'-O-methyladenosine-3'-phosphate
  modified_base 5: mod_base = OTHER; note = 2'-O-methyladenosine-3'-phosphate
  modified_base 6: mod_base = OTHER; note = 2'-fluoroadenosine-3'-phosphate
  modified_base 7: mod_base = OTHER; note = 2'-O-methylguanosine-3'-phosphate
  modified_base 8: mod_base = OTHER; note = 2'-fluoroadenosine-3'-phosphate
  modified_base 9: mod_base = OTHER; note = 2'-fluorocytidine-3'-phosphate
  modified_base 10: mod_base = OTHER; note = 2'-O-methyladenosine-3'-phosphate
  modified_base 11: mod_base = OTHER; note = 2'-O-methyluridine-3'-phosphate
  modified_base 12: mod_base = OTHER; note = 2'-O-methyluridine-3'-phosphate
  modified_base 13: mod_base = OTHER; note = 2'-O-methyluridine-3'-phosphate
  modified_base 14: mod_base = OTHER; note = 2'-fluorouridine-3'-phosphate
  modified_base 15: mod_base = OTHER; note = 2'-O-methylcytidine-3'-phosphate
  modified_base 16: mod_base = OTHER; note = 2'-fluoroadenosine-3'-phosphate
  modified_base 17: mod_base = OTHER; note = 2'-O-methylguanosine-3'-phosphate
  modified_base 18: mod_base = OTHER; note = 2'-O-methyladenosine-3'-phosphate
  modified_base 19: mod_base = OTHER; note = 2'-O-methylcytidine-3'-phosphate
  modified_base 20: mod_base = OTHER; note = 2'-O-methyladenosine-3'-phosphate
  modified_base 21: mod_base = OTHER; note = 2'-O-methyladenosine-3'-phosphorothioate
  modified_base 22: mod_base = OTHER; note = 2'-O-methyluridine-3'-phosphorothioate
  modified_base 23: mod_base = OTHER; note = 2'-O-methylguanosine-3'-phosphate
tttaaagacattttcagacaatg

SEQ ID NO: 1735 - RNA, 23 nt, synthetic construct
  source 1..23: mol_type = other RNA
  modified_base 1: mod_base = OTHER; note = Vinyl-phosphonate 2'-O-methyluridine-3'-phosphorothioate
  modified_base 2: mod_base = OTHER; note = 2'-fluoroadenosine-3'-phosphorothioate
  modified_base 3: mod_base = OTHER; note = 2'-O-methyladenosine-3'-phosphate
  modified_base 4: mod_base = OTHER; note = 2'-O-methyluridine-3'-phosphate
  modified_base 5: mod_base = OTHER; note = 2'-O-methyluridine-3'-phosphate
  modified_base 6: mod_base = OTHER; note = 2'-fluoroguanosine-3'-phosphate
  modified_base 7: mod_base = OTHER; note = 2'-O-methyluridine-3'-phosphate
  modified_base 8: mod_base = OTHER; note = 2'-fluorocytidine-3'-phosphate
  modified_base 9: mod_base = OTHER; note = 2'-fluorocytidine-3'-phosphate
  modified_base 10: mod_base = OTHER; note = 2'-O-methyluridine-3'-phosphate
  modified_base 11: mod_base = OTHER; note = 2'-O-methyluridine-3'-phosphate
  modified_base 12: mod_base = OTHER; note = 2'-O-methyluridine-3'-phosphate
  modified_base 13: mod_base = OTHER; note = 2'-O-methylguanosine-3'-phosphate
  modified_base 14: mod_base = OTHER; note = 2'-fluoroadenosine-3'-phosphate
  modified_base 15: mod_base = OTHER; note = 2'-O-methyladenosine-3'-phosphate
  modified_base 16: mod_base = OTHER; note = 2'-fluorocytidine-3'-phosphate
  modified_base 17: mod_base = OTHER; note = 2'-O-methylcytidine-3'-phosphate
  modified_base 18: mod_base = OTHER; note = 2'-O-methyladenosine-3'-phosphate
  modified_base 19: mod_base = OTHER; note = 2'-O-methyladenosine-3'-phosphate
  modified_base 20: mod_base = OTHER; note = 2'-O-methylcytidine-3'-phosphate
  modified_base 21: mod_base = OTHER; note = 2'-O-methyladenosine-3'-phosphorothioate
  modified_base 22: mod_base = OTHER; note = 2'-O-methylguanosine-3'-phosphorothioate
  modified_base 23: mod_base = OTHER; note = 2'-O-methyladenosine-3'-phosphate
taattgtcctttgaaccaacaga

SEQ ID NO: 1736 - RNA, 23 nt, synthetic construct
  source 1..23: mol_type = other RNA
  modified_base 1: mod_base = OTHER; note = Vinyl-phosphonate 2'-O-methyluridine-3'-phosphorothioate
  modified_base 2: mod_base = OTHER; note = 2'-fluorouridine -3'-phosphorothioate
  modified_base 3: mod_base = OTHER; note = 2'-O-methylcytidine-3'-phosphate
  modified_base 4: mod_base = OTHER; note = 2'-O-methylguanosine-3'-phosphate
  modified_base 5: mod_base = OTHER; note = 2'-O-methyladenosine-3'-phosphate
  modified_base 6: mod_base = OTHER; note = 2'-fluorouridine-3'-phosphate
  modified_base 7: mod_base = OTHER; note = 2'-O-methyladenosine-3'-phosphate
  modified_base 8: mod_base = OTHER; note = 2'-fluorouridine-3'-phosphate
  modified_base 9: mod_base = OTHER; note = 2'-fluoroadenosine-3'-phosphate
  modified_base 10: mod_base = OTHER; note = 2'-O-methyluridine-3'-phosphate
  modified_base 11: mod_base = OTHER; note = 2'-O-methyluridine-3'-phosphate
  modified_base 12: mod_base = OTHER; note = 2'-O-methyladenosine-3'-phosphate
  modified_base 13: mod_base = OTHER; note = 2'-O-methyladenosine-3'-phosphate
  modified_base 14: mod_base = OTHER; note = 2'-fluoroadenosine-3'-phosphate
  modified_base 15: mod_base = OTHER; note = 2'-O-methylguanosine-3'-phosphate
  modified_base 16: mod_base = OTHER; note = 2'-fluorouridine-3'-phosphate
  modified_base 17: mod_base = OTHER; note = 2'-O-methyluridine-3'-phosphate
  modified_base 18: mod_base = OTHER; note = 2'-O-methyluridine-3'-phosphate
  modified_base 19: mod_base = OTHER; note = 2'-O-methyladenosine-3'-phosphate
  modified_base 20: mod_base = OTHER; note = 2'-O-methylguanosine-3'-phosphate
  modified_base 21: mod_base = OTHER; note = 2'-O-methyladenosine-3'-phosphorothioate
  modified_base 22: mod_base = OTHER; note = 2'-O-methylguanosine-3'-phosphorothioate
  modified_base 23: mod_base = OTHER; note = 2'-O-methylcytidine-3'-phosphate
ttcgatatattaaagtttagagc

SEQ ID NO: 1737 - RNA, 23 nt, synthetic construct
  source 1..23: mol_type = other RNA
  modified_base 1: mod_base = OTHER; note = Vinyl-phosphonate 2'-O-methyluridine-3'-phosphorothioate
  modified_base 2: mod_base = OTHER; note = 2'-fluoroadenosine-3'-phosphorothioate
  modified_base 3: mod_base = OTHER; note = 2'-O-methylcytidine-3'-phosphate
  modified_base 4: mod_base = OTHER; note = 2'-O-methylguanosine-3'-phosphate
  modified_base 5: mod_base = OTHER; note = 2'-O-methyladenosine-3'-phosphate
  modified_base 6: mod_base = OTHER; note = 2'-fluorocytidine-3'-phosphate
  modified_base 7: mod_base = OTHER; note = 2'-O-methyladenosine-3'-phosphate
  modified_base 8: mod_base = OTHER; note = 2'-fluoroguanosine-3'-phosphate
  modified_base 9: mod_base = OTHER; note = 2'-fluorouridine-3'-phosphate
  modified_base 10: mod_base = OTHER; note = 2'-O-methylcytidine-3'-phosphate
  modified_base 11: mod_base = OTHER; note = 2'-O-methyladenosine-3'-phosphate
  modified_base 12: mod_base = OTHER; note = 2'-O-methyluridine-3'-phosphate
  modified_base 13: mod_base = OTHER; note = 2'-O-methylguanosine-3'-phosphate
  modified_base 14: mod_base = OTHER; note = 2'-fluorouridine-3'-phosphate
  modified_base 15: mod_base = OTHER; note = 2'-O-methyluridine-3'-phosphate
  modified_base 16: mod_base = OTHER; note = 2'-fluorouridine-3'-phosphate
  modified_base 17: mod_base = OTHER; note = 2'-O-methylcytidine-3'-phosphate
  modified_base 18: mod_base = OTHER; note = 2'-O-methyladenosine-3'-phosphate
  modified_base 19: mod_base = OTHER; note = 2'-O-methylcytidine-3'-phosphate
  modified_base 20: mod_base = OTHER; note = 2'-O-methyluridine-3'-phosphate
  modified_base 21: mod_base = OTHER; note = 2'-O-methyluridine-3'-phosphorothioate
  modified_base 22: mod_base = OTHER; note = 2'-O-methyladenosine-3'-phosphorothioate
  modified_base 23: mod_base = OTHER; note = 2'-O-methyladenosine-3'-phosphate
tacgacagtcatgtttcacttaa

SEQ ID NO: 1738 - RNA, 23 nt, synthetic construct
  source 1..23: mol_type = other RNA
  modified_base 1: mod_base = OTHER; note = Vinyl-phosphonate 2'-O-methyluridine-3'-phosphorothioate
  modified_base 2: mod_base = OTHER; note = 2'-fluoroadenosine-3'-phosphorothioate
  modified_base 3: mod_base = OTHER; note = 2'-O-methyluridine-3'-phosphate
  modified_base 4: mod_base = OTHER; note = 2'-O-methylguanosine-3'-phosphate
  modified_base 5: mod_base = OTHER; note = 2'-O-methyladenosine-3'-phosphate
  modified_base 6: mod_base = OTHER; note = 2'-fluoroadenosine-3'-phosphate
  modified_base 7: mod_base = OTHER; note = 2'-O-methyladenosine-3'-phosphate
  modified_base 8: mod_base = OTHER; note = 2'-fluoroadenosine-3'-phosphate
  modified_base 9: mod_base = OTHER; note = 2'-fluorocytidine-3'-phosphate
  modified_base 10: mod_base = OTHER; note = 2'-O-methyluridine-3'-phosphate
  modified_base 11: mod_base = OTHER; note = 2'-O-methylguanosine-3'-phosphate
  modified_base 12: mod_base = OTHER; note = 2'-O-methyluridine-3'-phosphate
  modified_base 13: mod_base = OTHER; note = 2'-O-methyladenosine-3'-phosphate
  modified_base 14: mod_base = OTHER; note = 2'-fluorouridine-3'-phosphate
  modified_base 15: mod_base = OTHER; note = 2'-O-methylguanosine-3'-phosphate
  modified_base 16: mod_base = OTHER; note = 2'-fluoroguanosine-3'-phosphate
  modified_base 17: mod_base = OTHER; note = 2'-O-methyladenosine-3'-phosphate
  modified_base 18: mod_base = OTHER; note = 2'-O-methylcytidine-3'-phosphate
  modified_base 19: mod_base = OTHER; note = 2'-O-methylguanosine-3'-phosphate
  modified_base 20: mod_base = OTHER; note = 2'-O-methyladenosine-3'-phosphate
  modified_base 21: mod_base = OTHER; note = 2'-O-methyluridine-3'-phosphorothioate
  modified_base 22: mod_base = OTHER; note = 2'-O-methyladenosine-3'-phosphorothioate
  modified_base 23: mod_base = OTHER; note = 2'-O-methyluridine-3'-phosphate
tatgaaaactgtatggacgatat

SEQ ID NO: 1739 - RNA, 23 nt, synthetic construct
  source 1..23: mol_type = other RNA
  modified_base 1: mod_base = OTHER; note = Vinyl-phosphonate 2'-O-methyluridine-3'-phosphorothioate
  modified_base 2: mod_base = OTHER; note = 2'-fluorouridine -3'-phosphorothioate
  modified_base 3: mod_base = OTHER; note = 2'-O-methyluridine-3'-phosphate
  modified_base 4: mod_base = OTHER; note = 2'-O-methyluridine-3'-phosphate
  modified_base 5: mod_base = OTHER; note = 2'-O-methylcytidine-3'-phosphate
  modified_base 6: mod_base = OTHER; note = 2'-fluorocytidine-3'-phosphate
  modified_base 7: mod_base = OTHER; note = 2'-O-methyluridine-3'-phosphate
  modified_base 8: mod_base = OTHER; note = 2'-fluoroadenosine-3'-phosphate
  modified_base 9: mod_base = OTHER; note = 2'-fluorocytidine-3'-phosphate
  modified_base 10: mod_base = OTHER; note = 2'-O-methyluridine-3'-phosphate
  modified_base 11: mod_base = OTHER; note = 2'-O-methyladenosine-3'-phosphate
  modified_base 12: mod_base = OTHER; note = 2'-O-methyluridine-3'-phosphate
  modified_base 13: mod_base = OTHER; note = 2'-O-methyluridine-3'-phosphate
  modified_base 14: mod_base = OTHER; note = 2'-fluorouridine-3'-phosphate
  modified_base 15: mod_base = OTHER; note = 2'-O-methylcytidine-3'-phosphate
  modified_base 16: mod_base = OTHER; note = 2'-fluorocytidine-3'-phosphate
  modified_base 17: mod_base = OTHER; note = 2'-O-methyluridine-3'-phosphate
  modified_base 18: mod_base = OTHER; note = 2'-O-methylguanosine-3'-phosphate
  modified_base 19: mod_base = OTHER; note = 2'-O-methyladenosine-3'-phosphate
  modified_base 20: mod_base = OTHER; note = 2'-O-methyladenosine-3'-phosphate
  modified_base 21: mod_base = OTHER; note = 2'-O-methylguanosine-3'-phosphorothioate
  modified_base 22: mod_base = OTHER; note = 2'-O-methylcytidine-3'-phosphorothioate
  modified_base 23: mod_base = OTHER; note = 2'-O-methyladenosine-3'-phosphate
ttttcctactatttcctgaagca

SEQ ID NO: 1740 - RNA, 23 nt, synthetic construct
  source 1..23: mol_type = other RNA
  modified_base 1: mod_base = OTHER; note = Vinyl-phosphonate 2'-O-methyluridine-3'-phosphorothioate
  modified_base 2: mod_base = OTHER; note = 2'-fluorocytidine-3'-phosphorothioate
  modified_base 3: mod_base = OTHER; note = 2'-O-methyladenosine-3'-phosphate
  modified_base 4: mod_base = OTHER; note = 2'-O-methylguanosine-3'-phosphate
  modified_base 5: mod_base = OTHER; note = 2'-O-methyluridine-3'-phosphate
  modified_base 6: mod_base = OTHER; note = 2'-fluorocytidine-3'-phosphate
  modified_base 7: mod_base = OTHER; note = 2'-O-methylcytidine-3'-phosphate
  modified_base 8: mod_base = OTHER; note = 2'-fluorouridine-3'-phosphate
  modified_base 9: mod_base = OTHER; note = 2'-fluorouridine-3'-phosphate
  modified_base 10: mod_base = OTHER; note = 2'-O-methyladenosine-3'-phosphate
  modified_base 11: mod_base = OTHER; note = 2'-O-methylcytidine-3'-phosphate
  modified_base 12: mod_base = OTHER; note = 2'-O-methyladenosine-3'-phosphate
  modified_base 13: mod_base = OTHER; note = 2'-O-methylguanosine-3'-phosphate
  modified_base 14: mod_base = OTHER; note = 2'-fluoroadenosine-3'-phosphate
  modified_base 15: mod_base = OTHER; note = 2'-O-methyladenosine-3'-phosphate
  modified_base 16: mod_base = OTHER; note = 2'-fluoroadenosine-3'-phosphate
  modified_base 17: mod_base = OTHER; note = 2'-O-methylguanosine-3'-phosphate
  modified_base 18: mod_base = OTHER; note = 2'-O-methylguanosine-3'-phosphate
  modified_base 19: mod_base = OTHER; note = 2'-O-methylguanosine-3'-phosphate
  modified_base 20: mod_base = OTHER; note = 2'-O-methyluridine-3'-phosphate
  modified_base 21: mod_base = OTHER; note = 2'-O-methylguanosine-3'-phosphorothioate
  modified_base 22: mod_base = OTHER; note = 2'-O-methylguanosine-3'-phosphorothioate
  modified_base 23: mod_base = OTHER; note = 2'-O-methylguanosine-3'-phosphate
tcagtccttacagaaagggtggg

SEQ ID NO: 1741 - RNA, 23 nt, synthetic construct
  source 1..23: mol_type = other RNA
  modified_base 1: mod_base = OTHER; note = Vinyl-phosphonate 2'-O-methyluridine-3'-phosphorothioate
  modified_base 2: mod_base = OTHER; note = 2'-fluoroadenosine-3'-phosphorothioate
  modified_base 3: mod_base = OTHER; note = 2'-O-methylguanosine-3'-phosphate
  modified_base 4: mod_base = OTHER; note = 2'-O-methylguanosine-3'-phosphate
  modified_base 5: mod_base = OTHER; note = 2'-O-methyladenosine-3'-phosphate
  modified_base 6: mod_base = OTHER; note = 2'-fluorouridine-3'-phosphate
  modified_base 7: mod_base = OTHER; note = 2'-O-methylguanosine-3'-phosphate
  modified_base 8: mod_base = OTHER; note = 2'-fluorouridine-3'-phosphate
  modified_base 9: mod_base = OTHER; note = 2'-fluorocytidine-3'-phosphate
  modified_base 10: mod_base = OTHER; note = 2'-O-methyladenosine-3'-phosphate
  modified_base 11: mod_base = OTHER; note = 2'-O-methylguanosine-3'-phosphate
  modified_base 12: mod_base = OTHER; note = 2'-O-methylguanosine-3'-phosphate
  modified_base 13: mod_base = OTHER; note = 2'-O-methyluridine-3'-phosphate
  modified_base 14: mod_base = OTHER; note = 2'-fluoroadenosine-3'-phosphate
  modified_base 15: mod_base = OTHER; note = 2'-O-methyluridine-3'-phosphate
  modified_base 16: mod_base = OTHER; note = 2'-fluorocytidine-3'-phosphate
  modified_base 17: mod_base = OTHER; note = 2'-O-methyluridine-3'-phosphate
  modified_base 18: mod_base = OTHER; note = 2'-O-methylcytidine-3'-phosphate
  modified_base 19: mod_base = OTHER; note = 2'-O-methyluridine-3'-phosphate
  modified_base 20: mod_base = OTHER; note = 2'-O-methyluridine-3'-phosphate
  modified_base 21: mod_base = OTHER; note = 2'-O-methyluridine-3'-phosphorothioate
  modified_base 22: mod_base = OTHER; note = 2'-O-methyluridine-3'-phosphorothioate
  modified_base 23: mod_base = OTHER; note = 2'-O-methylguanosine-3'-phosphate
taggatgtcaggtatctcttttg

SEQ ID NO: 1742 - RNA, 23 nt, synthetic construct
  source 1..23: mol_type = other RNA
  modified_base 1: mod_base = OTHER; note = Vinyl-phosphonate 2'-O-methyluridine-3'-phosphorothioate
  modified_base 2: mod_base = OTHER; note = 2'-fluorocytidine-3'-phosphorothioate
  modified_base 3: mod_base = OTHER; note = 2'-O-methyladenosine-3'-phosphate
  modified_base 4: mod_base = OTHER; note = 2'-O-methylguanosine-3'-phosphate
  modified_base 5: mod_base = OTHER; note = 2'-O-methyladenosine-3'-phosphate
  modified_base 6: mod_base = OTHER; note = 2'-fluoroadenosine-3'-phosphate
  modified_base 7: mod_base = OTHER; note = 2'-O-methyladenosine-3'-phosphate
  modified_base 8: mod_base = OTHER; note = 2'-fluoroadenosine-3'-phosphate
  modified_base 9: mod_base = OTHER; note = 2'-fluorocytidine-3'-phosphate
  modified_base 10: mod_base = OTHER; note = 2'-O-methyladenosine-3'-phosphate
  modified_base 11: mod_base = OTHER; note = 2'-O-methyluridine-3'-phosphate
  modified_base 12: mod_base = OTHER; note = 2'-O-methyluridine-3'-phosphate
  modified_base 13: mod_base = OTHER; note = 2'-O-methyladenosine-3'-phosphate
  modified_base 14: mod_base = OTHER; note = 2'-fluoroadenosine-3'-phosphate
  modified_base 15: mod_base = OTHER; note = 2'-O-methyluridine-3'-phosphate
  modified_base 16: mod_base = OTHER; note = 2'-fluoroguanosine-3'-phosphate
  modified_base 17: mod_base = OTHER; note = 2'-O-methylcytidine-3'-phosphate
  modified_base 18: mod_base = OTHER; note = 2'-O-methyluridine-3'-phosphate
  modified_base 19: mod_base = OTHER; note = 2'-O-methylcytidine-3'-phosphate
  modified_base 20: mod_base = OTHER; note = 2'-O-methyladenosine-3'-phosphate
  modified_base 21: mod_base = OTHER; note = 2'-O-methyluridine-3'-phosphorothioate
  modified_base 22: mod_base = OTHER; note = 2'-O-methyluridine-3'-phosphorothioate
  modified_base 23: mod_base = OTHER; note = 2'-O-methyladenosine-3'-phosphate
tcagaaaacattaatgctcatta

SEQ ID NO: 1743 - RNA, 23 nt, synthetic construct
  source 1..23: mol_type = other RNA
  modified_base 1: mod_base = OTHER; note = Vinyl-phosphonate 2'-O-methyluridine-3'-phosphorothioate
  modified_base 2: mod_base = OTHER; note = 2'-fluorouridine -3'-phosphorothioate
  modified_base 3: mod_base = OTHER; note = 2'-O-methyluridine-3'-phosphate
  modified_base 4: mod_base = OTHER; note = 2'-O-methylcytidine-3'-phosphate
  modified_base 5: mod_base = OTHER; note = 2'-O-methyluridine-3'-phosphate
  modified_base 6: mod_base = OTHER; note = 2'-fluoroadenosine-3'-phosphate
  modified_base 7: mod_base = OTHER; note = 2'-O-methyluridine-3'-phosphate
  modified_base 8: mod_base = OTHER; note = 2'-fluoroguanosine-3'-phosphate
  modified_base 9: mod_base = OTHER; note = 2'-fluoroadenosine-3'-phosphate
  modified_base 10: mod_base = OTHER; note = 2'-O-methylguanosine-3'-phosphate
  modified_base 11: mod_base = OTHER; note = 2'-O-methyladenosine-3'-phosphate
  modified_base 12: mod_base = OTHER; note = 2'-O-methyladenosine-3'-phosphate
  modified_base 13: mod_base = OTHER; note = 2'-O-methyladenosine-3'-phosphate
  modified_base 14: mod_base = OTHER; note = 2'-fluoroadenosine-3'-phosphate
  modified_base 15: mod_base = OTHER; note = 2'-O-methyladenosine-3'-phosphate
  modified_base 16: mod_base = OTHER; note = 2'-fluoroadenosine-3'-phosphate
  modified_base 17: mod_base = OTHER; note = 2'-O-methyluridine-3'-phosphate
  modified_base 18: mod_base = OTHER; note = 2'-O-methylguanosine-3'-phosphate
  modified_base 19: mod_base = OTHER; note = 2'-O-methyluridine-3'-phosphate
  modified_base 20: mod_base = OTHER; note = 2'-O-methylcytidine-3'-phosphate
  modified_base 21: mod_base = OTHER; note = 2'-O-methyladenosine-3'-phosphorothioate
  modified_base 22: mod_base = OTHER; note = 2'-O-methyladenosine-3'-phosphorothioate
  modified_base 23: mod_base = OTHER; note = 2'-O-methylcytidine-3'-phosphate
tttctatgagaaaaaatgtcaac

SEQ ID NO: 1744 - RNA, 23 nt, synthetic construct
  source 1..23: mol_type = other RNA
  modified_base 1: mod_base = OTHER; note = Vinyl-phosphonate 2'-O-methyluridine-3'-phosphorothioate
  modified_base 2: mod_base = OTHER; note = 2'-fluorouridine -3'-phosphorothioate
  modified_base 3: mod_base = OTHER; note = 2'-O-methyladenosine-3'-phosphate
  modified_base 4: mod_base = OTHER; note = 2'-O-methylguanosine-3'-phosphate
  modified_base 5: mod_base = OTHER; note = 2'-O-methyluridine-3'-phosphate
  modified_base 6: mod_base = OTHER; note = 2'-fluoroadenosine-3'-phosphate
  modified_base 7: mod_base = OTHER; note = 2'-O-methylguanosine-3'-phosphate
  modified_base 8: mod_base = OTHER; note = 2'-fluorouridine-3'-phosphate
  modified_base 9: mod_base = OTHER; note = 2'-fluorocytidine-3'-phosphate
  modified_base 10: mod_base = OTHER; note = 2'-O-methyladenosine-3'-phosphate
  modified_base 11: mod_base = OTHER; note = 2'-O-methyluridine-3'-phosphate
  modified_base 12: mod_base = OTHER; note = 2'-O-methyluridine-3'-phosphate
  modified_base 13: mod_base = OTHER; note = 2'-O-methyluridine-3'-phosphate
  modified_base 14: mod_base = OTHER; note = 2'-fluoroadenosine-3'-phosphate
  modified_base 15: mod_base = OTHER; note = 2'-O-methyladenosine-3'-phosphate
  modified_base 16: mod_base = OTHER; note = 2'-fluorouridine-3'-phosphate
  modified_base 17: mod_base = OTHER; note = 2'-O-methylcytidine-3'-phosphate
  modified_base 18: mod_base = OTHER; note = 2'-O-methyluridine-3'-phosphate
  modified_base 19: mod_base = OTHER; note = 2'-O-methylcytidine-3'-phosphate
  modified_base 20: mod_base = OTHER; note = 2'-O-methyluridine-3'-phosphate
  modified_base 21: mod_base = OTHER; note = 2'-O-methylguanosine-3'-phosphorothioate
  modified_base 22: mod_base = OTHER; note = 2'-O-methyladenosine-3'-phosphorothioate
  modified_base 23: mod_base = OTHER; note = 2'-O-methyluridine-3'-phosphate
ttagtagtcatttaatctctgat

SEQ ID NO: 1745 - RNA, 23 nt, synthetic construct
  source 1..23: mol_type = other RNA
  modified_base 1: mod_base = OTHER; note = Vinyl-phosphonate 2'-O-methyluridine-3'-phosphorothioate
  modified_base 2: mod_base = OTHER; note = 2'-fluoroadenosine-3'-phosphorothioate
  modified_base 3: mod_base = OTHER; note = 2'-O-methylcytidine-3'-phosphate
  modified_base 4: mod_base = OTHER; note = 2'-O-methyladenosine-3'-phosphate
  modified_base 5: mod_base = OTHER; note = 2'-O-methyladenosine-3'-phosphate
  modified_base 6: mod_base = OTHER; note = 2'-fluorouridine-3'-phosphate
  modified_base 7: mod_base = OTHER; note = 2'-O-methyladenosine-3'-phosphate
  modified_base 8: mod_base = OTHER; note = 2'-fluorouridine-3'-phosphate
  modified_base 9: mod_base = OTHER; note = 2'-fluoroadenosine-3'-phosphate
  modified_base 10: mod_base = OTHER; note = 2'-O-methyladenosine-3'-phosphate
  modified_base 11: mod_base = OTHER; note = 2'-O-methylcytidine-3'-phosphate
  modified_base 12: mod_base = OTHER; note = 2'-O-methyladenosine-3'-phosphate
  modified_base 13: mod_base = OTHER; note = 2'-O-methyluridine-3'-phosphate
  modified_base 14: mod_base = OTHER; note = 2'-fluorouridine-3'-phosphate
  modified_base 15: mod_base = OTHER; note = 2'-O-methyluridine-3'-phosphate
  modified_base 16: mod_base = OTHER; note = 2'-fluoroguanosine-3'-phosphate
  modified_base 17: mod_base = OTHER; note = 2'-O-methyladenosine-3'-phosphate
  modified_base 18: mod_base = OTHER; note = 2'-O-methylcytidine-3'-phosphate
  modified_base 19: mod_base = OTHER; note = 2'-O-methyladenosine-3'-phosphate
  modified_base 20: mod_base = OTHER; note = 2'-O-methylguanosine-3'-phosphate
  modified_base 21: mod_base = OTHER; note = 2'-O-methylcytidine-3'-phosphorothioate
  modified_base 22: mod_base = OTHER; note = 2'-O-methyladenosine-3'-phosphorothioate
  modified_base 23: mod_base = OTHER; note = 2'-O-methyluridine-3'-phosphate
tacaatataacatttgacagcat

SEQ ID NO: 1746 - RNA, 23 nt, synthetic construct
  source 1..23: mol_type = other RNA
  modified_base 1: mod_base = OTHER; note = Vinyl-phosphonate 2'-O-methyluridine-3'-phosphorothioate
  modified_base 2: mod_base = OTHER; note = 2'-fluorouridine -3'-phosphorothioate
  modified_base 3: mod_base = OTHER; note = 2'-O-methyluridine-3'-phosphate
  modified_base 4: mod_base = OTHER; note = 2'-O-methyluridine-3'-phosphate
  modified_base 5: mod_base = OTHER; note = 2'-O-methyluridine-3'-phosphate
  modified_base 6: mod_base = OTHER; note = 2'-fluoroguanosine-3'-phosphate
  modified_base 7: mod_base = OTHER; note = 2'-O-methylcytidine-3'-phosphate
  modified_base 8: mod_base = OTHER; note = 2'-fluorouridine-3'-phosphate
  modified_base 9: mod_base = OTHER; note = 2'-fluoroguanosine-3'-phosphate
  modified_base 10: mod_base = OTHER; note = 2'-O-methyluridine-3'-phosphate
  modified_base 11: mod_base = OTHER; note = 2'-O-methyladenosine-3'-phosphate
  modified_base 12: mod_base = OTHER; note = 2'-O-methylguanosine-3'-phosphate
  modified_base 13: mod_base = OTHER; note = 2'-O-methyluridine-3'-phosphate
  modified_base 14: mod_base = OTHER; note = 2'-fluoroadenosine-3'-phosphate
  modified_base 15: mod_base = OTHER; note = 2'-O-methyluridine-3'-phosphate
  modified_base 16: mod_base = OTHER; note = 2'-fluorouridine-3'-phosphate
  modified_base 17: mod_base = OTHER; note = 2'-O-methyladenosine-3'-phosphate
  modified_base 18: mod_base = OTHER; note = 2'-O-methyluridine-3'-phosphate
  modified_base 19: mod_base = OTHER; note = 2'-O-methyladenosine-3'-phosphate
  modified_base 20: mod_base = OTHER; note = 2'-O-methyluridine-3'-phosphate
  modified_base 21: mod_base = OTHER; note = 2'-O-methyluridine-3'-phosphorothioate
  modified_base 22: mod_base = OTHER; note = 2'-O-methylcytidine-3'-phosphorothioate
  modified_base 23: mod_base = OTHER; note = 2'-O-methylcytidine-3'-phosphate
tttttgctgtagtattatattcc

SEQ ID NO: 1747 - RNA, 23 nt, synthetic construct
  source 1..23: mol_type = other RNA
  modified_base 1: mod_base = OTHER; note = Vinyl-phosphonate 2'-O-methyluridine-3'-phosphorothioate
  modified_base 2: mod_base = OTHER; note = 2'-fluorouridine -3'-phosphorothioate
  modified_base 3: mod_base = OTHER; note = 2'-O-methylguanosine-3'-phosphate
  modified_base 4: mod_base = OTHER; note = 2'-O-methyladenosine-3'-phosphate
  modified_base 5: mod_base = OTHER; note = 2'-O-methyladenosine-3'-phosphate
  modified_base 6: mod_base = OTHER; note = 2'-fluoroadenosine-3'-phosphate
  modified_base 7: mod_base = OTHER; note = 2'-O-methyluridine-3'-phosphate
  modified_base 8: mod_base = OTHER; note = 2'-fluorouridine-3'-phosphate
  modified_base 9: mod_base = OTHER; note = 2'-fluoroadenosine-3'-phosphate
  modified_base 10: mod_base = OTHER; note = 2'-O-methyluridine-3'-phosphate
  modified_base 11: mod_base = OTHER; note = 2'-O-methyladenosine-3'-phosphate
  modified_base 12: mod_base = OTHER; note = 2'-O-methyluridine-3'-phosphate
  modified_base 13: mod_base = OTHER; note = 2'-O-methyluridine-3'-phosphate
  modified_base 14: mod_base = OTHER; note = 2'-fluorouridine-3'-phosphate
  modified_base 15: mod_base = OTHER; note = 2'-O-methyladenosine-3'-phosphate
  modified_base 16: mod_base = OTHER; note = 2'-fluoroguanosine-3'-phosphate
  modified_base 17: mod_base = OTHER; note = 2'-O-methyladenosine-3'-phosphate
  modified_base 18: mod_base = OTHER; note = 2'-O-methylcytidine-3'-phosphate
  modified_base 19: mod_base = OTHER; note = 2'-O-methyladenosine-3'-phosphate
  modified_base 20: mod_base = OTHER; note = 2'-O-methylcytidine-3'-phosphate
  modified_base 21: mod_base = OTHER; note = 2'-O-methylcytidine-3'-phosphorothioate
  modified_base 22: mod_base = OTHER; note = 2'-O-methylcytidine-3'-phosphorothioate
  modified_base 23: mod_base = OTHER; note = 2'-O-methyluridine-3'-phosphate
ttgaaattatatttagacaccct

SEQ ID NO: 1748 - RNA, 23 nt, synthetic construct
  source 1..23: mol_type = other RNA
  modified_base 1: mod_base = OTHER; note = Vinyl-phosphonate 2'-O-methyluridine-3'-phosphorothioate
  modified_base 2: mod_base = OTHER; note = 2'-fluorocytidine-3'-phosphorothioate
  modified_base 3: mod_base = OTHER; note = 2'-O-methyluridine-3'-phosphate
  modified_base 4: mod_base = OTHER; note = 2'-O-methylcytidine-3'-phosphate
  modified_base 5: mod_base = OTHER; note = 2'-O-methyluridine-3'-phosphate
  modified_base 6: mod_base = OTHER; note = 2'-fluorocytidine-3'-phosphate
  modified_base 7: mod_base = OTHER; note = 2'-O-methyladenosine-3'-phosphate
  modified_base 8: mod_base = OTHER; note = 2'-fluorouridine-3'-phosphate
  modified_base 9: mod_base = OTHER; note = 2'-fluorouridine-3'-phosphate
  modified_base 10: mod_base = OTHER; note = 2'-O-methyluridine-3'-phosphate
  modified_base 11: mod_base = OTHER; note = 2'-O-methyluridine-3'-phosphate
  modified_base 12: mod_base = OTHER; note = 2'-O-methylguanosine-3'-phosphate
  modified_base 13: mod_base = OTHER; note = 2'-O-methyluridine-3'-phosphate
  modified_base 14: mod_base = OTHER; note = 2'-fluoroadenosine-3'-phosphate
  modified_base 15: mod_base = OTHER; note = 2'-O-methyluridine-3'-phosphate
  modified_base 16: mod_base = OTHER; note = 2'-fluoroadenosine-3'-phosphate
  modified_base 17: mod_base = OTHER; note = 2'-O-methyladenosine-3'-phosphate
  modified_base 18: mod_base = OTHER; note = 2'-O-methyladenosine-3'-phosphate
  modified_base 19: mod_base = OTHER; note = 2'-O-methylguanosine-3'-phosphate
  modified_base 20: mod_base = OTHER; note = 2'-O-methyladenosine-3'-phosphate
  modified_base 21: mod_base = OTHER; note = 2'-O-methylguanosine-3'-phosphorothioate
  modified_base 22: mod_base = OTHER; note = 2'-O-methyladenosine-3'-phosphorothioate
  modified_base 23: mod_base = OTHER; note = 2'-O-methyladenosine-3'-phosphate
tctctcattttgtataaagagaa

SEQ ID NO: 1749 - RNA, 23 nt, synthetic construct
  source 1..23: mol_type = other RNA
  modified_base 1: mod_base = OTHER; note = Vinyl-phosphonate 2'-O-methyluridine-3'-phosphorothioate
  modified_base 2: mod_base = OTHER; note = 2'-fluorouridine -3'-phosphorothioate
  modified_base 3: mod_base = OTHER; note = 2'-O-methyluridine-3'-phosphate
  modified_base 4: mod_base = OTHER; note = 2'-O-methyluridine-3'-phosphate
  modified_base 5: mod_base = OTHER; note = 2'-O-methyluridine-3'-phosphate
  modified_base 6: mod_base = OTHER; note = 2'-fluoroadenosine-3'-phosphate
  modified_base 7: mod_base = OTHER; note = 2'-O-methyluridine-3'-phosphate
  modified_base 8: mod_base = OTHER; note = 2'-fluorouridine-3'-phosphate
  modified_base 9: mod_base = OTHER; note = 2'-fluorocytidine-3'-phosphate
  modified_base 10: mod_base = OTHER; note = 2'-O-methyladenosine-3'-phosphate
  modified_base 11: mod_base = OTHER; note = 2'-O-methyluridine-3'-phosphate
  modified_base 12: mod_base = OTHER; note = 2'-O-methyluridine-3'-phosphate
  modified_base 13: mod_base = OTHER; note = 2'-O-methyluridine-3'-phosphate
  modified_base 14: mod_base = OTHER; note = 2'-fluoroguanosine-3'-phosphate
  modified_base 15: mod_base = OTHER; note = 2'-O-methylguanosine-3'-phosphate
  modified_base 16: mod_base = OTHER; note = 2'-fluorouridine-3'-phosphate
  modified_base 17: mod_base = OTHER; note = 2'-O-methyladenosine-3'-phosphate
  modified_base 18: mod_base = OTHER; note = 2'-O-methylcytidine-3'-phosphate
  modified_base 19: mod_base = OTHER; note = 2'-O-methyluridine-3'-phosphate
  modified_base 20: mod_base = OTHER; note = 2'-O-methylguanosine-3'-phosphate
  modified_base 21: mod_base = OTHER; note = 2'-O-methylcytidine-3'-phosphorothioate
  modified_base 22: mod_base = OTHER; note = 2'-O-methyluridine-3'-phosphorothioate
  modified_base 23: mod_base = OTHER; note = 2'-O-methyladenosine-3'-phosphate
tttttattcatttggtactgcta

SEQ ID NO: 1750 - RNA, 23 nt, synthetic construct
  source 1..23: mol_type = other RNA
  modified_base 1: mod_base = OTHER; note = Vinyl-phosphonate 2'-O-methyluridine-3'-phosphorothioate
  modified_base 2: mod_base = OTHER; note = 2'-fluorouridine -3'-phosphorothioate
  modified_base 3: mod_base = OTHER; note = 2'-O-methyluridine-3'-phosphate
  modified_base 4: mod_base = OTHER; note = 2'-O-methyluridine-3'-phosphate
  modified_base 5: mod_base = OTHER; note = 2'-O-methyladenosine-3'-phosphate
  modified_base 6: mod_base = OTHER; note = 2'-fluorocytidine-3'-phosphate
  modified_base 7: mod_base = OTHER; note = 2'-O-methylcytidine-3'-phosphate
  modified_base 8: mod_base = OTHER; note = 2'-fluorouridine-3'-phosphate
  modified_base 9: mod_base = OTHER; note = 2'-fluorouridine-3'-phosphate
  modified_base 10: mod_base = OTHER; note = 2'-O-methylguanosine-3'-phosphate
  modified_base 11: mod_base = OTHER; note = 2'-O-methyluridine-3'-phosphate
  modified_base 12: mod_base = OTHER; note = 2'-O-methylguanosine-3'-phosphate
  modified_base 13: mod_base = OTHER; note = 2'-O-methyluridine-3'-phosphate
  modified_base 14: mod_base = OTHER; note = 2'-fluoroadenosine-3'-phosphate
  modified_base 15: mod_base = OTHER; note = 2'-O-methylcytidine-3'-phosphate
  modified_base 16: mod_base = OTHER; note = 2'-fluorocytidine-3'-phosphate
  modified_base 17: mod_base = OTHER; note = 2'-O-methyladenosine-3'-phosphate
  modified_base 18: mod_base = OTHER; note = 2'-O-methyladenosine-3'-phosphate
  modified_base 19: mod_base = OTHER; note = 2'-O-methylcytidine-3'-phosphate
  modified_base 20: mod_base = OTHER; note = 2'-O-methyladenosine-3'-phosphate
  modified_base 21: mod_base = OTHER; note = 2'-O-methyladenosine-3'-phosphorothioate
  modified_base 22: mod_base = OTHER; note = 2'-O-methyluridine-3'-phosphorothioate
  modified_base 23: mod_base = OTHER; note = 2'-O-methylcytidine-3'-phosphate
ttttaccttgtgtaccaacaatc

SEQ ID NO: 1751 - RNA, 23 nt, synthetic construct
  source 1..23: mol_type = other RNA
  modified_base 1: mod_base = OTHER; note = Vinyl-phosphonate 2'-O-methyluridine-3'-phosphorothioate
  modified_base 2: mod_base = OTHER; note = 2'-fluoroadenosine-3'-phosphorothioate
  modified_base 3: mod_base = OTHER; note = 2'-O-methylcytidine-3'-phosphate
  modified_base 4: mod_base = OTHER; note = 2'-O-methylguanosine-3'-phosphate
  modified_base 5: mod_base = OTHER; note = 2'-O-methylguanosine-3'-phosphate
  modified_base 6: mod_base = OTHER; note = 2'-fluorouridine-3'-phosphate
  modified_base 7: mod_base = OTHER; note = 2'-O-methyluridine-3'-phosphate
  modified_base 8: mod_base = OTHER; note = 2'-fluoroadenosine-3'-phosphate
  modified_base 9: mod_base = OTHER; note = 2'-fluoroadenosine-3'-phosphate
  modified_base 10: mod_base = OTHER; note = 2'-O-methylguanosine-3'-phosphate
  modified_base 11: mod_base = OTHER; note = 2'-O-methyluridine-3'-phosphate
  modified_base 12: mod_base = OTHER; note = 2'-O-methyluridine-3'-phosphate
  modified_base 13: mod_base = OTHER; note = 2'-O-methyladenosine-3'-phosphate
  modified_base 14: mod_base = OTHER; note = 2'-fluoroadenosine-3'-phosphate
  modified_base 15: mod_base = OTHER; note = 2'-O-methyladenosine-3'-phosphate
  modified_base 16: mod_base = OTHER; note = 2'-fluorouridine-3'-phosphate
  modified_base 17: mod_base = OTHER; note = 2'-O-methyladenosine-3'-phosphate
  modified_base 18: mod_base = OTHER; note = 2'-O-methyladenosine-3'-phosphate
  modified_base 19: mod_base = OTHER; note = 2'-O-methylguanosine-3'-phosphate
  modified_base 20: mod_base = OTHER; note = 2'-O-methyladenosine-3'-phosphate
  modified_base 21: mod_base = OTHER; note = 2'-O-methylguanosine-3'-phosphorothioate
  modified_base 22: mod_base = OTHER; note = 2'-O-methyluridine-3'-phosphorothioate
  modified_base 23: mod_base = OTHER; note = 2'-O-methyluridine-3'-phosphate
tacggttaagttaaataagagtt

SEQ ID NO: 1752 - RNA, 23 nt, synthetic construct
  source 1..23: mol_type = other RNA
  modified_base 1: mod_base = OTHER; note = Vinyl-phosphonate 2'-O-methyluridine-3'-phosphorothioate
  modified_base 2: mod_base = OTHER; note = 2'-fluoroadenosine-3'-phosphorothioate
  modified_base 3: mod_base = OTHER; note = 2'-O-methyluridine-3'-phosphate
  modified_base 4: mod_base = OTHER; note = 2'-O-methyluridine-3'-phosphate
  modified_base 5: mod_base = OTHER; note = 2'-O-methylcytidine-3'-phosphate
  modified_base 6: mod_base = OTHER; note = 2'-fluoroadenosine-3'-phosphate
  modified_base 7: mod_base = OTHER; note = 2'-O-methyluridine-3'-phosphate
  modified_base 8: mod_base = OTHER; note = 2'-fluorouridine-3'-phosphate
  modified_base 9: mod_base = OTHER; note = 2'-fluoroguanosine-3'-phosphate
  modified_base 10: mod_base = OTHER; note = 2'-O-methyluridine-3'-phosphate
  modified_base 11: mod_base = OTHER; note = 2'-O-methyladenosine-3'-phosphate
  modified_base 12: mod_base = OTHER; note = 2'-O-methyluridine-3'-phosphate
  modified_base 13: mod_base = OTHER; note = 2'-O-methylcytidine-3'-phosphate
  modified_base 14: mod_base = OTHER; note = 2'-fluoroadenosine-3'-phosphate
  modified_base 15: mod_base = OTHER; note = 2'-O-methyluridine-3'-phosphate
  modified_base 16: mod_base = OTHER; note = 2'-fluorocytidine-3'-phosphate
  modified_base 17: mod_base = OTHER; note = 2'-O-methyladenosine-3'-phosphate
  modified_base 18: mod_base = OTHER; note = 2'-O-methyladenosine-3'-phosphate
  modified_base 19: mod_base = OTHER; note = 2'-O-methylguanosine-3'-phosphate
  modified_base 20: mod_base = OTHER; note = 2'-O-methylcytidine-3'-phosphate
  modified_base 21: mod_base = OTHER; note = 2'-O-methyladenosine-3'-phosphorothioate
  modified_base 22: mod_base = OTHER; note = 2'-O-methyluridine-3'-phosphorothioate
  modified_base 23: mod_base = OTHER; note = 2'-O-methyluridine-3'-phosphate
tattcattgtatcatcaagcatt

SEQ ID NO: 1753 - RNA, 23 nt, synthetic construct
  source 1..23: mol_type = other RNA
  modified_base 1: mod_base = OTHER; note = Vinyl-phosphonate 2'-O-methyluridine-3'-phosphorothioate
  modified_base 2: mod_base = OTHER; note = 2'-fluorouridine -3'-phosphorothioate
  modified_base 3: mod_base = OTHER; note = 2'-O-methylcytidine-3'-phosphate
  modified_base 4: mod_base = OTHER; note = 2'-O-methyladenosine-3'-phosphate
  modified_base 5: mod_base = OTHER; note = 2'-O-methyladenosine-3'-phosphate
  modified_base 6: mod_base = OTHER; note = 2'-fluoroadenosine-3'-phosphate
  modified_base 7: mod_base = OTHER; note = 2'-O-methyluridine-3'-phosphate
  modified_base 8: mod_base = OTHER; note = 2'-fluorouridine-3'-phosphate
  modified_base 9: mod_base = OTHER; note = 2'-fluoroguanosine-3'-phosphate
  modified_base 10: mod_base = OTHER; note = 2'-O-methyluridine-3'-phosphate
  modified_base 11: mod_base = OTHER; note = 2'-O-methylcytidine-3'-phosphate
  modified_base 12: mod_base = OTHER; note = 2'-O-methyluridine-3'-phosphate
  modified_base 13: mod_base = OTHER; note = 2'-O-methyluridine-3'-phosphate
  modified_base 14: mod_base = OTHER; note = 2'-fluorouridine-3'-phosphate
  modified_base 15: mod_base = OTHER; note = 2'-O-methylcytidine-3'-phosphate
  modified_base 16: mod_base = OTHER; note = 2'-fluorocytidine-3'-phosphate
  modified_base 17: mod_base = OTHER; note = 2'-O-methylcytidine-3'-phosphate
  modified_base 18: mod_base = OTHER; note = 2'-O-methyladenosine-3'-phosphate
  modified_base 19: mod_base = OTHER; note = 2'-O-methylguanosine-3'-phosphate
  modified_base 20: mod_base = OTHER; note = 2'-O-methyluridine-3'-phosphate
  modified_base 21: mod_base = OTHER; note = 2'-O-methyluridine-3'-phosphorothioate
  modified_base 22: mod_base = OTHER; note = 2'-O-methyladenosine-3'-phosphorothioate
  modified_base 23: mod_base = OTHER; note = 2'-O-methylcytidine-3'-phosphate
ttcaaattgtctttcccagttac

SEQ ID NO: 1754 - RNA, 23 nt, synthetic construct
  source 1..23: mol_type = other RNA
  modified_base 1: mod_base = OTHER; note = Vinyl-phosphonate 2'-O-methyluridine-3'-phosphorothioate
  modified_base 2: mod_base = OTHER; note = 2'-fluorouridine -3'-phosphorothioate
  modified_base 3: mod_base = OTHER; note = 2'-O-methylcytidine-3'-phosphate
  modified_base 4: mod_base = OTHER; note = 2'-O-methyladenosine-3'-phosphate
  modified_base 5: mod_base = OTHER; note = 2'-O-methyladenosine-3'-phosphate
  modified_base 6: mod_base = OTHER; note = 2'-fluoroadenosine-3'-phosphate
  modified_base 7: mod_base = OTHER; note = 2'-O-methyluridine-3'-phosphate
  modified_base 8: mod_base = OTHER; note = 2'-fluoroadenosine-3'-phosphate
  modified_base 9: mod_base = OTHER; note = 2'-fluoroguanosine-3'-phosphate
  modified_base 10: mod_base = OTHER; note = 2'-O-methyluridine-3'-phosphate
  modified_base 11: mod_base = OTHER; note = 2'-O-methylcytidine-3'-phosphate
  modified_base 12: mod_base = OTHER; note = 2'-O-methyladenosine-3'-phosphate
  modified_base 13: mod_base = OTHER; note = 2'-O-methyluridine-3'-phosphate
  modified_base 14: mod_base = OTHER; note = 2'-fluoroadenosine-3'-phosphate
  modified_base 15: mod_base = OTHER; note = 2'-O-methyluridine-3'-phosphate
  modified_base 16: mod_base = OTHER; note = 2'-fluoroadenosine-3'-phosphate
  modified_base 17: mod_base = OTHER; note = 2'-O-methyladenosine-3'-phosphate
  modified_base 18: mod_base = OTHER; note = 2'-O-methylguanosine-3'-phosphate
  modified_base 19: mod_base = OTHER; note = 2'-O-methylguanosine-3'-phosphate
  modified_base 20: mod_base = OTHER; note = 2'-O-methyladenosine-3'-phosphate
  modified_base 21: mod_base = OTHER; note = 2'-O-methylguanosine-3'-phosphorothioate
  modified_base 22: mod_base = OTHER; note = 2'-O-methylcytidine-3'-phosphorothioate
  modified_base 23: mod_base = OTHER; note = 2'-O-methylcytidine-3'-phosphate
ttcaaatagtcatataaggagcc

SEQ ID NO: 1755 - RNA, 23 nt, synthetic construct
  source 1..23: mol_type = other RNA
  modified_base 1: mod_base = OTHER; note = Vinyl-phosphonate 2'-O-methyluridine-3'-phosphorothioate
  modified_base 2: mod_base = OTHER; note = 2'-fluorouridine -3'-phosphorothioate
  modified_base 3: mod_base = OTHER; note = 2'-O-methyluridine-3'-phosphate
  modified_base 4: mod_base = OTHER; note = 2'-O-methylcytidine-3'-phosphate
  modified_base 5: mod_base = OTHER; note = 2'-O-methylcytidine-3'-phosphate
  modified_base 6: mod_base = OTHER; note = 2'-fluoroadenosine-3'-phosphate
  modified_base 7: mod_base = OTHER; note = 2'-O-methyluridine-3'-phosphate
  modified_base 8: mod_base = OTHER; note = 2'-fluorouridine-3'-phosphate
  modified_base 9: mod_base = OTHER; note = 2'-fluoroguanosine-3'-phosphate
  modified_base 10: mod_base = OTHER; note = 2'-O-methylguanosine-3'-phosphate
  modified_base 11: mod_base = OTHER; note = 2'-O-methyluridine-3'-phosphate
  modified_base 12: mod_base = OTHER; note = 2'-O-methyluridine-3'-phosphate
  modified_base 13: mod_base = OTHER; note = 2'-O-methyladenosine-3'-phosphate
  modified_base 14: mod_base = OTHER; note = 2'-fluoroguanosine-3'-phosphate
  modified_base 15: mod_base = OTHER; note = 2'-O-methylcytidine-3'-phosphate
  modified_base 16: mod_base = OTHER; note = 2'-fluoroadenosine-3'-phosphate
  modified_base 17: mod_base = OTHER; note = 2'-O-methyluridine-3'-phosphate
  modified_base 18: mod_base = OTHER; note = 2'-O-methylguanosine-3'-phosphate
  modified_base 19: mod_base = OTHER; note = 2'-O-methyladenosine-3'-phosphate
  modified_base 20: mod_base = OTHER; note = 2'-O-methylcytidine-3'-phosphate
  modified_base 21: mod_base = OTHER; note = 2'-O-methyluridine-3'-phosphorothioate
  modified_base 22: mod_base = OTHER; note = 2'-O-methylguanosine-3'-phosphorothioate
  modified_base 23: mod_base = OTHER; note = 2'-O-methyladenosine-3'-phosphate
tttccattggttagcatgactga

SEQ ID NO: 1756 - RNA, 23 nt, synthetic construct
  source 1..23: mol_type = other RNA
  modified_base 1: mod_base = OTHER; note = Vinyl-phosphonate 2'-O-methyluridine-3'-phosphorothioate
  modified_base 2: mod_base = OTHER; note = 2'-fluoroadenosine-3'-phosphorothioate
  modified_base 3: mod_base = OTHER; note = 2'-O-methyluridine-3'-phosphate
  modified_base 4: mod_base = OTHER; note = 2'-O-methyluridine-3'-phosphate
  modified_base 5: mod_base = OTHER; note = 2'-O-methyladenosine-3'-phosphate
  modified_base 6: mod_base = OTHER; note = 2'-fluoroguanosine-3'-phosphate
  modified_base 7: mod_base = OTHER; note = 2'-O-methylcytidine-3'-phosphate
  modified_base 8: mod_base = OTHER; note = 2'-fluorouridine-3'-phosphate
  modified_base 9: mod_base = OTHER; note = 2'-fluoroguanosine-3'-phosphate
  modified_base 10: mod_base = OTHER; note = 2'-O-methyluridine-3'-phosphate
  modified_base 11: mod_base = OTHER; note = 2'-O-methylguanosine-3'-phosphate
  modified_base 12: mod_base = OTHER; note = 2'-O-methyluridine-3'-phosphate
  modified_base 13: mod_base = OTHER; note = 2'-O-methylguanosine-3'-phosphate
  modified_base 14: mod_base = OTHER; note = 2'-fluoroadenosine-3'-phosphate
  modified_base 15: mod_base = OTHER; note = 2'-O-methylcytidine-3'-phosphate
  modified_base 16: mod_base = OTHER; note = 2'-fluorouridine-3'-phosphate
  modified_base 17: mod_base = OTHER; note = 2'-O-methyluridine-3'-phosphate
  modified_base 18: mod_base = OTHER; note = 2'-O-methylcytidine-3'-phosphate
  modified_base 19: mod_base = OTHER; note = 2'-O-methyladenosine-3'-phosphate
  modified_base 20: mod_base = OTHER; note = 2'-O-methylguanosine-3'-phosphate
  modified_base 21: mod_base = OTHER; note = 2'-O-methylguanosine-3'-phosphorothioate
  modified_base 22: mod_base = OTHER; note = 2'-O-methyladenosine-3'-phosphorothioate
  modified_base 23: mod_base = OTHER; note = 2'-O-methylcytidine-3'-phosphate
tattagctgtgtgacttcaggac

SEQ ID NO: 1757 - RNA, 23 nt, synthetic construct
  source 1..23: mol_type = other RNA
  modified_base 1: mod_base = OTHER; note = Vinyl-phosphonate 2'-O-methyluridine-3'-phosphorothioate
  modified_base 2: mod_base = OTHER; note = 2'-fluoroadenosine-3'-phosphorothioate
  modified_base 3: mod_base = OTHER; note = 2'-O-methyluridine-3'-phosphate
  modified_base 4: mod_base = OTHER; note = 2'-O-methylcytidine-3'-phosphate
  modified_base 5: mod_base = OTHER; note = 2'-O-methyluridine-3'-phosphate
  modified_base 6: mod_base = OTHER; note = 2'-fluorouridine-3'-phosphate
  modified_base 7: mod_base = OTHER; note = 2'-O-methyluridine-3'-phosphate
  modified_base 8: mod_base = OTHER; note = 2'-fluoroguanosine-3'-phosphate
  modified_base 9: mod_base = OTHER; note = 2'-fluorouridine-3'-phosphate
  modified_base 10: mod_base = OTHER; note = 2'-O-methyluridine-3'-phosphate
  modified_base 11: mod_base = OTHER; note = 2'-O-methylguanosine-3'-phosphate
  modified_base 12: mod_base = OTHER; note = 2'-O-methyluridine-3'-phosphate
  modified_base 13: mod_base = OTHER; note = 2'-O-methylcytidine-3'-phosphate
  modified_base 14: mod_base = OTHER; note = 2'-fluoroadenosine-3'-phosphate
  modified_base 15: mod_base = OTHER; note = 2'-O-methylguanosine-3'-phosphate
  modified_base 16: mod_base = OTHER; note = 2'-fluorocytidine-3'-phosphate
  modified_base 17: mod_base = OTHER; note = 2'-O-methyladenosine-3'-phosphate
  modified_base 18: mod_base = OTHER; note = 2'-O-methylguanosine-3'-phosphate
  modified_base 19: mod_base = OTHER; note = 2'-O-methylcytidine-3'-phosphate
  modified_base 20: mod_base = OTHER; note = 2'-O-methyladenosine-3'-phosphate
  modified_base 21: mod_base = OTHER; note = 2'-O-methyladenosine-3'-phosphorothioate
  modified_base 22: mod_base = OTHER; note = 2'-O-methyluridine-3'-phosphorothioate
  modified_base 23: mod_base = OTHER; note = 2'-O-methylguanosine-3'-phosphate
tatctttgttgtcagcagcaatg

SEQ ID NO: 1758 - RNA, 23 nt, synthetic construct
  source 1..23: mol_type = other RNA
  modified_base 1: mod_base = OTHER; note = Vinyl-phosphonate 2'-O-methyluridine-3'-phosphorothioate
  modified_base 2: mod_base = OTHER; note = 2'-fluorocytidine-3'-phosphorothioate
  modified_base 3: mod_base = OTHER; note = 2'-O-methyluridine-3'-phosphate
  modified_base 4: mod_base = OTHER; note = 2'-O-methyluridine-3'-phosphate
  modified_base 5: mod_base = OTHER; note = 2'-O-methyluridine-3'-phosphate
  modified_base 6: mod_base = OTHER; note = 2'-fluoroadenosine-3'-phosphate
  modified_base 7: mod_base = OTHER; note = 2'-O-methylcytidine-3'-phosphate
  modified_base 8: mod_base = OTHER; note = 2'-fluoroadenosine-3'-phosphate
  modified_base 9: mod_base = OTHER; note = 2'-fluoroguanosine-3'-phosphate
  modified_base 10: mod_base = OTHER; note = 2'-O-methylguanosine-3'-phosphate
  modified_base 11: mod_base = OTHER; note = 2'-O-methylcytidine-3'-phosphate
  modified_base 12: mod_base = OTHER; note = 2'-O-methyladenosine-3'-phosphate
  modified_base 13: mod_base = OTHER; note = 2'-O-methyladenosine-3'-phosphate
  modified_base 14: mod_base = OTHER; note = 2'-fluoroadenosine-3'-phosphate
  modified_base 15: mod_base = OTHER; note = 2'-O-methylguanosine-3'-phosphate
  modified_base 16: mod_base = OTHER; note = 2'-fluorouridine-3'-phosphate
  modified_base 17: mod_base = OTHER; note = 2'-O-methylcytidine-3'-phosphate
  modified_base 18: mod_base = OTHER; note = 2'-O-methyladenosine-3'-phosphate
  modified_base 19: mod_base = OTHER; note = 2'-O-methylguanosine-3'-phosphate
  modified_base 20: mod_base = OTHER; note = 2'-O-methyluridine-3'-phosphate
  modified_base 21: mod_base = OTHER; note = 2'-O-methyladenosine-3'-phosphorothioate
  modified_base 22: mod_base = OTHER; note = 2'-O-methyladenosine-3'-phosphorothioate
  modified_base 23: mod_base = OTHER; note = 2'-O-methyluridine-3'-phosphate
tctttacaggcaaagtcagtaat

SEQ ID NO: 1759 - RNA, 23 nt, synthetic construct
  source 1..23: mol_type = other RNA
  modified_base 1: mod_base = OTHER; note = Vinyl-phosphonate 2'-O-methyluridine-3'-phosphorothioate
  modified_base 2: mod_base = OTHER; note = 2'-fluoroguanosine-3'-phosphorothioate
  modified_base 3: mod_base = OTHER; note = 2'-O-methylguanosine-3'-phosphate
  modified_base 4: mod_base = OTHER; note = 2'-O-methyladenosine-3'-phosphate
  modified_base 5: mod_base = OTHER; note = 2'-O-methyladenosine-3'-phosphate
  modified_base 6: mod_base = OTHER; note = 2'-fluorouridine-3'-phosphate
  modified_base 7: mod_base = OTHER; note = 2'-O-methyluridine-3'-phosphate
  modified_base 8: mod_base = OTHER; note = 2'-fluorouridine-3'-phosphate
  modified_base 9: mod_base = OTHER; note = 2'-fluorouridine-3'-phosphate
  modified_base 10: mod_base = OTHER; note = 2'-O-methyladenosine-3'-phosphate
  modified_base 11: mod_base = OTHER; note = 2'-O-methyladenosine-3'-phosphate
  modified_base 12: mod_base = OTHER; note = 2'-O-methyladenosine-3'-phosphate
  modified_base 13: mod_base = OTHER; note = 2'-O-methyladenosine-3'-phosphate
  modified_base 14: mod_base = OTHER; note = 2'-fluorouridine-3'-phosphate
  modified_base 15: mod_base = OTHER; note = 2'-O-methyladenosine-3'-phosphate
  modified_base 16: mod_base = OTHER; note = 2'-fluoroguanosine-3'-phosphate
  modified_base 17: mod_base = OTHER; note = 2'-O-methylguanosine-3'-phosphate
  modified_base 18: mod_base = OTHER; note = 2'-O-methylguanosine-3'-phosphate
  modified_base 19: mod_base = OTHER; note = 2'-O-methyladenosine-3'-phosphate
  modified_base 20: mod_base = OTHER; note = 2'-O-methyluridine-3'-phosphate
  modified_base 21: mod_base = OTHER; note = 2'-O-methyluridine-3'-phosphorothioate
  modified_base 22: mod_base = OTHER; note = 2'-O-methylguanosine-3'-phosphorothioate
  modified_base 23: mod_base = OTHER; note = 2'-O-methyluridine-3'-phosphate
tggaattttaaaatagggattgt

SEQ ID NO: 1760 - RNA, 23 nt, synthetic construct
  source 1..23: mol_type = other RNA
  modified_base 1: mod_base = OTHER; note = Vinyl-phosphonate 2'-O-methyluridine-3'-phosphorothioate
  modified_base 2: mod_base = OTHER; note = 2'-fluoroadenosine-3'-phosphorothioate
  modified_base 3: mod_base = OTHER; note = 2'-O-methylguanosine-3'-phosphate
  modified_base 4: mod_base = OTHER; note = 2'-O-methylguanosine-3'-phosphate
  modified_base 5: mod_base = OTHER; note = 2'-O-methylguanosine-3'-phosphate
  modified_base 6: mod_base = OTHER; note = 2'-fluorouridine-3'-phosphate
  modified_base 7: mod_base = OTHER; note = 2'-O-methyladenosine-3'-phosphate
  modified_base 8: mod_base = OTHER; note = 2'-fluoroadenosine-3'-phosphate
  modified_base 9: mod_base = OTHER; note = 2'-fluorouridine-3'-phosphate
  modified_base 10: mod_base = OTHER; note = 2'-O-methylcytidine-3'-phosphate
  modified_base 11: mod_base = OTHER; note = 2'-O-methyluridine-3'-phosphate
  modified_base 12: mod_base = OTHER; note = 2'-O-methylcytidine-3'-phosphate
  modified_base 13: mod_base = OTHER; note = 2'-O-methylcytidine-3'-phosphate
  modified_base 14: mod_base = OTHER; note = 2'-fluorouridine-3'-phosphate
  modified_base 15: mod_base = OTHER; note = 2'-O-methyladenosine-3'-phosphate
  modified_base 16: mod_base = OTHER; note = 2'-fluoroadenosine-3'-phosphate
  modified_base 17: mod_base = OTHER; note = 2'-O-methylguanosine-3'-phosphate
  modified_base 18: mod_base = OTHER; note = 2'-O-methylguanosine-3'-phosphate
  modified_base 19: mod_base = OTHER; note = 2'-O-methylcytidine-3'-phosphate
  modified_base 20: mod_base = OTHER; note = 2'-O-methyladenosine-3'-phosphate
  modified_base 21: mod_base = OTHER; note = 2'-O-methylcytidine-3'-phosphorothioate
  modified_base 22: mod_base = OTHER; note = 2'-O-methyluridine-3'-phosphorothioate
  modified_base 23: mod_base = OTHER; note = 2'-O-methylcytidine-3'-phosphate
tagggtaatctcctaaggcactc

SEQ ID NO: 1761 - RNA, 23 nt, synthetic construct
  source 1..23: mol_type = other RNA
  modified_base 1: mod_base = OTHER; note = Vinyl-phosphonate 2'-O-methyluridine-3'-phosphorothioate
  modified_base 2: mod_base = OTHER; note = 2'-fluoroguanosine-3'-phosphorothioate
  modified_base 3: mod_base = OTHER; note = 2'-O-methyladenosine-3'-phosphate
  modified_base 4: mod_base = OTHER; note = 2'-O-methyluridine-3'-phosphate
  modified_base 5: mod_base = OTHER; note = 2'-O-methylguanosine-3'-phosphate
  modified_base 6: mod_base = OTHER; note = 2'-fluoroadenosine-3'-phosphate
  modified_base 7: mod_base = OTHER; note = 2'-O-methyluridine-3'-phosphate
  modified_base 8: mod_base = OTHER; note = 2'-fluoroadenosine-3'-phosphate
  modified_base 9: mod_base = OTHER; note = 2'-fluorouridine-3'-phosphate
  modified_base 10: mod_base = OTHER; note = 2'-O-methyladenosine-3'-phosphate
  modified_base 11: mod_base = OTHER; note = 2'-O-methyluridine-3'-phosphate
  modified_base 12: mod_base = OTHER; note = 2'-O-methyluridine-3'-phosphate
  modified_base 13: mod_base = OTHER; note = 2'-O-methyluridine-3'-phosphate
  modified_base 14: mod_base = OTHER; note = 2'-fluoroadenosine-3'-phosphate
  modified_base 15: mod_base = OTHER; note = 2'-O-methylguanosine-3'-phosphate
  modified_base 16: mod_base = OTHER; note = 2'-fluoroadenosine-3'-phosphate
  modified_base 17: mod_base = OTHER; note = 2'-O-methyluridine-3'-phosphate
  modified_base 18: mod_base = OTHER; note = 2'-O-methyluridine-3'-phosphate
  modified_base 19: mod_base = OTHER; note = 2'-O-methylguanosine-3'-phosphate
  modified_base 20: mod_base = OTHER; note = 2'-O-methyluridine-3'-phosphate
  modified_base 21: mod_base = OTHER; note = 2'-O-methylcytidine-3'-phosphorothioate
  modified_base 22: mod_base = OTHER; note = 2'-O-methyluridine-3'-phosphorothioate
  modified_base 23: mod_base = OTHER; note = 2'-O-methylguanosine-3'-phosphate
tgatgatatatttagattgtctg

SEQ ID NO: 1762 - RNA, 23 nt, synthetic construct
  source 1..23: mol_type = other RNA
  modified_base 1: mod_base = OTHER; note = Vinyl-phosphonate 2'-O-methyluridine-3'-phosphorothioate
  modified_base 2: mod_base = OTHER; note = 2'-fluorouridine -3'-phosphorothioate
  modified_base 3: mod_base = OTHER; note = 2'-O-methyluridine-3'-phosphate
  modified_base 4: mod_base = OTHER; note = 2'-O-methyladenosine-3'-phosphate
  modified_base 5: mod_base = OTHER; note = 2'-O-methylcytidine-3'-phosphate
  modified_base 6: mod_base = OTHER; note = 2'-fluoroguanosine-3'-phosphate
  modified_base 7: mod_base = OTHER; note = 2'-O-methylguanosine-3'-phosphate
  modified_base 8: mod_base = OTHER; note = 2'-fluorouridine-3'-phosphate
  modified_base 9: mod_base = OTHER; note = 2'-fluoroguanosine-3'-phosphate
  modified_base 10: mod_base = OTHER; note = 2'-O-methyluridine-3'-phosphate
  modified_base 11: mod_base = OTHER; note = 2'-O-methyluridine-3'-phosphate
  modified_base 12: mod_base = OTHER; note = 2'-O-methylcytidine-3'-phosphate
  modified_base 13: mod_base = OTHER; note = 2'-O-methyladenosine-3'-phosphate
  modified_base 14: mod_base = OTHER; note = 2'-fluorouridine-3'-phosphate
  modified_base 15: mod_base = OTHER; note = 2'-O-methyluridine-3'-phosphate
  modified_base 16: mod_base = OTHER; note = 2'-fluoroadenosine-3'-phosphate
  modified_base 17: mod_base = OTHER; note = 2'-O-methyluridine-3'-phosphate
  modified_base 18: mod_base = OTHER; note = 2'-O-methylcytidine-3'-phosphate
  modified_base 19: mod_base = OTHER; note = 2'-O-methyladenosine-3'-phosphate
  modified_base 20: mod_base = OTHER; note = 2'-O-methylcytidine-3'-phosphate
  modified_base 21: mod_base = OTHER; note = 2'-O-methyladenosine-3'-phosphorothioate
  modified_base 22: mod_base = OTHER; note = 2'-O-methyladenosine-3'-phosphorothioate
  modified_base 23: mod_base = OTHER; note = 2'-O-methylguanosine-3'-phosphate
tttacggtgttcattatcacaag

SEQ ID NO: 1763 - RNA, 23 nt, synthetic construct
  source 1..23: mol_type = other RNA
  modified_base 1: mod_base = OTHER; note = Vinyl-phosphonate 2'-O-methyluridine-3'-phosphorothioate
  modified_base 2: mod_base = OTHER; note = 2'-fluoroadenosine-3'-phosphorothioate
  modified_base 3: mod_base = OTHER; note = 2'-O-methyladenosine-3'-phosphate
  modified_base 4: mod_base = OTHER; note = 2'-O-methyladenosine-3'-phosphate
  modified_base 5: mod_base = OTHER; note = 2'-O-methyladenosine-3'-phosphate
  modified_base 6: mod_base = OTHER; note = 2'-fluoroguanosine-3'-phosphate
  modified_base 7: mod_base = OTHER; note = 2'-O-methyluridine-3'-phosphate
  modified_base 8: mod_base = OTHER; note = 2'-fluorocytidine-3'-phosphate
  modified_base 9: mod_base = OTHER; note = 2'-fluorouridine-3'-phosphate
  modified_base 10: mod_base = OTHER; note = 2'-O-methyluridine-3'-phosphate
  modified_base 11: mod_base = OTHER; note = 2'-O-methyluridine-3'-phosphate
  modified_base 12: mod_base = OTHER; note = 2'-O-methyladenosine-3'-phosphate
  modified_base 13: mod_base = OTHER; note = 2'-O-methylcytidine-3'-phosphate
  modified_base 14: mod_base = OTHER; note = 2'-fluoroadenosine-3'-phosphate
  modified_base 15: mod_base = OTHER; note = 2'-O-methyladenosine-3'-phosphate
  modified_base 16: mod_base = OTHER; note = 2'-fluorocytidine-3'-phosphate
  modified_base 17: mod_base = OTHER; note = 2'-O-methylguanosine-3'-phosphate
  modified_base 18: mod_base = OTHER; note = 2'-O-methylguanosine-3'-phosphate
  modified_base 19: mod_base = OTHER; note = 2'-O-methyluridine-3'-phosphate
  modified_base 20: mod_base = OTHER; note = 2'-O-methylguanosine-3'-phosphate
  modified_base 21: mod_base = OTHER; note = 2'-O-methyladenosine-3'-phosphorothioate
  modified_base 22: mod_base = OTHER; note = 2'-O-methyluridine-3'-phosphorothioate
  modified_base 23: mod_base = OTHER; note = 2'-O-methyluridine-3'-phosphate
taaaagtctttacaacggtgatt

SEQ ID NO: 1764 - RNA, 23 nt, synthetic construct
  source 1..23: mol_type = other RNA
  modified_base 1: mod_base = OTHER; note = Vinyl-phosphonate 2'-O-methyluridine-3'-phosphorothioate
  modified_base 2: mod_base = OTHER; note = 2'-fluoroadenosine-3'-phosphorothioate
  modified_base 3: mod_base = OTHER; note = 2'-O-methyluridine-3'-phosphate
  modified_base 4: mod_base = OTHER; note = 2'-O-methylguanosine-3'-phosphate
  modified_base 5: mod_base = OTHER; note = 2'-O-methyluridine-3'-phosphate
  modified_base 6: mod_base = OTHER; note = 2'-fluorocytidine-3'-phosphate
  modified_base 7: mod_base = OTHER; note = 2'-O-methyladenosine-3'-phosphate
  modified_base 8: mod_base = OTHER; note = 2'-fluoroguanosine-3'-phosphate
  modified_base 9: mod_base = OTHER; note = 2'-fluoroguanosine-3'-phosphate
  modified_base 10: mod_base = OTHER; note = 2'-O-methyladenosine-3'-phosphate
  modified_base 11: mod_base = OTHER; note = 2'-O-methyladenosine-3'-phosphate
  modified_base 12: mod_base = OTHER; note = 2'-O-methylguanosine-3'-phosphate
  modified_base 13: mod_base = OTHER; note = 2'-O-methylcytidine-3'-phosphate
  modified_base 14: mod_base = OTHER; note = 2'-fluorouridine-3'-phosphate
  modified_base 15: mod_base = OTHER; note = 2'-O-methyluridine-3'-phosphate
  modified_base 16: mod_base = OTHER; note = 2'-fluorocytidine-3'-phosphate
  modified_base 17: mod_base = OTHER; note = 2'-O-methyluridine-3'-phosphate
  modified_base 18: mod_base = OTHER; note = 2'-O-methylcytidine-3'-phosphate
  modified_base 19: mod_base = OTHER; note = 2'-O-methyluridine-3'-phosphate
  modified_base 20: mod_base = OTHER; note = 2'-O-methyladenosine-3'-phosphate
  modified_base 21: mod_base = OTHER; note = 2'-O-methyladenosine-3'-phosphorothioate
  modified_base 22: mod_base = OTHER; note = 2'-O-methyluridine-3'-phosphorothioate
  modified_base 23: mod_base = OTHER; note = 2'-O-methylcytidine-3'-phosphate
tatgtcaggaagcttctctaatc

SEQ ID NO: 1765 - RNA, 23 nt, synthetic construct
  source 1..23: mol_type = other RNA
  modified_base 1: mod_base = OTHER; note = Vinyl-phosphonate 2'-O-methyluridine-3'-phosphorothioate
  modified_base 2: mod_base = OTHER; note = 2'-fluoroadenosine-3'-phosphorothioate
  modified_base 3: mod_base = OTHER; note = 2'-O-methylguanosine-3'-phosphate
  modified_base 4: mod_base = OTHER; note = 2'-O-methyluridine-3'-phosphate
  modified_base 5: mod_base = OTHER; note = 2'-O-methyladenosine-3'-phosphate
  modified_base 6: mod_base = OTHER; note = 2'-fluoroguanosine-3'-phosphate
  modified_base 7: mod_base = OTHER; note = 2'-O-methylcytidine-3'-phosphate
  modified_base 8: mod_base = OTHER; note = 2'-fluoroadenosine-3'-phosphate
  modified_base 9: mod_base = OTHER; note = 2'-fluorouridine-3'-phosphate
  modified_base 10: mod_base = OTHER; note = 2'-O-methyluridine-3'-phosphate
  modified_base 11: mod_base = OTHER; note = 2'-O-methyluridine-3'-phosphate
  modified_base 12: mod_base = OTHER; note = 2'-O-methylcytidine-3'-phosphate
  modified_base 13: mod_base = OTHER; note = 2'-O-methyluridine-3'-phosphate
  modified_base 14: mod_base = OTHER; note = 2'-fluorouridine-3'-phosphate
  modified_base 15: mod_base = OTHER; note = 2'-O-methyluridine-3'-phosphate
  modified_base 16: mod_base = OTHER; note = 2'-fluoroadenosine-3'-phosphate
  modified_base 17: mod_base = OTHER; note = 2'-O-methylcytidine-3'-phosphate
  modified_base 18: mod_base = OTHER; note = 2'-O-methyluridine-3'-phosphate
  modified_base 19: mod_base = OTHER; note = 2'-O-methylguanosine-3'-phosphate
  modified_base 20: mod_base = OTHER; note = 2'-O-methyluridine-3'-phosphate
  modified_base 21: mod_base = OTHER; note = 2'-O-methyluridine-3'-phosphorothioate
  modified_base 22: mod_base = OTHER; note = 2'-O-methyladenosine-3'-phosphorothioate
  modified_base 23: mod_base = OTHER; note = 2'-O-methyluridine-3'-phosphate
tagtagcatttctttactgttat

SEQ ID NO: 1766 - RNA, 23 nt, synthetic construct
  source 1..23: mol_type = other RNA
  modified_base 1: mod_base = OTHER; note = Vinyl-phosphonate 2'-O-methyluridine-3'-phosphorothioate
  modified_base 2: mod_base = OTHER; note = 2'-fluoroadenosine-3'-phosphorothioate
  modified_base 3: mod_base = OTHER; note = 2'-O-methyladenosine-3'-phosphate
  modified_base 4: mod_base = OTHER; note = 2'-O-methylcytidine-3'-phosphate
  modified_base 5: mod_base = OTHER; note = 2'-O-methyluridine-3'-phosphate
  modified_base 6: mod_base = OTHER; note = 2'-fluorocytidine-3'-phosphate
  modified_base 7: mod_base = OTHER; note = 2'-O-methyluridine-3'-phosphate
  modified_base 8: mod_base = OTHER; note = 2'-fluorocytidine-3'-phosphate
  modified_base 9: mod_base = OTHER; note = 2'-fluoroadenosine-3'-phosphate
  modified_base 10: mod_base = OTHER; note = 2'-O-methyladenosine-3'-phosphate
  modified_base 11: mod_base = OTHER; note = 2'-O-methylguanosine-3'-phosphate
  modified_base 12: mod_base = OTHER; note = 2'-O-methyluridine-3'-phosphate
  modified_base 13: mod_base = OTHER; note = 2'-O-methylcytidine-3'-phosphate
  modified_base 14: mod_base = OTHER; note = 2'-fluoroadenosine-3'-phosphate
  modified_base 15: mod_base = OTHER; note = 2'-O-methylguanosine-3'-phosphate
  modified_base 16: mod_base = OTHER; note = 2'-fluoroadenosine-3'-phosphate
  modified_base 17: mod_base = OTHER; note = 2'-O-methyladenosine-3'-phosphate
  modified_base 18: mod_base = OTHER; note = 2'-O-methylcytidine-3'-phosphate
  modified_base 19: mod_base = OTHER; note = 2'-O-methyladenosine-3'-phosphate
  modified_base 20: mod_base = OTHER; note = 2'-O-methyluridine-3'-phosphate
  modified_base 21: mod_base = OTHER; note = 2'-O-methyladenosine-3'-phosphorothioate
  modified_base 22: mod_base = OTHER; note = 2'-O-methyladenosine-3'-phosphorothioate
  modified_base 23: mod_base = OTHER; note = 2'-O-methyladenosine-3'-phosphate
taactctcaagtcagaacataaa

SEQ ID NO: 1767 - RNA, 23 nt, synthetic construct
  source 1..23: mol_type = other RNA
  modified_base 1: mod_base = OTHER; note = Vinyl-phosphonate 2'-O-methyluridine-3'-phosphorothioate
  modified_base 2: mod_base = OTHER; note = 2'-fluorocytidine-3'-phosphorothioate
  modified_base 3: mod_base = OTHER; note = 2'-O-methyluridine-3'-phosphate
  modified_base 4: mod_base = OTHER; note = 2'-O-methyladenosine-3'-phosphate
  modified_base 5: mod_base = OTHER; note = 2'-O-methyladenosine-3'-phosphate
  modified_base 6: mod_base = OTHER; note = 2'-fluoroadenosine-3'-phosphate
  modified_base 7: mod_base = OTHER; note = 2'-O-methylguanosine-3'-phosphate
  modified_base 8: mod_base = OTHER; note = 2'-fluoroadenosine-3'-phosphate
  modified_base 9: mod_base = OTHER; note = 2'-fluorouridine-3'-phosphate
  modified_base 10: mod_base = OTHER; note = 2'-O-methyladenosine-3'-phosphate
  modified_base 11: mod_base = OTHER; note = 2'-O-methylguanosine-3'-phosphate
  modified_base 12: mod_base = OTHER; note = 2'-O-methylcytidine-3'-phosphate
  modified_base 13: mod_base = OTHER; note = 2'-O-methyladenosine-3'-phosphate
  modified_base 14: mod_base = OTHER; note = 2'-fluorouridine-3'-phosphate
  modified_base 15: mod_base = OTHER; note = 2'-O-methylguanosine-3'-phosphate
  modified_base 16: mod_base = OTHER; note = 2'-fluorocytidine-3'-phosphate
  modified_base 17: mod_base = OTHER; note = 2'-O-methyluridine-3'-phosphate
  modified_base 18: mod_base = OTHER; note = 2'-O-methylcytidine-3'-phosphate
  modified_base 19: mod_base = OTHER; note = 2'-O-methyluridine-3'-phosphate
  modified_base 20: mod_base = OTHER; note = 2'-O-methyladenosine-3'-phosphate
  modified_base 21: mod_base = OTHER; note = 2'-O-methyladenosine-3'-phosphorothioate
  modified_base 22: mod_base = OTHER; note = 2'-O-methyluridine-3'-phosphorothioate
  modified_base 23: mod_base = OTHER; note = 2'-O-methyluridine-3'-phosphate
tctaaagatagcatgctctaatt

SEQ ID NO: 1768 - RNA, 23 nt, synthetic construct
  source 1..23: mol_type = other RNA
  modified_base 1: mod_base = OTHER; note = Vinyl-phosphonate 2'-O-methyluridine-3'-phosphorothioate
  modified_base 2: mod_base = OTHER; note = 2'-fluorocytidine-3'-phosphorothioate
  modified_base 3: mod_base = OTHER; note = 2'-O-methyluridine-3'-phosphate
  modified_base 4: mod_base = OTHER; note = 2'-O-methyluridine-3'-phosphate
  modified_base 5: mod_base = OTHER; note = 2'-O-methyladenosine-3'-phosphate
  modified_base 6: mod_base = OTHER; note = 2'-fluorouridine-3'-phosphate
  modified_base 7: mod_base = OTHER; note = 2'-O-methyluridine-3'-phosphate
  modified_base 8: mod_base = OTHER; note = 2'-fluorouridine-3'-phosphate
  modified_base 9: mod_base = OTHER; note = 2'-fluorocytidine-3'-phosphate
  modified_base 10: mod_base = OTHER; note = 2'-O-methyladenosine-3'-phosphate
  modified_base 11: mod_base = OTHER; note = 2'-O-methyladenosine-3'-phosphate
  modified_base 12: mod_base = OTHER; note = 2'-O-methyluridine-3'-phosphate
  modified_base 13: mod_base = OTHER; note = 2'-O-methylcytidine-3'-phosphate
  modified_base 14: mod_base = OTHER; note = 2'-fluoroadenosine-3'-phosphate
  modified_base 15: mod_base = OTHER; note = 2'-O-methyladenosine-3'-phosphate
  modified_base 16: mod_base = OTHER; note = 2'-fluoroadenosine-3'-phosphate
  modified_base 17: mod_base = OTHER; note = 2'-O-methylguanosine-3'-phosphate
  modified_base 18: mod_base = OTHER; note = 2'-O-methyladenosine-3'-phosphate
  modified_base 19: mod_base = OTHER; note = 2'-O-methylcytidine-3'-phosphate
  modified_base 20: mod_base = OTHER; note = 2'-O-methyluridine-3'-phosphate
  modified_base 21: mod_base = OTHER; note = 2'-O-methyladenosine-3'-phosphorothioate
  modified_base 22: mod_base = OTHER; note = 2'-O-methyluridine-3'-phosphorothioate
  modified_base 23: mod_base = OTHER; note = 2'-O-methylguanosine-3'-phosphate
tcttatttcaatcaaagactatg

SEQ ID NO: 1769 - RNA, 23 nt, synthetic construct
  source 1..23: mol_type = other RNA
  modified_base 1: mod_base = OTHER; note = Vinyl-phosphonate 2'-O-methyluridine-3'-phosphorothioate
  modified_base 2: mod_base = OTHER; note = 2'-fluorouridine -3'-phosphorothioate
  modified_base 3: mod_base = OTHER; note = 2'-O-methylguanosine-3'-phosphate
  modified_base 4: mod_base = OTHER; note = 2'-O-methyluridine-3'-phosphate
  modified_base 5: mod_base = OTHER; note = 2'-O-methyluridine-3'-phosphate
  modified_base 6: mod_base = OTHER; note = 2'-fluoroadenosine-3'-phosphate
  modified_base 7: mod_base = OTHER; note = 2'-O-methyladenosine-3'-phosphate
  modified_base 8: mod_base = OTHER; note = 2'-fluoroadenosine-3'-phosphate
  modified_base 9: mod_base = OTHER; note = 2'-fluorouridine-3'-phosphate
  modified_base 10: mod_base = OTHER; note = 2'-O-methylcytidine-3'-phosphate
  modified_base 11: mod_base = OTHER; note = 2'-O-methyluridine-3'-phosphate
  modified_base 12: mod_base = OTHER; note = 2'-O-methylcytidine-3'-phosphate
  modified_base 13: mod_base = OTHER; note = 2'-O-methylguanosine-3'-phosphate
  modified_base 14: mod_base = OTHER; note = 2'-fluorouridine-3'-phosphate
  modified_base 15: mod_base = OTHER; note = 2'-O-methyluridine-3'-phosphate
  modified_base 16: mod_base = OTHER; note = 2'-fluorouridine-3'-phosphate
  modified_base 17: mod_base = OTHER; note = 2'-O-methyladenosine-3'-phosphate
  modified_base 18: mod_base = OTHER; note = 2'-O-methylcytidine-3'-phosphate
  modified_base 19: mod_base = OTHER; note = 2'-O-methylcytidine-3'-phosphate
  modified_base 20: mod_base = OTHER; note = 2'-O-methyladenosine-3'-phosphate
  modified_base 21: mod_base = OTHER; note = 2'-O-methyladenosine-3'-phosphorothioate
  modified_base 22: mod_base = OTHER; note = 2'-O-methyladenosine-3'-phosphorothioate
  modified_base 23: mod_base = OTHER; note = 2'-O-methylguanosine-3'-phosphate
ttgttaaatctcgtttaccaaag

SEQ ID NO: 1770 - RNA, 23 nt, synthetic construct
  source 1..23: mol_type = other RNA
  modified_base 1: mod_base = OTHER; note = Vinyl-phosphonate 2'-O-methyluridine-3'-phosphorothioate
  modified_base 2: mod_base = OTHER; note = 2'-fluoroadenosine-3'-phosphorothioate
  modified_base 3: mod_base = OTHER; note = 2'-O-methyladenosine-3'-phosphate
  modified_base 4: mod_base = OTHER; note = 2'-O-methyluridine-3'-phosphate
  modified_base 5: mod_base = OTHER; note = 2'-O-methylguanosine-3'-phosphate
  modified_base 6: mod_base = OTHER; note = 2'-fluoroadenosine-3'-phosphate
  modified_base 7: mod_base = OTHER; note = 2'-O-methyladenosine-3'-phosphate
  modified_base 8: mod_base = OTHER; note = 2'-fluoroadenosine-3'-phosphate
  modified_base 9: mod_base = OTHER; note = 2'-fluoroguanosine-3'-phosphate
  modified_base 10: mod_base = OTHER; note = 2'-O-methylcytidine-3'-phosphate
  modified_base 11: mod_base = OTHER; note = 2'-O-methyladenosine-3'-phosphate
  modified_base 12: mod_base = OTHER; note = 2'-O-methyladenosine-3'-phosphate
  modified_base 13: mod_base = OTHER; note = 2'-O-methyluridine-3'-phosphate
  modified_base 14: mod_base = OTHER; note = 2'-fluorouridine-3'-phosphate
  modified_base 15: mod_base = OTHER; note = 2'-O-methyluridine-3'-phosphate
  modified_base 16: mod_base = OTHER; note = 2'-fluorouridine-3'-phosphate
  modified_base 17: mod_base = OTHER; note = 2'-O-methylcytidine-3'-phosphate
  modified_base 18: mod_base = OTHER; note = 2'-O-methyladenosine-3'-phosphate
  modified_base 19: mod_base = OTHER; note = 2'-O-methylguanosine-3'-phosphate
  modified_base 20: mod_base = OTHER; note = 2'-O-methyladenosine-3'-phosphate
  modified_base 21: mod_base = OTHER; note = 2'-O-methylcytidine-3'-phosphorothioate
  modified_base 22: mod_base = OTHER; note = 2'-O-methylcytidine-3'-phosphorothioate
  modified_base 23: mod_base = OTHER; note = 2'-O-methyluridine-3'-phosphate
taatgaaagcaattttcagacct

SEQ ID NO: 1771 - RNA, 23 nt, synthetic construct
  source 1..23: mol_type = other RNA
  modified_base 1: mod_base = OTHER; note = Vinyl-phosphonate 2'-O-methyluridine-3'-phosphorothioate
  modified_base 2: mod_base = OTHER; note = 2'-fluorouridine -3'-phosphorothioate
  modified_base 3: mod_base = OTHER; note = 2'-O-methyluridine-3'-phosphate
  modified_base 4: mod_base = OTHER; note = 2'-O-methyladenosine-3'-phosphate
  modified_base 5: mod_base = OTHER; note = 2'-O-methylcytidine-3'-phosphate
  modified_base 6: mod_base = OTHER; note = 2'-fluoroadenosine-3'-phosphate
  modified_base 7: mod_base = OTHER; note = 2'-O-methyladenosine-3'-phosphate
  modified_base 8: mod_base = OTHER; note = 2'-fluoroguanosine-3'-phosphate
  modified_base 9: mod_base = OTHER; note = 2'-fluoroguanosine-3'-phosphate
  modified_base 10: mod_base = OTHER; note = 2'-O-methylcytidine-3'-phosphate
  modified_base 11: mod_base = OTHER; note = 2'-O-methyladenosine-3'-phosphate
  modified_base 12: mod_base = OTHER; note = 2'-O-methyladenosine-3'-phosphate
  modified_base 13: mod_base = OTHER; note = 2'-O-methylcytidine-3'-phosphate
  modified_base 14: mod_base = OTHER; note = 2'-fluoroadenosine-3'-phosphate
  modified_base 15: mod_base = OTHER; note = 2'-O-methyladenosine-3'-phosphate
  modified_base 16: mod_base = OTHER; note = 2'-fluoroguanosine-3'-phosphate
  modified_base 17: mod_base = OTHER; note = 2'-O-methyluridine-3'-phosphate
  modified_base 18: mod_base = OTHER; note = 2'-O-methyluridine-3'-phosphate
  modified_base 19: mod_base = OTHER; note = 2'-O-methylcytidine-3'-phosphate
  modified_base 20: mod_base = OTHER; note = 2'-O-methyladenosine-3'-phosphate
  modified_base 21: mod_base = OTHER; note = 2'-O-methyluridine-3'-phosphorothioate
  modified_base 22: mod_base = OTHER; note = 2'-O-methylguanosine-3'-phosphorothioate
  modified_base 23: mod_base = OTHER; note = 2'-O-methylcytidine-3'-phosphate
tttacaaggcaacaagttcatgc

SEQ ID NO: 1772 - RNA, 23 nt, synthetic construct
  source 1..23: mol_type = other RNA
  modified_base 1: mod_base = OTHER; note = Vinyl-phosphonate 2'-O-methyluridine-3'-phosphorothioate
  modified_base 2: mod_base = OTHER; note = 2'-fluorouridine -3'-phosphorothioate
  modified_base 3: mod_base = OTHER; note = 2'-O-methyluridine-3'-phosphate
  modified_base 4: mod_base = OTHER; note = 2'-O-methyluridine-3'-phosphate
  modified_base 5: mod_base = OTHER; note = 2'-O-methylguanosine-3'-phosphate
  modified_base 6: mod_base = OTHER; note = 2'-fluoroadenosine-3'-phosphate
  modified_base 7: mod_base = OTHER; note = 2'-O-methyluridine-3'-phosphate
  modified_base 8: mod_base = OTHER; note = 2'-fluoroadenosine-3'-phosphate
  modified_base 9: mod_base = OTHER; note = 2'-fluorocytidine-3'-phosphate
  modified_base 10: mod_base = OTHER; note = 2'-O-methyladenosine-3'-phosphate
  modified_base 11: mod_base = OTHER; note = 2'-O-methylguanosine-3'-phosphate
  modified_base 12: mod_base = OTHER; note = 2'-O-methyluridine-3'-phosphate
  modified_base 13: mod_base = OTHER; note = 2'-O-methyluridine-3'-phosphate
  modified_base 14: mod_base = OTHER; note = 2'-fluorouridine-3'-phosphate
  modified_base 15: mod_base = OTHER; note = 2'-O-methyladenosine-3'-phosphate
  modified_base 16: mod_base = OTHER; note = 2'-fluorouridine-3'-phosphate
  modified_base 17: mod_base = OTHER; note = 2'-O-methyluridine-3'-phosphate
  modified_base 18: mod_base = OTHER; note = 2'-O-methylguanosine-3'-phosphate
  modified_base 19: mod_base = OTHER; note = 2'-O-methylcytidine-3'-phosphate
  modified_base 20: mod_base = OTHER; note = 2'-O-methylcytidine-3'-phosphate
  modified_base 21: mod_base = OTHER; note = 2'-O-methylcytidine-3'-phosphorothioate
  modified_base 22: mod_base = OTHER; note = 2'-O-methyladenosine-3'-phosphorothioate
  modified_base 23: mod_base = OTHER; note = 2'-O-methyladenosine-3'-phosphate
ttttgatacagtttattgcccaa

SEQ ID NO: 1773 - RNA, 23 nt, synthetic construct
  source 1..23: mol_type = other RNA
  modified_base 1: mod_base = OTHER; note = Vinyl-phosphonate 2'-O-methyluridine-3'-phosphorothioate
  modified_base 2: mod_base = OTHER; note = 2'-fluorouridine -3'-phosphorothioate
  modified_base 3: mod_base = OTHER; note = 2'-O-methyladenosine-3'-phosphate
  modified_base 4: mod_base = OTHER; note = 2'-O-methylcytidine-3'-phosphate
  modified_base 5: mod_base = OTHER; note = 2'-O-methyladenosine-3'-phosphate
  modified_base 6: mod_base = OTHER; note = 2'-fluorouridine-3'-phosphate
  modified_base 7: mod_base = OTHER; note = 2'-O-methyluridine-3'-phosphate
  modified_base 8: mod_base = OTHER; note = 2'-fluoroadenosine-3'-phosphate
  modified_base 9: mod_base = OTHER; note = 2'-fluorouridine-3'-phosphate
  modified_base 10: mod_base = OTHER; note = 2'-O-methyladenosine-3'-phosphate
  modified_base 11: mod_base = OTHER; note = 2'-O-methyluridine-3'-phosphate
  modified_base 12: mod_base = OTHER; note = 2'-O-methylguanosine-3'-phosphate
  modified_base 13: mod_base = OTHER; note = 2'-O-methylcytidine-3'-phosphate
  modified_base 14: mod_base = OTHER; note = 2'-fluorouridine-3'-phosphate
  modified_base 15: mod_base = OTHER; note = 2'-O-methyladenosine-3'-phosphate
  modified_base 16: mod_base = OTHER; note = 2'-fluoroadenosine-3'-phosphate
  modified_base 17: mod_base = OTHER; note = 2'-O-methylcytidine-3'-phosphate
  modified_base 18: mod_base = OTHER; note = 2'-O-methyladenosine-3'-phosphate
  modified_base 19: mod_base = OTHER; note = 2'-O-methyluridine-3'-phosphate
  modified_base 20: mod_base = OTHER; note = 2'-O-methylguanosine-3'-phosphate
  modified_base 21: mod_base = OTHER; note = 2'-O-methyluridine-3'-phosphorothioate
  modified_base 22: mod_base = OTHER; note = 2'-O-methyladenosine-3'-phosphorothioate
  modified_base 23: mod_base = OTHER; note = 2'-O-methylcytidine-3'-phosphate
ttacattatatgctaacatgtac

SEQ ID NO: 1774 - RNA, 23 nt, synthetic construct
  source 1..23: mol_type = other RNA
  modified_base 1: mod_base = OTHER; note = Vinyl-phosphonate 2'-O-methyluridine-3'-phosphorothioate
  modified_base 2: mod_base = OTHER; note = 2'-fluoroadenosine-3'-phosphorothioate
  modified_base 3: mod_base = OTHER; note = 2'-O-methylguanosine-3'-phosphate
  modified_base 4: mod_base = OTHER; note = 2'-O-methyladenosine-3'-phosphate
  modified_base 5: mod_base = OTHER; note = 2'-O-methyladenosine-3'-phosphate
  modified_base 6: mod_base = OTHER; note = 2'-fluoroadenosine-3'-phosphate
  modified_base 7: mod_base = OTHER; note = 2'-O-methyluridine-3'-phosphate
  modified_base 8: mod_base = OTHER; note = 2'-fluorouridine-3'-phosphate
  modified_base 9: mod_base = OTHER; note = 2'-fluorocytidine-3'-phosphate
  modified_base 10: mod_base = OTHER; note = 2'-O-methyluridine-3'-phosphate
  modified_base 11: mod_base = OTHER; note = 2'-O-methyladenosine-3'-phosphate
  modified_base 12: mod_base = OTHER; note = 2'-O-methyluridine-3'-phosphate
  modified_base 13: mod_base = OTHER; note = 2'-O-methyladenosine-3'-phosphate
  modified_base 14: mod_base = OTHER; note = 2'-fluorocytidine-3'-phosphate
  modified_base 15: mod_base = OTHER; note = 2'-O-methyluridine-3'-phosphate
  modified_base 16: mod_base = OTHER; note = 2'-fluorocytidine-3'-phosphate
  modified_base 17: mod_base = OTHER; note = 2'-O-methyluridine-3'-phosphate
  modified_base 18: mod_base = OTHER; note = 2'-O-methylcytidine-3'-phosphate
  modified_base 19: mod_base = OTHER; note = 2'-O-methyladenosine-3'-phosphate
  modified_base 20: mod_base = OTHER; note = 2'-O-methylcytidine-3'-phosphate
  modified_base 21: mod_base = OTHER; note = 2'-O-methyladenosine-3'-phosphorothioate
  modified_base 22: mod_base = OTHER; note = 2'-O-methylguanosine-3'-phosphorothioate
  modified_base 23: mod_base = OTHER; note = 2'-O-methyluridine-3'-phosphate
tagaaattctatactctcacagt

SEQ ID NO: 1775 - RNA, 23 nt, synthetic construct
  source 1..23: mol_type = other RNA
  modified_base 1: mod_base = OTHER; note = Vinyl-phosphonate 2'-O-methyluridine-3'-phosphorothioate
  modified_base 2: mod_base = OTHER; note = 2'-fluorouridine -3'-phosphorothioate
  modified_base 3: mod_base = OTHER; note = 2'-O-methyladenosine-3'-phosphate
  modified_base 4: mod_base = OTHER; note = 2'-O-methyluridine-3'-phosphate
  modified_base 5: mod_base = OTHER; note = 2'-O-methyladenosine-3'-phosphate
  modified_base 6: mod_base = OTHER; note = 2'-fluoroguanosine-3'-phosphate
  modified_base 7: mod_base = OTHER; note = 2'-O-methyluridine-3'-phosphate
  modified_base 8: mod_base = OTHER; note = 2'-fluoroguanosine-3'-phosphate
  modified_base 9: mod_base = OTHER; note = 2'-fluorocytidine-3'-phosphate
  modified_base 10: mod_base = OTHER; note = 2'-O-methylcytidine-3'-phosphate
  modified_base 11: mod_base = OTHER; note = 2'-O-methyladenosine-3'-phosphate
  modified_base 12: mod_base = OTHER; note = 2'-O-methyladenosine-3'-phosphate
  modified_base 13: mod_base = OTHER; note = 2'-O-methyladenosine-3'-phosphate
  modified_base 14: mod_base = OTHER; note = 2'-fluorouridine-3'-phosphate
  modified_base 15: mod_base = OTHER; note = 2'-O-methylguanosine-3'-phosphate
  modified_base 16: mod_base = OTHER; note = 2'-fluoroadenosine-3'-phosphate
  modified_base 17: mod_base = OTHER; note = 2'-O-methyladenosine-3'-phosphate
  modified_base 18: mod_base = OTHER; note = 2'-O-methylguanosine-3'-phosphate
  modified_base 19: mod_base = OTHER; note = 2'-O-methylguanosine-3'-phosphate
  modified_base 20: mod_base = OTHER; note = 2'-O-methyladenosine-3'-phosphate
  modified_base 21: mod_base = OTHER; note = 2'-O-methyluridine-3'-phosphorothioate
  modified_base 22: mod_base = OTHER; note = 2'-O-methyluridine-3'-phosphorothioate
  modified_base 23: mod_base = OTHER; note = 2'-O-methyladenosine-3'-phosphate
ttatagtgccaaatgaaggatta

SEQ ID NO: 1776 - RNA, 23 nt, synthetic construct
  source 1..23: mol_type = other RNA
  modified_base 1: mod_base = OTHER; note = Vinyl-phosphonate 2'-O-methyluridine-3'-phosphorothioate
  modified_base 2: mod_base = OTHER; note = 2'-fluorouridine -3'-phosphorothioate
  modified_base 3: mod_base = OTHER; note = 2'-O-methyladenosine-3'-phosphate
  modified_base 4: mod_base = OTHER; note = 2'-O-methyladenosine-3'-phosphate
  modified_base 5: mod_base = OTHER; note = 2'-O-methyladenosine-3'-phosphate
  modified_base 6: mod_base = OTHER; note = 2'-fluoroguanosine-3'-phosphate
  modified_base 7: mod_base = OTHER; note = 2'-O-methylcytidine-3'-phosphate
  modified_base 8: mod_base = OTHER; note = 2'-fluorouridine-3'-phosphate
  modified_base 9: mod_base = OTHER; note = 2'-fluoroadenosine-3'-phosphate
  modified_base 10: mod_base = OTHER; note = 2'-O-methylcytidine-3'-phosphate
  modified_base 11: mod_base = OTHER; note = 2'-O-methyluridine-3'-phosphate
  modified_base 12: mod_base = OTHER; note = 2'-O-methyluridine-3'-phosphate
  modified_base 13: mod_base = OTHER; note = 2'-O-methyluridine-3'-phosphate
  modified_base 14: mod_base = OTHER; note = 2'-fluorocytidine-3'-phosphate
  modified_base 15: mod_base = OTHER; note = 2'-O-methyluridine-3'-phosphate
  modified_base 16: mod_base = OTHER; note = 2'-fluoroadenosine-3'-phosphate
  modified_base 17: mod_base = OTHER; note = 2'-O-methyladenosine-3'-phosphate
  modified_base 18: mod_base = OTHER; note = 2'-O-methyladenosine-3'-phosphate
  modified_base 19: mod_base = OTHER; note = 2'-O-methyluridine-3'-phosphate
  modified_base 20: mod_base = OTHER; note = 2'-O-methylguanosine-3'-phosphate
  modified_base 21: mod_base = OTHER; note = 2'-O-methyluridine-3'-phosphorothioate
  modified_base 22: mod_base = OTHER; note = 2'-O-methylguanosine-3'-phosphorothioate
  modified_base 23: mod_base = OTHER; note = 2'-O-methyluridine-3'-phosphate
ttaaagctactttctaaatgtgt

SEQ ID NO: 1777 - RNA, 23 nt, synthetic construct
  source 1..23: mol_type = other RNA
  modified_base 1: mod_base = OTHER; note = Vinyl-phosphonate 2'-O-methyluridine-3'-phosphorothioate
  modified_base 2: mod_base = OTHER; note = 2'-fluorocytidine-3'-phosphorothioate
  modified_base 3: mod_base = OTHER; note = 2'-O-methyluridine-3'-phosphate
  modified_base 4: mod_base = OTHER; note = 2'-O-methyluridine-3'-phosphate
  modified_base 5: mod_base = OTHER; note = 2'-O-methyluridine-3'-phosphate
  modified_base 6: mod_base = OTHER; note = 2'-fluoroguanosine-3'-phosphate
  modified_base 7: mod_base = OTHER; note = 2'-O-methylcytidine-3'-phosphate
  modified_base 8: mod_base = OTHER; note = 2'-fluorouridine-3'-phosphate
  modified_base 9: mod_base = OTHER; note = 2'-fluorouridine-3'-phosphate
  modified_base 10: mod_base = OTHER; note = 2'-O-methyluridine-3'-phosphate
  modified_base 11: mod_base = OTHER; note = 2'-O-methyladenosine-3'-phosphate
  modified_base 12: mod_base = OTHER; note = 2'-O-methyluridine-3'-phosphate
  modified_base 13: mod_base = OTHER; note = 2'-O-methyladenosine-3'-phosphate
  modified_base 14: mod_base = OTHER; note = 2'-fluoroguanosine-3'-phosphate
  modified_base 15: mod_base = OTHER; note = 2'-O-methyladenosine-3'-phosphate
  modified_base 16: mod_base = OTHER; note = 2'-fluoroadenosine-3'-phosphate
  modified_base 17: mod_base = OTHER; note = 2'-O-methylcytidine-3'-phosphate
  modified_base 18: mod_base = OTHER; note = 2'-O-methyladenosine-3'-phosphate
  modified_base 19: mod_base = OTHER; note = 2'-O-methylguanosine-3'-phosphate
  modified_base 20: mod_base = OTHER; note = 2'-O-methyluridine-3'-phosphate
  modified_base 21: mod_base = OTHER; note = 2'-O-methyluridine-3'-phosphorothioate
  modified_base 22: mod_base = OTHER; note = 2'-O-methyladenosine-3'-phosphorothioate
  modified_base 23: mod_base = OTHER; note = 2'-O-methyladenosine-3'-phosphate
tctttgctttatagaacagttaa

SEQ ID NO: 1778 - RNA, 23 nt, synthetic construct
  source 1..23: mol_type = other RNA
  modified_base 1: mod_base = OTHER; note = Vinyl-phosphonate 2'-O-methyluridine-3'-phosphorothioate
  modified_base 2: mod_base = OTHER; note = 2'-fluoroadenosine-3'-phosphorothioate
  modified_base 3: mod_base = OTHER; note = 2'-O-methylguanosine-3'-phosphate
  modified_base 4: mod_base = OTHER; note = 2'-O-methyladenosine-3'-phosphate
  modified_base 5: mod_base = OTHER; note = 2'-O-methyluridine-3'-phosphate
  modified_base 6: mod_base = OTHER; note = 2'-fluorocytidine-3'-phosphate
  modified_base 7: mod_base = OTHER; note = 2'-O-methyluridine-3'-phosphate
  modified_base 8: mod_base = OTHER; note = 2'-fluorouridine-3'-phosphate
  modified_base 9: mod_base = OTHER; note = 2'-fluorouridine-3'-phosphate
  modified_base 10: mod_base = OTHER; note = 2'-O-methylcytidine-3'-phosphate
  modified_base 11: mod_base = OTHER; note = 2'-O-methyladenosine-3'-phosphate
  modified_base 12: mod_base = OTHER; note = 2'-O-methyluridine-3'-phosphate
  modified_base 13: mod_base = OTHER; note = 2'-O-methylcytidine-3'-phosphate
  modified_base 14: mod_base = OTHER; note = 2'-fluorouridine-3'-phosphate
  modified_base 15: mod_base = OTHER; note = 2'-O-methylcytidine-3'-phosphate
  modified_base 16: mod_base = OTHER; note = 2'-fluorouridine-3'-phosphate
  modified_base 17: mod_base = OTHER; note = 2'-O-methylguanosine-3'-phosphate
  modified_base 18: mod_base = OTHER; note = 2'-O-methylguanosine-3'-phosphate
  modified_base 19: mod_base = OTHER; note = 2'-O-methyladenosine-3'-phosphate
  modified_base 20: mod_base = OTHER; note = 2'-O-methylguanosine-3'-phosphate
  modified_base 21: mod_base = OTHER; note = 2'-O-methylguanosine-3'-phosphorothioate
  modified_base 22: mod_base = OTHER; note = 2'-O-methyladenosine-3'-phosphorothioate
  modified_base 23: mod_base = OTHER; note = 2'-O-methylguanosine-3'-phosphate
tagatctttcatctctggaggag

SEQ ID NO: 1779 - RNA, 23 nt, synthetic construct
  source 1..23: mol_type = other RNA
  modified_base 1: mod_base = OTHER; note = Vinyl-phosphonate 2'-O-methyluridine-3'-phosphorothioate
  modified_base 2: mod_base = OTHER; note = 2'-fluorouridine -3'-phosphorothioate
  modified_base 3: mod_base = OTHER; note = 2'-O-methyladenosine-3'-phosphate
  modified_base 4: mod_base = OTHER; note = 2'-O-methylguanosine-3'-phosphate
  modified_base 5: mod_base = OTHER; note = 2'-O-methylguanosine-3'-phosphate
  modified_base 6: mod_base = OTHER; note = 2'-fluoroadenosine-3'-phosphate
  modified_base 7: mod_base = OTHER; note = 2'-O-methylguanosine-3'-phosphate
  modified_base 8: mod_base = OTHER; note = 2'-fluorouridine-3'-phosphate
  modified_base 9: mod_base = OTHER; note = 2'-fluorocytidine-3'-phosphate
  modified_base 10: mod_base = OTHER; note = 2'-O-methyladenosine-3'-phosphate
  modified_base 11: mod_base = OTHER; note = 2'-O-methyluridine-3'-phosphate
  modified_base 12: mod_base = OTHER; note = 2'-O-methyladenosine-3'-phosphate
  modified_base 13: mod_base = OTHER; note = 2'-O-methylguanosine-3'-phosphate
  modified_base 14: mod_base = OTHER; note = 2'-fluorouridine-3'-phosphate
  modified_base 15: mod_base = OTHER; note = 2'-O-methyluridine-3'-phosphate
  modified_base 16: mod_base = OTHER; note = 2'-fluoroadenosine-3'-phosphate
  modified_base 17: mod_base = OTHER; note = 2'-O-methyladenosine-3'-phosphate
  modified_base 18: mod_base = OTHER; note = 2'-O-methyladenosine-3'-phosphate
  modified_base 19: mod_base = OTHER; note = 2'-O-methylcytidine-3'-phosphate
  modified_base 20: mod_base = OTHER; note = 2'-O-methyladenosine-3'-phosphate
  modified_base 21: mod_base = OTHER; note = 2'-O-methyladenosine-3'-phosphorothioate
  modified_base 22: mod_base = OTHER; note = 2'-O-methylcytidine-3'-phosphorothioate
  modified_base 23: mod_base = OTHER; note = 2'-O-methyladenosine-3'-phosphate
ttaggagtcatagttaaacaaca

SEQ ID NO: 1780 - RNA, 23 nt, synthetic construct
  source 1..23: mol_type = other RNA
  modified_base 1: mod_base = OTHER; note = Vinyl-phosphonate 2'-O-methyluridine-3'-phosphorothioate
  modified_base 2: mod_base = OTHER; note = 2'-fluoroadenosine-3'-phosphorothioate
  modified_base 3: mod_base = OTHER; note = 2'-O-methyladenosine-3'-phosphate
  modified_base 4: mod_base = OTHER; note = 2'-O-methylcytidine-3'-phosphate
  modified_base 5: mod_base = OTHER; note = 2'-O-methyladenosine-3'-phosphate
  modified_base 6: mod_base = OTHER; note = 2'-fluoroadenosine-3'-phosphate
  modified_base 7: mod_base = OTHER; note = 2'-O-methyladenosine-3'-phosphate
  modified_base 8: mod_base = OTHER; note = 2'-fluoroguanosine-3'-phosphate
  modified_base 9: mod_base = OTHER; note = 2'-fluorocytidine-3'-phosphate
  modified_base 10: mod_base = OTHER; note = 2'-O-methyladenosine-3'-phosphate
  modified_base 11: mod_base = OTHER; note = 2'-O-methyluridine-3'-phosphate
  modified_base 12: mod_base = OTHER; note = 2'-O-methyluridine-3'-phosphate
  modified_base 13: mod_base = OTHER; note = 2'-O-methylguanosine-3'-phosphate
  modified_base 14: mod_base = OTHER; note = 2'-fluorouridine-3'-phosphate
  modified_base 15: mod_base = OTHER; note = 2'-O-methylcytidine-3'-phosphate
  modified_base 16: mod_base = OTHER; note = 2'-fluoroadenosine-3'-phosphate
  modified_base 17: mod_base = OTHER; note = 2'-O-methyladenosine-3'-phosphate
  modified_base 18: mod_base = OTHER; note = 2'-O-methyladenosine-3'-phosphate
  modified_base 19: mod_base = OTHER; note = 2'-O-methylcytidine-3'-phosphate
  modified_base 20: mod_base = OTHER; note = 2'-O-methyladenosine-3'-phosphate
  modified_base 21: mod_base = OTHER; note = 2'-O-methylguanosine-3'-phosphorothioate
  modified_base 22: mod_base = OTHER; note = 2'-O-methyladenosine-3'-phosphorothioate
  modified_base 23: mod_base = OTHER; note = 2'-O-methyladenosine-3'-phosphate
taacaaagcattgtcaaacagaa

SEQ ID NO: 1781 - RNA, 23 nt, synthetic construct
  source 1..23: mol_type = other RNA
  modified_base 1: mod_base = OTHER; note = Vinyl-phosphonate 2'-O-methyluridine-3'-phosphorothioate
  modified_base 2: mod_base = OTHER; note = 2'-fluoroguanosine-3'-phosphorothioate
  modified_base 3: mod_base = OTHER; note = 2'-O-methyladenosine-3'-phosphate
  modified_base 4: mod_base = OTHER; note = 2'-O-methyladenosine-3'-phosphate
  modified_base 5: mod_base = OTHER; note = 2'-O-methyladenosine-3'-phosphate
  modified_base 6: mod_base = OTHER; note = 2'-fluoroadenosine-3'-phosphate
  modified_base 7: mod_base = OTHER; note = 2'-O-methyladenosine-3'-phosphate
  modified_base 8: mod_base = OTHER; note = 2'-fluorouridine-3'-phosphate
  modified_base 9: mod_base = OTHER; note = 2'-fluorouridine-3'-phosphate
  modified_base 10: mod_base = OTHER; note = 2'-O-methyluridine-3'-phosphate
  modified_base 11: mod_base = OTHER; note = 2'-O-methylcytidine-3'-phosphate
  modified_base 12: mod_base = OTHER; note = 2'-O-methyluridine-3'-phosphate
  modified_base 13: mod_base = OTHER; note = 2'-O-methyluridine-3'-phosphate
  modified_base 14: mod_base = OTHER; note = 2'-fluorouridine-3'-phosphate
  modified_base 15: mod_base = OTHER; note = 2'-O-methyluridine-3'-phosphate
  modified_base 16: mod_base = OTHER; note = 2'-fluoroadenosine-3'-phosphate
  modified_base 17: mod_base = OTHER; note = 2'-O-methylguanosine-3'-phosphate
  modified_base 18: mod_base = OTHER; note = 2'-O-methylguanosine-3'-phosphate
  modified_base 19: mod_base = OTHER; note = 2'-O-methyladenosine-3'-phosphate
  modified_base 20: mod_base = OTHER; note = 2'-O-methylcytidine-3'-phosphate
  modified_base 21: mod_base = OTHER; note = 2'-O-methyladenosine-3'-phosphorothioate
  modified_base 22: mod_base = OTHER; note = 2'-O-methyladenosine-3'-phosphorothioate
  modified_base 23: mod_base = OTHER; note = 2'-O-methylcytidine-3'-phosphate
tgaaaaatttcttttaggacaac

SEQ ID NO: 1782 - RNA, 23 nt, synthetic construct
  source 1..23: mol_type = other RNA
  modified_base 1: mod_base = OTHER; note = Vinyl-phosphonate 2'-O-methyluridine-3'-phosphorothioate
  modified_base 2: mod_base = OTHER; note = 2'-fluoroadenosine-3'-phosphorothioate
  modified_base 3: mod_base = OTHER; note = 2'-O-methyladenosine-3'-phosphate
  modified_base 4: mod_base = OTHER; note = 2'-O-methylguanosine-3'-phosphate
  modified_base 5: mod_base = OTHER; note = 2'-O-methyluridine-3'-phosphate
  modified_base 6: mod_base = OTHER; note = 2'-fluorouridine-3'-phosphate
  modified_base 7: mod_base = OTHER; note = 2'-O-methylcytidine-3'-phosphate
  modified_base 8: mod_base = OTHER; note = 2'-fluorouridine-3'-phosphate
  modified_base 9: mod_base = OTHER; note = 2'-fluorouridine-3'-phosphate
  modified_base 10: mod_base = OTHER; note = 2'-O-methyluridine-3'-phosphate
  modified_base 11: mod_base = OTHER; note = 2'-O-methylguanosine-3'-phosphate
  modified_base 12: mod_base = OTHER; note = 2'-O-methyluridine-3'-phosphate
  modified_base 13: mod_base = OTHER; note = 2'-O-methyluridine-3'-phosphate
  modified_base 14: mod_base = OTHER; note = 2'-fluorocytidine-3'-phosphate
  modified_base 15: mod_base = OTHER; note = 2'-O-methyladenosine-3'-phosphate
  modified_base 16: mod_base = OTHER; note = 2'-fluoroadenosine-3'-phosphate
  modified_base 17: mod_base = OTHER; note = 2'-O-methyluridine-3'-phosphate
  modified_base 18: mod_base = OTHER; note = 2'-O-methylcytidine-3'-phosphate
  modified_base 19: mod_base = OTHER; note = 2'-O-methyluridine-3'-phosphate
  modified_base 20: mod_base = OTHER; note = 2'-O-methylguanosine-3'-phosphate
  modified_base 21: mod_base = OTHER; note = 2'-O-methyluridine-3'-phosphorothioate
  modified_base 22: mod_base = OTHER; note = 2'-O-methyladenosine-3'-phosphorothioate
  modified_base 23: mod_base = OTHER; note = 2'-O-methylguanosine-3'-phosphate
taagttctttgttcaatctgtag

SEQ ID NO: 1783 - RNA, 23 nt, synthetic construct
  source 1..23: mol_type = other RNA
  modified_base 1: mod_base = OTHER; note = Vinyl-phosphonate 2'-O-methyluridine-3'-phosphorothioate
  modified_base 2: mod_base = OTHER; note = 2'-fluoroguanosine-3'-phosphorothioate
  modified_base 3: mod_base = OTHER; note = 2'-O-methyladenosine-3'-phosphate
  modified_base 4: mod_base = OTHER; note = 2'-O-methyladenosine-3'-phosphate
  modified_base 5: mod_base = OTHER; note = 2'-O-methylguanosine-3'-phosphate
  modified_base 6: mod_base = OTHER; note = 2'-fluorouridine-3'-phosphate
  modified_base 7: mod_base = OTHER; note = 2'-O-methyluridine-3'-phosphate
  modified_base 8: mod_base = OTHER; note = 2'-fluorouridine-3'-phosphate
  modified_base 9: mod_base = OTHER; note = 2'-fluoroguanosine-3'-phosphate
  modified_base 10: mod_base = OTHER; note = 2'-O-methylguanosine-3'-phosphate
  modified_base 11: mod_base = OTHER; note = 2'-O-methyladenosine-3'-phosphate
  modified_base 12: mod_base = OTHER; note = 2'-O-methylcytidine-3'-phosphate
  modified_base 13: mod_base = OTHER; note = 2'-O-methyladenosine-3'-phosphate
  modified_base 14: mod_base = OTHER; note = 2'-fluoroguanosine-3'-phosphate
  modified_base 15: mod_base = OTHER; note = 2'-O-methylguanosine-3'-phosphate
  modified_base 16: mod_base = OTHER; note = 2'-fluorouridine-3'-phosphate
  modified_base 17: mod_base = OTHER; note = 2'-O-methyluridine-3'-phosphate
  modified_base 18: mod_base = OTHER; note = 2'-O-methyladenosine-3'-phosphate
  modified_base 19: mod_base = OTHER; note = 2'-O-methyladenosine-3'-phosphate
  modified_base 20: mod_base = OTHER; note = 2'-O-methyladenosine-3'-phosphate
  modified_base 21: mod_base = OTHER; note = 2'-O-methylcytidine-3'-phosphorothioate
  modified_base 22: mod_base = OTHER; note = 2'-O-methylguanosine-3'-phosphorothioate
  modified_base 23: mod_base = OTHER; note = 2'-O-methyladenosine-3'-phosphate
tgaagtttggacaggttaaacga

SEQ ID NO: 1784 - RNA, 23 nt, synthetic construct
  source 1..23: mol_type = other RNA
  modified_base 1: mod_base = OTHER; note = Vinyl-phosphonate 2'-O-methyluridine-3'-phosphorothioate
  modified_base 2: mod_base = OTHER; note = 2'-fluorouridine -3'-phosphorothioate
  modified_base 3: mod_base = OTHER; note = 2'-O-methylguanosine-3'-phosphate
  modified_base 4: mod_base = OTHER; note = 2'-O-methylguanosine-3'-phosphate
  modified_base 5: mod_base = OTHER; note = 2'-O-methyluridine-3'-phosphate
  modified_base 6: mod_base = OTHER; note = 2'-fluoroadenosine-3'-phosphate
  modified_base 7: mod_base = OTHER; note = 2'-O-methyladenosine-3'-phosphate
  modified_base 8: mod_base = OTHER; note = 2'-fluoroadenosine-3'-phosphate
  modified_base 9: mod_base = OTHER; note = 2'-fluoroguanosine-3'-phosphate
  modified_base 10: mod_base = OTHER; note = 2'-O-methyluridine-3'-phosphate
  modified_base 11: mod_base = OTHER; note = 2'-O-methyluridine-3'-phosphate
  modified_base 12: mod_base = OTHER; note = 2'-O-methyladenosine-3'-phosphate
  modified_base 13: mod_base = OTHER; note = 2'-O-methyladenosine-3'-phosphate
  modified_base 14: mod_base = OTHER; note = 2'-fluoroadenosine-3'-phosphate
  modified_base 15: mod_base = OTHER; note = 2'-O-methylcytidine-3'-phosphate
  modified_base 16: mod_base = OTHER; note = 2'-fluoroadenosine-3'-phosphate
  modified_base 17: mod_base = OTHER; note = 2'-O-methyluridine-3'-phosphate
  modified_base 18: mod_base = OTHER; note = 2'-O-methyluridine-3'-phosphate
  modified_base 19: mod_base = OTHER; note = 2'-O-methyluridine-3'-phosphate
  modified_base 20: mod_base = OTHER; note = 2'-O-methyluridine-3'-phosphate
  modified_base 21: mod_base = OTHER; note = 2'-O-methylguanosine-3'-phosphorothioate
  modified_base 22: mod_base = OTHER; note = 2'-O-methylguanosine-3'-phosphorothioate
  modified_base 23: mod_base = OTHER; note = 2'-O-methyluridine-3'-phosphate
ttggtaaagttaaacattttggt

SEQ ID NO: 1785 - RNA, 23 nt, synthetic construct
  source 1..23: mol_type = other RNA
  modified_base 1: mod_base = OTHER; note = Vinyl-phosphonate 2'-O-methyluridine-3'-phosphorothioate
  modified_base 2: mod_base = OTHER; note = 2'-fluoroadenosine-3'-phosphorothioate
  modified_base 3: mod_base = OTHER; note = 2'-O-methyluridine-3'-phosphate
  modified_base 4: mod_base = OTHER; note = 2'-O-methyladenosine-3'-phosphate
  modified_base 5: mod_base = OTHER; note = 2'-O-methyladenosine-3'-phosphate
  modified_base 6: mod_base = OTHER; note = 2'-fluoroadenosine-3'-phosphate
  modified_base 7: mod_base = OTHER; note = 2'-O-methyluridine-3'-phosphate
  modified_base 8: mod_base = OTHER; note = 2'-fluoroadenosine-3'-phosphate
  modified_base 9: mod_base = OTHER; note = 2'-fluorouridine-3'-phosphate
  modified_base 10: mod_base = OTHER; note = 2'-O-methyluridine-3'-phosphate
  modified_base 11: mod_base = OTHER; note = 2'-O-methyladenosine-3'-phosphate
  modified_base 12: mod_base = OTHER; note = 2'-O-methylcytidine-3'-phosphate
  modified_base 13: mod_base = OTHER; note = 2'-O-methyladenosine-3'-phosphate
  modified_base 14: mod_base = OTHER; note = 2'-fluorocytidine-3'-phosphate
  modified_base 15: mod_base = OTHER; note = 2'-O-methyladenosine-3'-phosphate
  modified_base 16: mod_base = OTHER; note = 2'-fluoroadenosine-3'-phosphate
  modified_base 17: mod_base = OTHER; note = 2'-O-methyluridine-3'-phosphate
  modified_base 18: mod_base = OTHER; note = 2'-O-methylguanosine-3'-phosphate
  modified_base 19: mod_base = OTHER; note = 2'-O-methylguanosine-3'-phosphate
  modified_base 20: mod_base = OTHER; note = 2'-O-methylguanosine-3'-phosphate
  modified_base 21: mod_base = OTHER; note = 2'-O-methyladenosine-3'-phosphorothioate
  modified_base 22: mod_base = OTHER; note = 2'-O-methylcytidine-3'-phosphorothioate
  modified_base 23: mod_base = OTHER; note = 2'-O-methyluridine-3'-phosphate
tataaatattacacaatgggact

SEQ ID NO: 1786 - RNA, 23 nt, synthetic construct
  source 1..23: mol_type = other RNA
  modified_base 1: mod_base = OTHER; note = Vinyl-phosphonate 2'-O-methyluridine-3'-phosphorothioate
  modified_base 2: mod_base = OTHER; note = 2'-fluoroadenosine-3'-phosphorothioate
  modified_base 3: mod_base = OTHER; note = 2'-O-methyladenosine-3'-phosphate
  modified_base 4: mod_base = OTHER; note = 2'-O-methyluridine-3'-phosphate
  modified_base 5: mod_base = OTHER; note = 2'-O-methyladenosine-3'-phosphate
  modified_base 6: mod_base = OTHER; note = 2'-fluoroadenosine-3'-phosphate
  modified_base 7: mod_base = OTHER; note = 2'-O-methylguanosine-3'-phosphate
  modified_base 8: mod_base = OTHER; note = 2'-fluorocytidine-3'-phosphate
  modified_base 9: mod_base = OTHER; note = 2'-fluoroadenosine-3'-phosphate
  modified_base 10: mod_base = OTHER; note = 2'-O-methyluridine-3'-phosphate
  modified_base 11: mod_base = OTHER; note = 2'-O-methyladenosine-3'-phosphate
  modified_base 12: mod_base = OTHER; note = 2'-O-methyluridine-3'-phosphate
  modified_base 13: mod_base = OTHER; note = 2'-O-methyluridine-3'-phosphate
  modified_base 14: mod_base = OTHER; note = 2'-fluorouridine-3'-phosphate
  modified_base 15: mod_base = OTHER; note = 2'-O-methyladenosine-3'-phosphate
  modified_base 16: mod_base = OTHER; note = 2'-fluorocytidine-3'-phosphate
  modified_base 17: mod_base = OTHER; note = 2'-O-methylcytidine-3'-phosphate
  modified_base 18: mod_base = OTHER; note = 2'-O-methylcytidine-3'-phosphate
  modified_base 19: mod_base = OTHER; note = 2'-O-methyladenosine-3'-phosphate
  modified_base 20: mod_base = OTHER; note = 2'-O-methyladenosine-3'-phosphate
  modified_base 21: mod_base = OTHER; note = 2'-O-methylcytidine-3'-phosphorothioate
  modified_base 22: mod_base = OTHER; note = 2'-O-methyladenosine-3'-phosphorothioate
  modified_base 23: mod_base = OTHER; note = 2'-O-methyluridine-3'-phosphate
taataagcatatttacccaacat

SEQ ID NO: 1787 - RNA, 23 nt, synthetic construct
  source 1..23: mol_type = other RNA
  modified_base 1: mod_base = OTHER; note = Vinyl-phosphonate 2'-O-methyluridine-3'-phosphorothioate
  modified_base 2: mod_base = OTHER; note = 2'-fluorocytidine-3'-phosphorothioate
  modified_base 3: mod_base = OTHER; note = 2'-O-methyladenosine-3'-phosphate
  modified_base 4: mod_base = OTHER; note = 2'-O-methylguanosine-3'-phosphate
  modified_base 5: mod_base = OTHER; note = 2'-O-methyladenosine-3'-phosphate
  modified_base 6: mod_base = OTHER; note = 2'-fluorocytidine-3'-phosphate
  modified_base 7: mod_base = OTHER; note = 2'-O-methyluridine-3'-phosphate
  modified_base 8: mod_base = OTHER; note = 2'-fluorocytidine-3'-phosphate
  modified_base 9: mod_base = OTHER; note = 2'-fluoroadenosine-3'-phosphate
  modified_base 10: mod_base = OTHER; note = 2'-O-methyladenosine-3'-phosphate
  modified_base 11: mod_base = OTHER; note = 2'-O-methyladenosine-3'-phosphate
  modified_base 12: mod_base = OTHER; note = 2'-O-methylguanosine-3'-phosphate
  modified_base 13: mod_base = OTHER; note = 2'-O-methyladenosine-3'-phosphate
  modified_base 14: mod_base = OTHER; note = 2'-fluorocytidine-3'-phosphate
  modified_base 15: mod_base = OTHER; note = 2'-O-methyladenosine-3'-phosphate
  modified_base 16: mod_base = OTHER; note = 2'-fluoroadenosine-3'-phosphate
  modified_base 17: mod_base = OTHER; note = 2'-O-methylcytidine-3'-phosphate
  modified_base 18: mod_base = OTHER; note = 2'-O-methylcytidine-3'-phosphate
  modified_base 19: mod_base = OTHER; note = 2'-O-methylcytidine-3'-phosphate
  modified_base 20: mod_base = OTHER; note = 2'-O-methyluridine-3'-phosphate
  modified_base 21: mod_base = OTHER; note = 2'-O-methylguanosine-3'-phosphorothioate
  modified_base 22: mod_base = OTHER; note = 2'-O-methyladenosine-3'-phosphorothioate
  modified_base 23: mod_base = OTHER; note = 2'-O-methylguanosine-3'-phosphate
tcagactcaaagacaaccctgag

SEQ ID NO: 1788 - RNA, 23 nt, synthetic construct
  source 1..23: mol_type = other RNA
  modified_base 1: mod_base = OTHER; note = Vinyl-phosphonate 2'-O-methyluridine-3'-phosphorothioate
  modified_base 2: mod_base = OTHER; note = 2'-fluoroadenosine-3'-phosphorothioate
  modified_base 3: mod_base = OTHER; note = 2'-O-methyladenosine-3'-phosphate
  modified_base 4: mod_base = OTHER; note = 2'-O-methyluridine-3'-phosphate
  modified_base 5: mod_base = OTHER; note = 2'-O-methyluridine-3'-phosphate
  modified_base 6: mod_base = OTHER; note = 2'-fluoroguanosine-3'-phosphate
  modified_base 7: mod_base = OTHER; note = 2'-O-methylcytidine-3'-phosphate
  modified_base 8: mod_base = OTHER; note = 2'-fluoroadenosine-3'-phosphate
  modified_base 9: mod_base = OTHER; note = 2'-fluoroguanosine-3'-phosphate
  modified_base 10: mod_base = OTHER; note = 2'-O-methyluridine-3'-phosphate
  modified_base 11: mod_base = OTHER; note = 2'-O-methyluridine-3'-phosphate
  modified_base 12: mod_base = OTHER; note = 2'-O-methylguanosine-3'-phosphate
  modified_base 13: mod_base = OTHER; note = 2'-O-methylguanosine-3'-phosphate
  modified_base 14: mod_base = OTHER; note = 2'-fluoroadenosine-3'-phosphate
  modified_base 15: mod_base = OTHER; note = 2'-O-methyluridine-3'-phosphate
  modified_base 16: mod_base = OTHER; note = 2'-fluorouridine-3'-phosphate
  modified_base 17: mod_base = OTHER; note = 2'-O-methyluridine-3'-phosphate
  modified_base 18: mod_base = OTHER; note = 2'-O-methyluridine-3'-phosphate
  modified_base 19: mod_base = OTHER; note = 2'-O-methyladenosine-3'-phosphate
  modified_base 20: mod_base = OTHER; note = 2'-O-methylguanosine-3'-phosphate
  modified_base 21: mod_base = OTHER; note = 2'-O-methylcytidine-3'-phosphorothioate
  modified_base 22: mod_base = OTHER; note = 2'-O-methylcytidine-3'-phosphorothioate
  modified_base 23: mod_base = OTHER; note = 2'-O-methylcytidine-3'-phosphate
taattgcagttggattttagccc

SEQ ID NO: 1789 - RNA, 23 nt, synthetic construct
  source 1..23: mol_type = other RNA
  modified_base 1: mod_base = OTHER; note = Vinyl-phosphonate 2'-O-methyluridine-3'-phosphorothioate
  modified_base 2: mod_base = OTHER; note = 2'-fluoroadenosine-3'-phosphorothioate
  modified_base 3: mod_base = OTHER; note = 2'-O-methylcytidine-3'-phosphate
  modified_base 4: mod_base = OTHER; note = 2'-O-methyladenosine-3'-phosphate
  modified_base 5: mod_base = OTHER; note = 2'-O-methyluridine-3'-phosphate
  modified_base 6: mod_base = OTHER; note = 2'-fluoroadenosine-3'-phosphate
  modified_base 7: mod_base = OTHER; note = 2'-O-methylcytidine-3'-phosphate
  modified_base 8: mod_base = OTHER; note = 2'-fluoroadenosine-3'-phosphate
  modified_base 9: mod_base = OTHER; note = 2'-fluorocytidine-3'-phosphate
  modified_base 10: mod_base = OTHER; note = 2'-O-methyladenosine-3'-phosphate
  modified_base 11: mod_base = OTHER; note = 2'-O-methylcytidine-3'-phosphate
  modified_base 12: mod_base = OTHER; note = 2'-O-methyluridine-3'-phosphate
  modified_base 13: mod_base = OTHER; note = 2'-O-methyluridine-3'-phosphate
  modified_base 14: mod_base = OTHER; note = 2'-fluorocytidine-3'-phosphate
  modified_base 15: mod_base = OTHER; note = 2'-O-methyladenosine-3'-phosphate
  modified_base 16: mod_base = OTHER; note = 2'-fluoroguanosine-3'-phosphate
  modified_base 17: mod_base = OTHER; note = 2'-O-methyluridine-3'-phosphate
  modified_base 18: mod_base = OTHER; note = 2'-O-methylcytidine-3'-phosphate
  modified_base 19: mod_base = OTHER; note = 2'-O-methylcytidine-3'-phosphate
  modified_base 20: mod_base = OTHER; note = 2'-O-methyluridine-3'-phosphate
  modified_base 21: mod_base = OTHER; note = 2'-O-methylguanosine-3'-phosphorothioate
  modified_base 22: mod_base = OTHER; note = 2'-O-methylguanosine-3'-phosphorothioate
  modified_base 23: mod_base = OTHER; note = 2'-O-methylcytidine-3'-phosphate
tacatacacacttcagtcctggc

SEQ ID NO: 1790 - RNA, 23 nt, synthetic construct
  source 1..23: mol_type = other RNA
  modified_base 1: mod_base = OTHER; note = Vinyl-phosphonate 2'-O-methyluridine-3'-phosphorothioate
  modified_base 2: mod_base = OTHER; note = 2'-fluorouridine -3'-phosphorothioate
  modified_base 3: mod_base = OTHER; note = 2'-O-methyladenosine-3'-phosphate
  modified_base 4: mod_base = OTHER; note = 2'-O-methyladenosine-3'-phosphate
  modified_base 5: mod_base = OTHER; note = 2'-O-methyluridine-3'-phosphate
  modified_base 6: mod_base = OTHER; note = 2'-fluoroadenosine-3'-phosphate
  modified_base 7: mod_base = OTHER; note = 2'-O-methyladenosine-3'-phosphate
  modified_base 8: mod_base = OTHER; note = 2'-fluoroguanosine-3'-phosphate
  modified_base 9: mod_base = OTHER; note = 2'-fluoroguanosine-3'-phosphate
  modified_base 10: mod_base = OTHER; note = 2'-O-methylcytidine-3'-phosphate
  modified_base 11: mod_base = OTHER; note = 2'-O-methyladenosine-3'-phosphate
  modified_base 12: mod_base = OTHER; note = 2'-O-methyladenosine-3'-phosphate
  modified_base 13: mod_base = OTHER; note = 2'-O-methyluridine-3'-phosphate
  modified_base 14: mod_base = OTHER; note = 2'-fluorouridine-3'-phosphate
  modified_base 15: mod_base = OTHER; note = 2'-O-methylguanosine-3'-phosphate
  modified_base 16: mod_base = OTHER; note = 2'-fluoroguanosine-3'-phosphate
  modified_base 17: mod_base = OTHER; note = 2'-O-methyluridine-3'-phosphate
  modified_base 18: mod_base = OTHER; note = 2'-O-methyladenosine-3'-phosphate
  modified_base 19: mod_base = OTHER; note = 2'-O-methylcytidine-3'-phosphate
  modified_base 20: mod_base = OTHER; note = 2'-O-methyluridine-3'-phosphate
  modified_base 21: mod_base = OTHER; note = 2'-O-methylcytidine-3'-phosphorothioate
  modified_base 22: mod_base = OTHER; note = 2'-O-methylcytidine-3'-phosphorothioate
  modified_base 23: mod_base = OTHER; note = 2'-O-methyluridine-3'-phosphate
ttaataaggcaattggtactcct

SEQ ID NO: 1791 - RNA, 23 nt, synthetic construct
  source 1..23: mol_type = other RNA
  modified_base 1: mod_base = OTHER; note = Vinyl-phosphonate 2'-O-methyluridine-3'-phosphorothioate
  modified_base 2: mod_base = OTHER; note = 2'-fluoroadenosine-3'-phosphorothioate
  modified_base 3: mod_base = OTHER; note = 2'-O-methyluridine-3'-phosphate
  modified_base 4: mod_base = OTHER; note = 2'-O-methylcytidine-3'-phosphate
  modified_base 5: mod_base = OTHER; note = 2'-O-methyladenosine-3'-phosphate
  modified_base 6: mod_base = OTHER; note = 2'-fluorocytidine-3'-phosphate
  modified_base 7: mod_base = OTHER; note = 2'-O-methyluridine-3'-phosphate
  modified_base 8: mod_base = OTHER; note = 2'-fluorouridine-3'-phosphate
  modified_base 9: mod_base = OTHER; note = 2'-fluorocytidine-3'-phosphate
  modified_base 10: mod_base = OTHER; note = 2'-O-methyladenosine-3'-phosphate
  modified_base 11: mod_base = OTHER; note = 2'-O-methylcytidine-3'-phosphate
  modified_base 12: mod_base = OTHER; note = 2'-O-methyladenosine-3'-phosphate
  modified_base 13: mod_base = OTHER; note = 2'-O-methyluridine-3'-phosphate
  modified_base 14: mod_base = OTHER; note = 2'-fluoroadenosine-3'-phosphate
  modified_base 15: mod_base = OTHER; note = 2'-O-methylguanosine-3'-phosphate
  modified_base 16: mod_base = OTHER; note = 2'-fluoroguanosine-3'-phosphate
  modified_base 17: mod_base = OTHER; note = 2'-O-methylcytidine-3'-phosphate
  modified_base 18: mod_base = OTHER; note = 2'-O-methyladenosine-3'-phosphate
  modified_base 19: mod_base = OTHER; note = 2'-O-methylcytidine-3'-phosphate
  modified_base 20: mod_base = OTHER; note = 2'-O-methyluridine-3'-phosphate
  modified_base 21: mod_base = OTHER; note = 2'-O-methyluridine-3'-phosphorothioate
  modified_base 22: mod_base = OTHER; note = 2'-O-methyluridine-3'-phosphorothioate
  modified_base 23: mod_base = OTHER; note = 2'-O-methyluridine-3'-phosphate
tatcacttcacataggcactttt

SEQ ID NO: 1792 - RNA, 23 nt, synthetic construct
  source 1..23: mol_type = other RNA
  modified_base 1: mod_base = OTHER; note = Vinyl-phosphonate 2'-O-methyluridine-3'-phosphorothioate
  modified_base 2: mod_base = OTHER; note = 2'-fluorouridine -3'-phosphorothioate
  modified_base 3: mod_base = OTHER; note = 2'-O-methylguanosine-3'-phosphate
  modified_base 4: mod_base = OTHER; note = 2'-O-methylguanosine-3'-phosphate
  modified_base 5: mod_base = OTHER; note = 2'-O-methylcytidine-3'-phosphate
  modified_base 6: mod_base = OTHER; note = 2'-fluoroadenosine-3'-phosphate
  modified_base 7: mod_base = OTHER; note = 2'-O-methylguanosine-3'-phosphate
  modified_base 8: mod_base = OTHER; note = 2'-fluorouridine-3'-phosphate
  modified_base 9: mod_base = OTHER; note = 2'-fluorouridine-3'-phosphate
  modified_base 10: mod_base = OTHER; note = 2'-O-methylcytidine-3'-phosphate
  modified_base 11: mod_base = OTHER; note = 2'-O-methyluridine-3'-phosphate
  modified_base 12: mod_base = OTHER; note = 2'-O-methyladenosine-3'-phosphate
  modified_base 13: mod_base = OTHER; note = 2'-O-methyluridine-3'-phosphate
  modified_base 14: mod_base = OTHER; note = 2'-fluorouridine-3'-phosphate
  modified_base 15: mod_base = OTHER; note = 2'-O-methyladenosine-3'-phosphate
  modified_base 16: mod_base = OTHER; note = 2'-fluorouridine-3'-phosphate
  modified_base 17: mod_base = OTHER; note = 2'-O-methyluridine-3'-phosphate
  modified_base 18: mod_base = OTHER; note = 2'-O-methylguanosine-3'-phosphate
  modified_base 19: mod_base = OTHER; note = 2'-O-methyluridine-3'-phosphate
  modified_base 20: mod_base = OTHER; note = 2'-O-methyluridine-3'-phosphate
  modified_base 21: mod_base = OTHER; note = 2'-O-methyladenosine-3'-phosphorothioate
  modified_base 22: mod_base = OTHER; note = 2'-O-methylguanosine-3'-phosphorothioate
  modified_base 23: mod_base = OTHER; note = 2'-O-methylguanosine-3'-phosphate
ttggcagttctattattgttagg

SEQ ID NO: 1793 - RNA, 23 nt, synthetic construct
  source 1..23: mol_type = other RNA
  modified_base 1: mod_base = OTHER; note = Vinyl-phosphonate 2'-O-methyluridine-3'-phosphorothioate
  modified_base 2: mod_base = OTHER; note = 2'-fluoroadenosine-3'-phosphorothioate
  modified_base 3: mod_base = OTHER; note = 2'-O-methyladenosine-3'-phosphate
  modified_base 4: mod_base = OTHER; note = 2'-O-methylguanosine-3'-phosphate
  modified_base 5: mod_base = OTHER; note = 2'-O-methylcytidine-3'-phosphate
  modified_base 6: mod_base = OTHER; note = 2'-fluoroadenosine-3'-phosphate
  modified_base 7: mod_base = OTHER; note = 2'-O-methyladenosine-3'-phosphate
  modified_base 8: mod_base = OTHER; note = 2'-fluorouridine-3'-phosphate
  modified_base 9: mod_base = OTHER; note = 2'-fluoroguanosine-3'-phosphate
  modified_base 10: mod_base = OTHER; note = 2'-O-methylguanosine-3'-phosphate
  modified_base 11: mod_base = OTHER; note = 2'-O-methyluridine-3'-phosphate
  modified_base 12: mod_base = OTHER; note = 2'-O-methyladenosine-3'-phosphate
  modified_base 13: mod_base = OTHER; note = 2'-O-methyluridine-3'-phosphate
  modified_base 14: mod_base = OTHER; note = 2'-fluoroguanosine-3'-phosphate
  modified_base 15: mod_base = OTHER; note = 2'-O-methylguanosine-3'-phosphate
  modified_base 16: mod_base = OTHER; note = 2'-fluoroadenosine-3'-phosphate
  modified_base 17: mod_base = OTHER; note = 2'-O-methyladenosine-3'-phosphate
  modified_base 18: mod_base = OTHER; note = 2'-O-methylcytidine-3'-phosphate
  modified_base 19: mod_base = OTHER; note = 2'-O-methyladenosine-3'-phosphate
  modified_base 20: mod_base = OTHER; note = 2'-O-methylguanosine-3'-phosphate
  modified_base 21: mod_base = OTHER; note = 2'-O-methylcytidine-3'-phosphorothioate
  modified_base 22: mod_base = OTHER; note = 2'-O-methyladenosine-3'-phosphorothioate
  modified_base 23: mod_base = OTHER; note = 2'-O-methylguanosine-3'-phosphate
taagcaatggtatggaacagcag

SEQ ID NO: 1794 - RNA, 23 nt, synthetic construct
  source 1..23: mol_type = other RNA
  modified_base 1: mod_base = OTHER; note = Vinyl-phosphonate 2'-O-methyluridine-3'-phosphorothioate
  modified_base 2: mod_base = OTHER; note = 2'-fluoroguanosine-3'-phosphorothioate
  modified_base 3: mod_base = OTHER; note = 2'-O-methyladenosine-3'-phosphate
  modified_base 4: mod_base = OTHER; note = 2'-O-methyladenosine-3'-phosphate
  modified_base 5: mod_base = OTHER; note = 2'-O-methyluridine-3'-phosphate
  modified_base 6: mod_base = OTHER; note = 2'-fluoroadenosine-3'-phosphate
  modified_base 7: mod_base = OTHER; note = 2'-O-methyladenosine-3'-phosphate
  modified_base 8: mod_base = OTHER; note = 2'-fluorouridine-3'-phosphate
  modified_base 9: mod_base = OTHER; note = 2'-fluorocytidine-3'-phosphate
  modified_base 10: mod_base = OTHER; note = 2'-O-methyluridine-3'-phosphate
  modified_base 11: mod_base = OTHER; note = 2'-O-methyluridine-3'-phosphate
  modified_base 12: mod_base = OTHER; note = 2'-O-methylcytidine-3'-phosphate
  modified_base 13: mod_base = OTHER; note = 2'-O-methyluridine-3'-phosphate
  modified_base 14: mod_base = OTHER; note = 2'-fluorocytidine-3'-phosphate
  modified_base 15: mod_base = OTHER; note = 2'-O-methylcytidine-3'-phosphate
  modified_base 16: mod_base = OTHER; note = 2'-fluoroadenosine-3'-phosphate
  modified_base 17: mod_base = OTHER; note = 2'-O-methylguanosine-3'-phosphate
  modified_base 18: mod_base = OTHER; note = 2'-O-methyluridine-3'-phosphate
  modified_base 19: mod_base = OTHER; note = 2'-O-methylcytidine-3'-phosphate
  modified_base 20: mod_base = OTHER; note = 2'-O-methyluridine-3'-phosphate
  modified_base 21: mod_base = OTHER; note = 2'-O-methyladenosine-3'-phosphorothioate
  modified_base 22: mod_base = OTHER; note = 2'-O-methylguanosine-3'-phosphorothioate
  modified_base 23: mod_base = OTHER; note = 2'-O-methyladenosine-3'-phosphate
tgaataatcttctccagtctaga

SEQ ID NO: 1795 - RNA, 23 nt, synthetic construct
  source 1..23: mol_type = other RNA
  modified_base 1: mod_base = OTHER; note = Vinyl-phosphonate 2'-O-methyluridine-3'-phosphorothioate
  modified_base 2: mod_base = OTHER; note = 2'-fluoroadenosine-3'-phosphorothioate
  modified_base 3: mod_base = OTHER; note = 2'-O-methyluridine-3'-phosphate
  modified_base 4: mod_base = OTHER; note = 2'-O-methyluridine-3'-phosphate
  modified_base 5: mod_base = OTHER; note = 2'-O-methyluridine-3'-phosphate
  modified_base 6: mod_base = OTHER; note = 2'-fluoroguanosine-3'-phosphate
  modified_base 7: mod_base = OTHER; note = 2'-O-methylguanosine-3'-phosphate
  modified_base 8: mod_base = OTHER; note = 2'-fluorouridine-3'-phosphate
  modified_base 9: mod_base = OTHER; note = 2'-fluoroguanosine-3'-phosphate
  modified_base 10: mod_base = OTHER; note = 2'-O-methyladenosine-3'-phosphate
  modified_base 11: mod_base = OTHER; note = 2'-O-methyluridine-3'-phosphate
  modified_base 12: mod_base = OTHER; note = 2'-O-methylguanosine-3'-phosphate
  modified_base 13: mod_base = OTHER; note = 2'-O-methylcytidine-3'-phosphate
  modified_base 14: mod_base = OTHER; note = 2'-fluorouridine-3'-phosphate
  modified_base 15: mod_base = OTHER; note = 2'-O-methylguanosine-3'-phosphate
  modified_base 16: mod_base = OTHER; note = 2'-fluorouridine-3'-phosphate
  modified_base 17: mod_base = OTHER; note = 2'-O-methyluridine-3'-phosphate
  modified_base 18: mod_base = OTHER; note = 2'-O-methylguanosine-3'-phosphate
  modified_base 19: mod_base = OTHER; note = 2'-O-methylguanosine-3'-phosphate
  modified_base 20: mod_base = OTHER; note = 2'-O-methyladenosine-3'-phosphate
  modified_base 21: mod_base = OTHER; note = 2'-O-methyladenosine-3'-phosphorothioate
  modified_base 22: mod_base = OTHER; note = 2'-O-methylguanosine-3'-phosphorothioate
  modified_base 23: mod_base = OTHER; note = 2'-O-methylguanosine-3'-phosphate
tatttggtgatgctgttggaagg

SEQ ID NO: 1796 - RNA, 23 nt, synthetic construct
  source 1..23: mol_type = other RNA
  modified_base 1: mod_base = OTHER; note = Vinyl-phosphonate 2'-O-methyluridine-3'-phosphorothioate
  modified_base 2: mod_base = OTHER; note = 2'-fluoroadenosine-3'-phosphorothioate
  modified_base 3: mod_base = OTHER; note = 2'-O-methyladenosine-3'-phosphate
  modified_base 4: mod_base = OTHER; note = 2'-O-methylcytidine-3'-phosphate
  modified_base 5: mod_base = OTHER; note = 2'-O-methyladenosine-3'-phosphate
  modified_base 6: mod_base = OTHER; note = 2'-fluoroguanosine-3'-phosphate
  modified_base 7: mod_base = OTHER; note = 2'-O-methyladenosine-3'-phosphate
  modified_base 8: mod_base = OTHER; note = 2'-fluoroadenosine-3'-phosphate
  modified_base 9: mod_base = OTHER; note = 2'-fluorouridine-3'-phosphate
  modified_base 10: mod_base = OTHER; note = 2'-O-methylcytidine-3'-phosphate
  modified_base 11: mod_base = OTHER; note = 2'-O-methyluridine-3'-phosphate
  modified_base 12: mod_base = OTHER; note = 2'-O-methylguanosine-3'-phosphate
  modified_base 13: mod_base = OTHER; note = 2'-O-methyluridine-3'-phosphate
  modified_base 14: mod_base = OTHER; note = 2'-fluoroadenosine-3'-phosphate
  modified_base 15: mod_base = OTHER; note = 2'-O-methylcytidine-3'-phosphate
  modified_base 16: mod_base = OTHER; note = 2'-fluorocytidine-3'-phosphate
  modified_base 17: mod_base = OTHER; note = 2'-O-methyladenosine-3'-phosphate
  modified_base 18: mod_base = OTHER; note = 2'-O-methyladenosine-3'-phosphate
  modified_base 19: mod_base = OTHER; note = 2'-O-methyluridine-3'-phosphate
  modified_base 20: mod_base = OTHER; note = 2'-O-methyluridine-3'-phosphate
  modified_base 21: mod_base = OTHER; note = 2'-O-methyladenosine-3'-phosphorothioate
  modified_base 22: mod_base = OTHER; note = 2'-O-methylcytidine-3'-phosphorothioate
  modified_base 23: mod_base = OTHER; note = 2'-O-methyladenosine-3'-phosphate
taacagaatctgtaccaattaca

SEQ ID NO: 1797 - RNA, 23 nt, synthetic construct
  source 1..23: mol_type = other RNA
  modified_base 1: mod_base = OTHER; note = Vinyl-phosphonate 2'-O-methyluridine-3'-phosphorothioate
  modified_base 2: mod_base = OTHER; note = 2'-fluoroguanosine-3'-phosphorothioate
  modified_base 3: mod_base = OTHER; note = 2'-O-methyladenosine-3'-phosphate
  modified_base 4: mod_base = OTHER; note = 2'-O-methylcytidine-3'-phosphate
  modified_base 5: mod_base = OTHER; note = 2'-O-methyladenosine-3'-phosphate
  modified_base 6: mod_base = OTHER; note = 2'-fluoroadenosine-3'-phosphate
  modified_base 7: mod_base = OTHER; note = 2'-O-methylcytidine-3'-phosphate
  modified_base 8: mod_base = OTHER; note = 2'-fluoroadenosine-3'-phosphate
  modified_base 9: mod_base = OTHER; note = 2'-fluoroadenosine-3'-phosphate
  modified_base 10: mod_base = OTHER; note = 2'-O-methyladenosine-3'-phosphate
  modified_base 11: mod_base = OTHER; note = 2'-O-methyluridine-3'-phosphate
  modified_base 12: mod_base = OTHER; note = 2'-O-methyladenosine-3'-phosphate
  modified_base 13: mod_base = OTHER; note = 2'-O-methyladenosine-3'-phosphate
  modified_base 14: mod_base = OTHER; note = 2'-fluorouridine-3'-phosphate
  modified_base 15: mod_base = OTHER; note = 2'-O-methylguanosine-3'-phosphate
  modified_base 16: mod_base = OTHER; note = 2'-fluorouridine-3'-phosphate
  modified_base 17: mod_base = OTHER; note = 2'-O-methyluridine-3'-phosphate
  modified_base 18: mod_base = OTHER; note = 2'-O-methyluridine-3'-phosphate
  modified_base 19: mod_base = OTHER; note = 2'-O-methylcytidine-3'-phosphate
  modified_base 20: mod_base = OTHER; note = 2'-O-methyluridine-3'-phosphate
  modified_base 21: mod_base = OTHER; note = 2'-O-methylcytidine-3'-phosphorothioate
  modified_base 22: mod_base = OTHER; note = 2'-O-methyluridine-3'-phosphorothioate
  modified_base 23: mod_base = OTHER; note = 2'-O-methyluridine-3'-phosphate
tgacaacaaataatgtttctctt

SEQ ID NO: 1798 - RNA, 23 nt, synthetic construct
  source 1..23: mol_type = other RNA
  modified_base 1: mod_base = OTHER; note = Vinyl-phosphonate 2'-O-methyluridine-3'-phosphorothioate
  modified_base 2: mod_base = OTHER; note = 2'-fluoroadenosine-3'-phosphorothioate
  modified_base 3: mod_base = OTHER; note = 2'-O-methylcytidine-3'-phosphate
  modified_base 4: mod_base = OTHER; note = 2'-O-methylcytidine-3'-phosphate
  modified_base 5: mod_base = OTHER; note = 2'-O-methyladenosine-3'-phosphate
  modified_base 6: mod_base = OTHER; note = 2'-fluorocytidine-3'-phosphate
  modified_base 7: mod_base = OTHER; note = 2'-O-methyluridine-3'-phosphate
  modified_base 8: mod_base = OTHER; note = 2'-fluoroadenosine-3'-phosphate
  modified_base 9: mod_base = OTHER; note = 2'-fluoroguanosine-3'-phosphate
  modified_base 10: mod_base = OTHER; note = 2'-O-methylcytidine-3'-phosphate
  modified_base 11: mod_base = OTHER; note = 2'-O-methyladenosine-3'-phosphate
  modified_base 12: mod_base = OTHER; note = 2'-O-methyladenosine-3'-phosphate
  modified_base 13: mod_base = OTHER; note = 2'-O-methyluridine-3'-phosphate
  modified_base 14: mod_base = OTHER; note = 2'-fluorouridine-3'-phosphate
  modified_base 15: mod_base = OTHER; note = 2'-O-methylguanosine-3'-phosphate
  modified_base 16: mod_base = OTHER; note = 2'-fluoroadenosine-3'-phosphate
  modified_base 17: mod_base = OTHER; note = 2'-O-methylguanosine-3'-phosphate
  modified_base 18: mod_base = OTHER; note = 2'-O-methyladenosine-3'-phosphate
  modified_base 19: mod_base = OTHER; note = 2'-O-methylguanosine-3'-phosphate
  modified_base 20: mod_base = OTHER; note = 2'-O-methylcytidine-3'-phosphate
  modified_base 21: mod_base = OTHER; note = 2'-O-methylguanosine-3'-phosphorothioate
  modified_base 22: mod_base = OTHER; note = 2'-O-methylcytidine-3'-phosphorothioate
  modified_base 23: mod_base = OTHER; note = 2'-O-methylcytidine-3'-phosphate
taccactagcaattgagagcgcc

SEQ ID NO: 1799 - RNA, 23 nt, synthetic construct
  source 1..23: mol_type = other RNA
  modified_base 1: mod_base = OTHER; note = Vinyl-phosphonate 2'-O-methyluridine-3'-phosphorothioate
  modified_base 2: mod_base = OTHER; note = 2'-fluoroadenosine-3'-phosphorothioate
  modified_base 3: mod_base = OTHER; note = 2'-O-methyluridine-3'-phosphate
  modified_base 4: mod_base = OTHER; note = 2'-O-methyluridine-3'-phosphate
  modified_base 5: mod_base = OTHER; note = 2'-O-methyluridine-3'-phosphate
  modified_base 6: mod_base = OTHER; note = 2'-fluoroguanosine-3'-phosphate
  modified_base 7: mod_base = OTHER; note = 2'-O-methylcytidine-3'-phosphate
  modified_base 8: mod_base = OTHER; note = 2'-fluorouridine-3'-phosphate
  modified_base 9: mod_base = OTHER; note = 2'-fluoroguanosine-3'-phosphate
  modified_base 10: mod_base = OTHER; note = 2'-O-methyluridine-3'-phosphate
  modified_base 11: mod_base = OTHER; note = 2'-O-methyluridine-3'-phosphate
  modified_base 12: mod_base = OTHER; note = 2'-O-methyluridine-3'-phosphate
  modified_base 13: mod_base = OTHER; note = 2'-O-methylcytidine-3'-phosphate
  modified_base 14: mod_base = OTHER; note = 2'-fluorouridine-3'-phosphate
  modified_base 15: mod_base = OTHER; note = 2'-O-methylguanosine-3'-phosphate
  modified_base 16: mod_base = OTHER; note = 2'-fluoroadenosine-3'-phosphate
  modified_base 17: mod_base = OTHER; note = 2'-O-methyluridine-3'-phosphate
  modified_base 18: mod_base = OTHER; note = 2'-O-methyladenosine-3'-phosphate
  modified_base 19: mod_base = OTHER; note = 2'-O-methylcytidine-3'-phosphate
  modified_base 20: mod_base = OTHER; note = 2'-O-methylcytidine-3'-phosphate
  modified_base 21: mod_base = OTHER; note = 2'-O-methylguanosine-3'-phosphorothioate
  modified_base 22: mod_base = OTHER; note = 2'-O-methyluridine-3'-phosphorothioate
  modified_base 23: mod_base = OTHER; note = 2'-O-methylcytidine-3'-phosphate
tatttgctgtttctgataccgtc

SEQ ID NO: 1800 - RNA, 23 nt, synthetic construct
  source 1..23: mol_type = other RNA
  modified_base 1: mod_base = OTHER; note = Vinyl-phosphonate 2'-O-methyluridine-3'-phosphorothioate
  modified_base 2: mod_base = OTHER; note = 2'-fluoroadenosine-3'-phosphorothioate
  modified_base 3: mod_base = OTHER; note = 2'-O-methyladenosine-3'-phosphate
  modified_base 4: mod_base = OTHER; note = 2'-O-methyluridine-3'-phosphate
  modified_base 5: mod_base = OTHER; note = 2'-O-methyladenosine-3'-phosphate
  modified_base 6: mod_base = OTHER; note = 2'-fluorouridine-3'-phosphate
  modified_base 7: mod_base = OTHER; note = 2'-O-methyladenosine-3'-phosphate
  modified_base 8: mod_base = OTHER; note = 2'-fluoroadenosine-3'-phosphate
  modified_base 9: mod_base = OTHER; note = 2'-fluoroadenosine-3'-phosphate
  modified_base 10: mod_base = OTHER; note = 2'-O-methyladenosine-3'-phosphate
  modified_base 11: mod_base = OTHER; note = 2'-O-methyluridine-3'-phosphate
  modified_base 12: mod_base = OTHER; note = 2'-O-methyluridine-3'-phosphate
  modified_base 13: mod_base = OTHER; note = 2'-O-methyladenosine-3'-phosphate
  modified_base 14: mod_base = OTHER; note = 2'-fluorouridine-3'-phosphate
  modified_base 15: mod_base = OTHER; note = 2'-O-methylguanosine-3'-phosphate
  modified_base 16: mod_base = OTHER; note = 2'-fluorouridine-3'-phosphate
  modified_base 17: mod_base = OTHER; note = 2'-O-methylcytidine-3'-phosphate
  modified_base 18: mod_base = OTHER; note = 2'-O-methyluridine-3'-phosphate
  modified_base 19: mod_base = OTHER; note = 2'-O-methylguanosine-3'-phosphate
  modified_base 20: mod_base = OTHER; note = 2'-O-methylguanosine-3'-phosphate
  modified_base 21: mod_base = OTHER; note = 2'-O-methylguanosine-3'-phosphorothioate
  modified_base 22: mod_base = OTHER; note = 2'-O-methyladenosine-3'-phosphorothioate
  modified_base 23: mod_base = OTHER; note = 2'-O-methylguanosine-3'-phosphate
taatataaaattatgtctgggag

SEQ ID NO: 1801 - RNA, 23 nt, synthetic construct
  source 1..23: mol_type = other RNA
  modified_base 1: mod_base = OTHER; note = Vinyl-phosphonate 2'-O-methyluridine-3'-phosphorothioate
  modified_base 2: mod_base = OTHER; note = 2'-fluoroadenosine-3'-phosphorothioate
  modified_base 3: mod_base = OTHER; note = 2'-O-methyladenosine-3'-phosphate
  modified_base 4: mod_base = OTHER; note = 2'-O-methyladenosine-3'-phosphate
  modified_base 5: mod_base = OTHER; note = 2'-O-methyluridine-3'-phosphate
  modified_base 6: mod_base = OTHER; note = 2'-fluoroadenosine-3'-phosphate
  modified_base 7: mod_base = OTHER; note = 2'-O-methylcytidine-3'-phosphate
  modified_base 8: mod_base = OTHER; note = 2'-fluorocytidine-3'-phosphate
  modified_base 9: mod_base = OTHER; note = 2'-fluorouridine-3'-phosphate
  modified_base 10: mod_base = OTHER; note = 2'-O-methylcytidine-3'-phosphate
  modified_base 11: mod_base = OTHER; note = 2'-O-methyladenosine-3'-phosphate
  modified_base 12: mod_base = OTHER; note = 2'-O-methyladenosine-3'-phosphate
  modified_base 13: mod_base = OTHER; note = 2'-O-methyladenosine-3'-phosphate
  modified_base 14: mod_base = OTHER; note = 2'-fluoroadenosine-3'-phosphate
  modified_base 15: mod_base = OTHER; note = 2'-O-methyluridine-3'-phosphate
  modified_base 16: mod_base = OTHER; note = 2'-fluoroguanosine-3'-phosphate
  modified_base 17: mod_base = OTHER; note = 2'-O-methyluridine-3'-phosphate
  modified_base 18: mod_base = OTHER; note = 2'-O-methyladenosine-3'-phosphate
  modified_base 19: mod_base = OTHER; note = 2'-O-methylcytidine-3'-phosphate
  modified_base 20: mod_base = OTHER; note = 2'-O-methyluridine-3'-phosphate
  modified_base 21: mod_base = OTHER; note = 2'-O-methyladenosine-3'-phosphorothioate
  modified_base 22: mod_base = OTHER; note = 2'-O-methyladenosine-3'-phosphorothioate
  modified_base 23: mod_base = OTHER; note = 2'-O-methylcytidine-3'-phosphate
taaatacctcaaaatgtactaac

SEQ ID NO: 1802 - RNA, 23 nt, synthetic construct
  source 1..23: mol_type = other RNA
  modified_base 1: mod_base = OTHER; note = Vinyl-phosphonate 2'-O-methyluridine-3'-phosphorothioate
  modified_base 2: mod_base = OTHER; note = 2'-fluorouridine -3'-phosphorothioate
  modified_base 3: mod_base = OTHER; note = 2'-O-methyladenosine-3'-phosphate
  modified_base 4: mod_base = OTHER; note = 2'-O-methylcytidine-3'-phosphate
  modified_base 5: mod_base = OTHER; note = 2'-O-methyluridine-3'-phosphate
  modified_base 6: mod_base = OTHER; note = 2'-fluoroguanosine-3'-phosphate
  modified_base 7: mod_base = OTHER; note = 2'-O-methyluridine-3'-phosphate
  modified_base 8: mod_base = OTHER; note = 2'-fluorouridine-3'-phosphate
  modified_base 9: mod_base = OTHER; note = 2'-fluoroadenosine-3'-phosphate
  modified_base 10: mod_base = OTHER; note = 2'-O-methyluridine-3'-phosphate
  modified_base 11: mod_base = OTHER; note = 2'-O-methylcytidine-3'-phosphate
  modified_base 12: mod_base = OTHER; note = 2'-O-methyladenosine-3'-phosphate
  modified_base 13: mod_base = OTHER; note = 2'-O-methyladenosine-3'-phosphate
  modified_base 14: mod_base = OTHER; note = 2'-fluorouridine-3'-phosphate
  modified_base 15: mod_base = OTHER; note = 2'-O-methyladenosine-3'-phosphate
  modified_base 16: mod_base = OTHER; note = 2'-fluoroguanosine-3'-phosphate
  modified_base 17: mod_base = OTHER; note = 2'-O-methylcytidine-3'-phosphate
  modified_base 18: mod_base = OTHER; note = 2'-O-methyladenosine-3'-phosphate
  modified_base 19: mod_base = OTHER; note = 2'-O-methyluridine-3'-phosphate
  modified_base 20: mod_base = OTHER; note = 2'-O-methyluridine-3'-phosphate
  modified_base 21: mod_base = OTHER; note = 2'-O-methyluridine-3'-phosphorothioate
  modified_base 22: mod_base = OTHER; note = 2'-O-methyladenosine-3'-phosphorothioate
  modified_base 23: mod_base = OTHER; note = 2'-O-methylcytidine-3'-phosphate
ttactgttatcaatagcatttac

SEQ ID NO: 1803 - RNA, 23 nt, synthetic construct
  source 1..23: mol_type = other RNA
  modified_base 1: mod_base = OTHER; note = Vinyl-phosphonate 2'-O-methyluridine-3'-phosphorothioate
  modified_base 2: mod_base = OTHER; note = 2'-fluorocytidine-3'-phosphorothioate
  modified_base 3: mod_base = OTHER; note = 2'-O-methyladenosine-3'-phosphate
  modified_base 4: mod_base = OTHER; note = 2'-O-methyluridine-3'-phosphate
  modified_base 5: mod_base = OTHER; note = 2'-O-methyladenosine-3'-phosphate
  modified_base 6: mod_base = OTHER; note = 2'-fluoroguanosine-3'-phosphate
  modified_base 7: mod_base = OTHER; note = 2'-O-methyluridine-3'-phosphate
  modified_base 8: mod_base = OTHER; note = 2'-fluorocytidine-3'-phosphate
  modified_base 9: mod_base = OTHER; note = 2'-fluorocytidine-3'-phosphate
  modified_base 10: mod_base = OTHER; note = 2'-O-methylcytidine-3'-phosphate
  modified_base 11: mod_base = OTHER; note = 2'-O-methyladenosine-3'-phosphate
  modified_base 12: mod_base = OTHER; note = 2'-O-methyladenosine-3'-phosphate
  modified_base 13: mod_base = OTHER; note = 2'-O-methyladenosine-3'-phosphate
  modified_base 14: mod_base = OTHER; note = 2'-fluorouridine-3'-phosphate
  modified_base 15: mod_base = OTHER; note = 2'-O-methyluridine-3'-phosphate
  modified_base 16: mod_base = OTHER; note = 2'-fluorocytidine-3'-phosphate
  modified_base 17: mod_base = OTHER; note = 2'-O-methyladenosine-3'-phosphate
  modified_base 18: mod_base = OTHER; note = 2'-O-methylguanosine-3'-phosphate
  modified_base 19: mod_base = OTHER; note = 2'-O-methylcytidine-3'-phosphate
  modified_base 20: mod_base = OTHER; note = 2'-O-methyluridine-3'-phosphate
  modified_base 21: mod_base = OTHER; note = 2'-O-methyladenosine-3'-phosphorothioate
  modified_base 22: mod_base = OTHER; note = 2'-O-methyluridine-3'-phosphorothioate
  modified_base 23: mod_base = OTHER; note = 2'-O-methylcytidine-3'-phosphate
tcatagtcccaaattcagctatc

SEQ ID NO: 1804 - RNA, 23 nt, synthetic construct
  source 1..23: mol_type = other RNA
  modified_base 1: mod_base = OTHER; note = Vinyl-phosphonate 2'-O-methyluridine-3'-phosphorothioate
  modified_base 2: mod_base = OTHER; note = 2'-fluoroadenosine-3'-phosphorothioate
  modified_base 3: mod_base = OTHER; note = 2'-O-methyluridine-3'-phosphate
  modified_base 4: mod_base = OTHER; note = 2'-O-methyladenosine-3'-phosphate
  modified_base 5: mod_base = OTHER; note = 2'-O-methyluridine-3'-phosphate
  modified_base 6: mod_base = OTHER; note = 2'-fluorocytidine-3'-phosphate
  modified_base 7: mod_base = OTHER; note = 2'-O-methyluridine-3'-phosphate
  modified_base 8: mod_base = OTHER; note = 2'-fluorouridine-3'-phosphate
  modified_base 9: mod_base = OTHER; note = 2'-fluorouridine-3'-phosphate
  modified_base 10: mod_base = OTHER; note = 2'-O-methylguanosine-3'-phosphate
  modified_base 11: mod_base = OTHER; note = 2'-O-methyladenosine-3'-phosphate
  modified_base 12: mod_base = OTHER; note = 2'-O-methyladenosine-3'-phosphate
  modified_base 13: mod_base = OTHER; note = 2'-O-methyladenosine-3'-phosphate
  modified_base 14: mod_base = OTHER; note = 2'-fluoroadenosine-3'-phosphate
  modified_base 15: mod_base = OTHER; note = 2'-O-methylcytidine-3'-phosphate
  modified_base 16: mod_base = OTHER; note = 2'-fluorocytidine-3'-phosphate
  modified_base 17: mod_base = OTHER; note = 2'-O-methyladenosine-3'-phosphate
  modified_base 18: mod_base = OTHER; note = 2'-O-methylcytidine-3'-phosphate
  modified_base 19: mod_base = OTHER; note = 2'-O-methyladenosine-3'-phosphate
  modified_base 20: mod_base = OTHER; note = 2'-O-methyladenosine-3'-phosphate
  modified_base 21: mod_base = OTHER; note = 2'-O-methyluridine-3'-phosphorothioate
  modified_base 22: mod_base = OTHER; note = 2'-O-methylguanosine-3'-phosphorothioate
  modified_base 23: mod_base = OTHER; note = 2'-O-methylguanosine-3'-phosphate
tatatctttgaaaaccacaatgg

SEQ ID NO: 1805 - RNA, 23 nt, synthetic construct
  source 1..23: mol_type = other RNA
  modified_base 1: mod_base = OTHER; note = Vinyl-phosphonate 2'-O-methyluridine-3'-phosphorothioate
  modified_base 2: mod_base = OTHER; note = 2'-fluorouridine -3'-phosphorothioate
  modified_base 3: mod_base = OTHER; note = 2'-O-methyluridine-3'-phosphate
  modified_base 4: mod_base = OTHER; note = 2'-O-methyluridine-3'-phosphate
  modified_base 5: mod_base = OTHER; note = 2'-O-methylcytidine-3'-phosphate
  modified_base 6: mod_base = OTHER; note = 2'-fluoroadenosine-3'-phosphate
  modified_base 7: mod_base = OTHER; note = 2'-O-methylguanosine-3'-phosphate
  modified_base 8: mod_base = OTHER; note = 2'-fluoroadenosine-3'-phosphate
  modified_base 9: mod_base = OTHER; note = 2'-fluorouridine-3'-phosphate
  modified_base 10: mod_base = OTHER; note = 2'-O-methyladenosine-3'-phosphate
  modified_base 11: mod_base = OTHER; note = 2'-O-methylcytidine-3'-phosphate
  modified_base 12: mod_base = OTHER; note = 2'-O-methyluridine-3'-phosphate
  modified_base 13: mod_base = OTHER; note = 2'-O-methylguanosine-3'-phosphate
  modified_base 14: mod_base = OTHER; note = 2'-fluorocytidine-3'-phosphate
  modified_base 15: mod_base = OTHER; note = 2'-O-methyladenosine-3'-phosphate
  modified_base 16: mod_base = OTHER; note = 2'-fluoroadenosine-3'-phosphate
  modified_base 17: mod_base = OTHER; note = 2'-O-methylcytidine-3'-phosphate
  modified_base 18: mod_base = OTHER; note = 2'-O-methylcytidine-3'-phosphate
  modified_base 19: mod_base = OTHER; note = 2'-O-methyladenosine-3'-phosphate
  modified_base 20: mod_base = OTHER; note = 2'-O-methylguanosine-3'-phosphate
  modified_base 21: mod_base = OTHER; note = 2'-O-methylguanosine-3'-phosphorothioate
  modified_base 22: mod_base = OTHER; note = 2'-O-methyluridine-3'-phosphorothioate
  modified_base 23: mod_base = OTHER; note = 2'-O-methyluridine-3'-phosphate
ttttcagatactgcaaccaggtt

SEQ ID NO: 1806 - RNA, 23 nt, synthetic construct
  source 1..23: mol_type = other RNA
  modified_base 1: mod_base = OTHER; note = Vinyl-phosphonate 2'-O-methyluridine-3'-phosphorothioate
  modified_base 2: mod_base = OTHER; note = 2'-fluorouridine -3'-phosphorothioate
  modified_base 3: mod_base = OTHER; note = 2'-O-methyluridine-3'-phosphate
  modified_base 4: mod_base = OTHER; note = 2'-O-methyladenosine-3'-phosphate
  modified_base 5: mod_base = OTHER; note = 2'-O-methylguanosine-3'-phosphate
  modified_base 6: mod_base = OTHER; note = 2'-fluorocytidine-3'-phosphate
  modified_base 7: mod_base = OTHER; note = 2'-O-methyluridine-3'-phosphate
  modified_base 8: mod_base = OTHER; note = 2'-fluorocytidine-3'-phosphate
  modified_base 9: mod_base = OTHER; note = 2'-fluoroadenosine-3'-phosphate
  modified_base 10: mod_base = OTHER; note = 2'-O-methyladenosine-3'-phosphate
  modified_base 11: mod_base = OTHER; note = 2'-O-methylcytidine-3'-phosphate
  modified_base 12: mod_base = OTHER; note = 2'-O-methyladenosine-3'-phosphate
  modified_base 13: mod_base = OTHER; note = 2'-O-methyladenosine-3'-phosphate
  modified_base 14: mod_base = OTHER; note = 2'-fluorocytidine-3'-phosphate
  modified_base 15: mod_base = OTHER; note = 2'-O-methylcytidine-3'-phosphate
  modified_base 16: mod_base = OTHER; note = 2'-fluoroadenosine-3'-phosphate
  modified_base 17: mod_base = OTHER; note = 2'-O-methyluridine-3'-phosphate
  modified_base 18: mod_base = OTHER; note = 2'-O-methyluridine-3'-phosphate
  modified_base 19: mod_base = OTHER; note = 2'-O-methylcytidine-3'-phosphate
  modified_base 20: mod_base = OTHER; note = 2'-O-methyluridine-3'-phosphate
  modified_base 21: mod_base = OTHER; note = 2'-O-methyladenosine-3'-phosphorothioate
  modified_base 22: mod_base = OTHER; note = 2'-O-methylcytidine-3'-phosphorothioate
  modified_base 23: mod_base = OTHER; note = 2'-O-methyladenosine-3'-phosphate
tttagctcaacaaccattctaca

SEQ ID NO: 1807 - RNA, 23 nt, synthetic construct
  source 1..23: mol_type = other RNA
  modified_base 1: mod_base = OTHER; note = Vinyl-phosphonate 2'-O-methyluridine-3'-phosphorothioate
  modified_base 2: mod_base = OTHER; note = 2'-fluoroadenosine-3'-phosphorothioate
  modified_base 3: mod_base = OTHER; note = 2'-O-methylcytidine-3'-phosphate
  modified_base 4: mod_base = OTHER; note = 2'-O-methyladenosine-3'-phosphate
  modified_base 5: mod_base = OTHER; note = 2'-O-methylguanosine-3'-phosphate
  modified_base 6: mod_base = OTHER; note = 2'-fluorouridine-3'-phosphate
  modified_base 7: mod_base = OTHER; note = 2'-O-methyladenosine-3'-phosphate
  modified_base 8: mod_base = OTHER; note = 2'-fluoroadenosine-3'-phosphate
  modified_base 9: mod_base = OTHER; note = 2'-fluorouridine-3'-phosphate
  modified_base 10: mod_base = OTHER; note = 2'-O-methyladenosine-3'-phosphate
  modified_base 11: mod_base = OTHER; note = 2'-O-methyladenosine-3'-phosphate
  modified_base 12: mod_base = OTHER; note = 2'-O-methyluridine-3'-phosphate
  modified_base 13: mod_base = OTHER; note = 2'-O-methylguanosine-3'-phosphate
  modified_base 14: mod_base = OTHER; note = 2'-fluoroadenosine-3'-phosphate
  modified_base 15: mod_base = OTHER; note = 2'-O-methyluridine-3'-phosphate
  modified_base 16: mod_base = OTHER; note = 2'-fluoroguanosine-3'-phosphate
  modified_base 17: mod_base = OTHER; note = 2'-O-methylguanosine-3'-phosphate
  modified_base 18: mod_base = OTHER; note = 2'-O-methylcytidine-3'-phosphate
  modified_base 19: mod_base = OTHER; note = 2'-O-methylcytidine-3'-phosphate
  modified_base 20: mod_base = OTHER; note = 2'-O-methyladenosine-3'-phosphate
  modified_base 21: mod_base = OTHER; note = 2'-O-methylguanosine-3'-phosphorothioate
  modified_base 22: mod_base = OTHER; note = 2'-O-methylcytidine-3'-phosphorothioate
  modified_base 23: mod_base = OTHER; note = 2'-O-methyluridine-3'-phosphate
tacagtaataatgatggccagct

SEQ ID NO: 1808 - RNA, 23 nt, synthetic construct
  source 1..23: mol_type = other RNA
  modified_base 1: mod_base = OTHER; note = Vinyl-phosphonate 2'-O-methyluridine-3'-phosphorothioate
  modified_base 2: mod_base = OTHER; note = 2'-fluorocytidine-3'-phosphorothioate
  modified_base 3: mod_base = OTHER; note = 2'-O-methyluridine-3'-phosphate
  modified_base 4: mod_base = OTHER; note = 2'-O-methyluridine-3'-phosphate
  modified_base 5: mod_base = OTHER; note = 2'-O-methylcytidine-3'-phosphate
  modified_base 6: mod_base = OTHER; note = 2'-fluoroguanosine-3'-phosphate
  modified_base 7: mod_base = OTHER; note = 2'-O-methyluridine-3'-phosphate
  modified_base 8: mod_base = OTHER; note = 2'-fluoroadenosine-3'-phosphate
  modified_base 9: mod_base = OTHER; note = 2'-fluorouridine-3'-phosphate
  modified_base 10: mod_base = OTHER; note = 2'-O-methyluridine-3'-phosphate
  modified_base 11: mod_base = OTHER; note = 2'-O-methyluridine-3'-phosphate
  modified_base 12: mod_base = OTHER; note = 2'-O-methyluridine-3'-phosphate
  modified_base 13: mod_base = OTHER; note = 2'-O-methyladenosine-3'-phosphate
  modified_base 14: mod_base = OTHER; note = 2'-fluorouridine-3'-phosphate
  modified_base 15: mod_base = OTHER; note = 2'-O-methylcytidine-3'-phosphate
  modified_base 16: mod_base = OTHER; note = 2'-fluorouridine-3'-phosphate
  modified_base 17: mod_base = OTHER; note = 2'-O-methylguanosine-3'-phosphate
  modified_base 18: mod_base = OTHER; note = 2'-O-methyluridine-3'-phosphate
  modified_base 19: mod_base = OTHER; note = 2'-O-methylcytidine-3'-phosphate
  modified_base 20: mod_base = OTHER; note = 2'-O-methyladenosine-3'-phosphate
  modified_base 21: mod_base = OTHER; note = 2'-O-methyladenosine-3'-phosphorothioate
  modified_base 22: mod_base = OTHER; note = 2'-O-methyluridine-3'-phosphorothioate
  modified_base 23: mod_base = OTHER; note = 2'-O-methyluridine-3'-phosphate
tcttcgtattttatctgtcaatt

SEQ ID NO: 1809 - RNA, 23 nt, synthetic construct
  source 1..23: mol_type = other RNA
  modified_base 1: mod_base = OTHER; note = Vinyl-phosphonate 2'-O-methyluridine-3'-phosphorothioate
  modified_base 2: mod_base = OTHER; note = 2'-fluorouridine -3'-phosphorothioate
  modified_base 3: mod_base = OTHER; note = 2'-O-methyluridine-3'-phosphate
  modified_base 4: mod_base = OTHER; note = 2'-O-methylguanosine-3'-phosphate
  modified_base 5: mod_base = OTHER; note = 2'-O-methyluridine-3'-phosphate
  modified_base 6: mod_base = OTHER; note = 2'-fluoroadenosine-3'-phosphate
  modified_base 7: mod_base = OTHER; note = 2'-O-methyladenosine-3'-phosphate
  modified_base 8: mod_base = OTHER; note = 2'-fluorouridine-3'-phosphate
  modified_base 9: mod_base = OTHER; note = 2'-fluoroguanosine-3'-phosphate
  modified_base 10: mod_base = OTHER; note = 2'-O-methyladenosine-3'-phosphate
  modified_base 11: mod_base = OTHER; note = 2'-O-methyluridine-3'-phosphate
  modified_base 12: mod_base = OTHER; note = 2'-O-methylguanosine-3'-phosphate
  modified_base 13: mod_base = OTHER; note = 2'-O-methyluridine-3'-phosphate
  modified_base 14: mod_base = OTHER; note = 2'-fluoroguanosine-3'-phosphate
  modified_base 15: mod_base = OTHER; note = 2'-O-methyluridine-3'-phosphate
  modified_base 16: mod_base = OTHER; note = 2'-fluorouridine-3'-phosphate
  modified_base 17: mod_base = OTHER; note = 2'-O-methyluridine-3'-phosphate
  modified_base 18: mod_base = OTHER; note = 2'-O-methylguanosine-3'-phosphate
  modified_base 19: mod_base = OTHER; note = 2'-O-methyluridine-3'-phosphate
  modified_base 20: mod_base = OTHER; note = 2'-O-methylguanosine-3'-phosphate
  modified_base 21: mod_base = OTHER; note = 2'-O-methyladenosine-3'-phosphorothioate
  modified_base 22: mod_base = OTHER; note = 2'-O-methyladenosine-3'-phosphorothioate
  modified_base 23: mod_base = OTHER; note = 2'-O-methyluridine-3'-phosphate
tttgtaatgatgtgtttgtgaat

SEQ ID NO: 1810 - RNA, 23 nt, synthetic construct
  source 1..23: mol_type = other RNA
  modified_base 1: mod_base = OTHER; note = Vinyl-phosphonate 2'-O-methyluridine-3'-phosphorothioate
  modified_base 2: mod_base = OTHER; note = 2'-fluorocytidine-3'-phosphorothioate
  modified_base 3: mod_base = OTHER; note = 2'-O-methyluridine-3'-phosphate
  modified_base 4: mod_base = OTHER; note = 2'-O-methyladenosine-3'-phosphate
  modified_base 5: mod_base = OTHER; note = 2'-O-methyluridine-3'-phosphate
  modified_base 6: mod_base = OTHER; note = 2'-fluorouridine-3'-phosphate
  modified_base 7: mod_base = OTHER; note = 2'-O-methyluridine-3'-phosphate
  modified_base 8: mod_base = OTHER; note = 2'-fluorouridine-3'-phosphate
  modified_base 9: mod_base = OTHER; note = 2'-fluorocytidine-3'-phosphate
  modified_base 10: mod_base = OTHER; note = 2'-O-methyladenosine-3'-phosphate
  modified_base 11: mod_base = OTHER; note = 2'-O-methyluridine-3'-phosphate
  modified_base 12: mod_base = OTHER; note = 2'-O-methyladenosine-3'-phosphate
  modified_base 13: mod_base = OTHER; note = 2'-O-methylcytidine-3'-phosphate
  modified_base 14: mod_base = OTHER; note = 2'-fluoroadenosine-3'-phosphate
  modified_base 15: mod_base = OTHER; note = 2'-O-methyladenosine-3'-phosphate
  modified_base 16: mod_base = OTHER; note = 2'-fluorouridine-3'-phosphate
  modified_base 17: mod_base = OTHER; note = 2'-O-methylcytidine-3'-phosphate
  modified_base 18: mod_base = OTHER; note = 2'-O-methyladenosine-3'-phosphate
  modified_base 19: mod_base = OTHER; note = 2'-O-methyluridine-3'-phosphate
  modified_base 20: mod_base = OTHER; note = 2'-O-methylguanosine-3'-phosphate
  modified_base 21: mod_base = OTHER; note = 2'-O-methylguanosine-3'-phosphorothioate
  modified_base 22: mod_base = OTHER; note = 2'-O-methyladenosine-3'-phosphorothioate
  modified_base 23: mod_base = OTHER; note = 2'-O-methyladenosine-3'-phosphate
tctattttcatacaatcatggaa

SEQ ID NO: 1811 - RNA, 23 nt, synthetic construct
  source 1..23: mol_type = other RNA
  modified_base 1: mod_base = OTHER; note = Vinyl-phosphonate 2'-O-methyluridine-3'-phosphorothioate
  modified_base 2: mod_base = OTHER; note = 2'-fluorouridine -3'-phosphorothioate
  modified_base 3: mod_base = OTHER; note = 2'-O-methyladenosine-3'-phosphate
  modified_base 4: mod_base = OTHER; note = 2'-O-methyladenosine-3'-phosphate
  modified_base 5: mod_base = OTHER; note = 2'-O-methyladenosine-3'-phosphate
  modified_base 6: mod_base = OTHER; note = 2'-fluorouridine-3'-phosphate
  modified_base 7: mod_base = OTHER; note = 2'-O-methyladenosine-3'-phosphate
  modified_base 8: mod_base = OTHER; note = 2'-fluorouridine-3'-phosphate
  modified_base 9: mod_base = OTHER; note = 2'-fluorouridine-3'-phosphate
  modified_base 10: mod_base = OTHER; note = 2'-O-methylcytidine-3'-phosphate
  modified_base 11: mod_base = OTHER; note = 2'-O-methyladenosine-3'-phosphate
  modified_base 12: mod_base = OTHER; note = 2'-O-methyluridine-3'-phosphate
  modified_base 13: mod_base = OTHER; note = 2'-O-methyluridine-3'-phosphate
  modified_base 14: mod_base = OTHER; note = 2'-fluoroadenosine-3'-phosphate
  modified_base 15: mod_base = OTHER; note = 2'-O-methylcytidine-3'-phosphate
  modified_base 16: mod_base = OTHER; note = 2'-fluorouridine-3'-phosphate
  modified_base 17: mod_base = OTHER; note = 2'-O-methylcytidine-3'-phosphate
  modified_base 18: mod_base = OTHER; note = 2'-O-methyluridine-3'-phosphate
  modified_base 19: mod_base = OTHER; note = 2'-O-methylguanosine-3'-phosphate
  modified_base 20: mod_base = OTHER; note = 2'-O-methyluridine-3'-phosphate
  modified_base 21: mod_base = OTHER; note = 2'-O-methylguanosine-3'-phosphorothioate
  modified_base 22: mod_base = OTHER; note = 2'-O-methyluridine-3'-phosphorothioate
  modified_base 23: mod_base = OTHER; note = 2'-O-methylcytidine-3'-phosphate
ttaaatattcattactctgtgtc

SEQ ID NO: 1812 - RNA, 23 nt, synthetic construct
  source 1..23: mol_type = other RNA
  modified_base 1: mod_base = OTHER; note = Vinyl-phosphonate 2'-O-methyluridine-3'-phosphorothioate
  modified_base 2: mod_base = OTHER; note = 2'-fluoroadenosine-3'-phosphorothioate
  modified_base 3: mod_base = OTHER; note = 2'-O-methylcytidine-3'-phosphate
  modified_base 4: mod_base = OTHER; note = 2'-O-methyladenosine-3'-phosphate
  modified_base 5: mod_base = OTHER; note = 2'-O-methyluridine-3'-phosphate
  modified_base 6: mod_base = OTHER; note = 2'-fluorocytidine-3'-phosphate
  modified_base 7: mod_base = OTHER; note = 2'-O-methyluridine-3'-phosphate
  modified_base 8: mod_base = OTHER; note = 2'-fluorouridine-3'-phosphate
  modified_base 9: mod_base = OTHER; note = 2'-fluorocytidine-3'-phosphate
  modified_base 10: mod_base = OTHER; note = 2'-O-methylcytidine-3'-phosphate
  modified_base 11: mod_base = OTHER; note = 2'-O-methyladenosine-3'-phosphate
  modified_base 12: mod_base = OTHER; note = 2'-O-methylcytidine-3'-phosphate
  modified_base 13: mod_base = OTHER; note = 2'-O-methyluridine-3'-phosphate
  modified_base 14: mod_base = OTHER; note = 2'-fluoroadenosine-3'-phosphate
  modified_base 15: mod_base = OTHER; note = 2'-O-methyladenosine-3'-phosphate
  modified_base 16: mod_base = OTHER; note = 2'-fluoroguanosine-3'-phosphate
  modified_base 17: mod_base = OTHER; note = 2'-O-methylcytidine-3'-phosphate
  modified_base 18: mod_base = OTHER; note = 2'-O-methyladenosine-3'-phosphate
  modified_base 19: mod_base = OTHER; note = 2'-O-methylguanosine-3'-phosphate
  modified_base 20: mod_base = OTHER; note = 2'-O-methylcytidine-3'-phosphate
  modified_base 21: mod_base = OTHER; note = 2'-O-methyluridine-3'-phosphorothioate
  modified_base 22: mod_base = OTHER; note = 2'-O-methylcytidine-3'-phosphorothioate
  modified_base 23: mod_base = OTHER; note = 2'-O-methylcytidine-3'-phosphate
tacatcttccactaagcagctcc

SEQ ID NO: 1813 - RNA, 23 nt, synthetic construct
  source 1..23: mol_type = other RNA
  modified_base 1: mod_base = OTHER; note = Vinyl-phosphonate 2'-O-methyluridine-3'-phosphorothioate
  modified_base 2: mod_base = OTHER; note = 2'-fluoroguanosine-3'-phosphorothioate
  modified_base 3: mod_base = OTHER; note = 2'-O-methylguanosine-3'-phosphate
  modified_base 4: mod_base = OTHER; note = 2'-O-methyluridine-3'-phosphate
  modified_base 5: mod_base = OTHER; note = 2'-O-methyladenosine-3'-phosphate
  modified_base 6: mod_base = OTHER; note = 2'-fluorouridine-3'-phosphate
  modified_base 7: mod_base = OTHER; note = 2'-O-methylcytidine-3'-phosphate
  modified_base 8: mod_base = OTHER; note = 2'-fluoroadenosine-3'-phosphate
  modified_base 9: mod_base = OTHER; note = 2'-fluoroguanosine-3'-phosphate
  modified_base 10: mod_base = OTHER; note = 2'-O-methylcytidine-3'-phosphate
  modified_base 11: mod_base = OTHER; note = 2'-O-methyladenosine-3'-phosphate
  modified_base 12: mod_base = OTHER; note = 2'-O-methylcytidine-3'-phosphate
  modified_base 13: mod_base = OTHER; note = 2'-O-methyladenosine-3'-phosphate
  modified_base 14: mod_base = OTHER; note = 2'-fluorocytidine-3'-phosphate
  modified_base 15: mod_base = OTHER; note = 2'-O-methyladenosine-3'-phosphate
  modified_base 16: mod_base = OTHER; note = 2'-fluoroguanosine-3'-phosphate
  modified_base 17: mod_base = OTHER; note = 2'-O-methyladenosine-3'-phosphate
  modified_base 18: mod_base = OTHER; note = 2'-O-methylguanosine-3'-phosphate
  modified_base 19: mod_base = OTHER; note = 2'-O-methylcytidine-3'-phosphate
  modified_base 20: mod_base = OTHER; note = 2'-O-methyluridine-3'-phosphate
  modified_base 21: mod_base = OTHER; note = 2'-O-methyladenosine-3'-phosphorothioate
  modified_base 22: mod_base = OTHER; note = 2'-O-methylguanosine-3'-phosphorothioate
  modified_base 23: mod_base = OTHER; note = 2'-O-methyladenosine-3'-phosphate
tggtatcagcacacagagctaga

SEQ ID NO: 1814 - RNA, 23 nt, synthetic construct
  source 1..23: mol_type = other RNA
  modified_base 1: mod_base = OTHER; note = Vinyl-phosphonate 2'-O-methyluridine-3'-phosphorothioate
  modified_base 2: mod_base = OTHER; note = 2'-fluoroadenosine-3'-phosphorothioate
  modified_base 3: mod_base = OTHER; note = 2'-O-methylguanosine-3'-phosphate
  modified_base 4: mod_base = OTHER; note = 2'-O-methylcytidine-3'-phosphate
  modified_base 5: mod_base = OTHER; note = 2'-O-methyluridine-3'-phosphate
  modified_base 6: mod_base = OTHER; note = 2'-fluorocytidine-3'-phosphate
  modified_base 7: mod_base = OTHER; note = 2'-O-methyladenosine-3'-phosphate
  modified_base 8: mod_base = OTHER; note = 2'-fluorouridine-3'-phosphate
  modified_base 9: mod_base = OTHER; note = 2'-fluoroadenosine-3'-phosphate
  modified_base 10: mod_base = OTHER; note = 2'-O-methyluridine-3'-phosphate
  modified_base 11: mod_base = OTHER; note = 2'-O-methyluridine-3'-phosphate
  modified_base 12: mod_base = OTHER; note = 2'-O-methylcytidine-3'-phosphate
  modified_base 13: mod_base = OTHER; note = 2'-O-methyluridine-3'-phosphate
  modified_base 14: mod_base = OTHER; note = 2'-fluorocytidine-3'-phosphate
  modified_base 15: mod_base = OTHER; note = 2'-O-methyluridine-3'-phosphate
  modified_base 16: mod_base = OTHER; note = 2'-fluorocytidine-3'-phosphate
  modified_base 17: mod_base = OTHER; note = 2'-O-methylguanosine-3'-phosphate
  modified_base 18: mod_base = OTHER; note = 2'-O-methyladenosine-3'-phosphate
  modified_base 19: mod_base = OTHER; note = 2'-O-methyladenosine-3'-phosphate
  modified_base 20: mod_base = OTHER; note = 2'-O-methyluridine-3'-phosphate
  modified_base 21: mod_base = OTHER; note = 2'-O-methylguanosine-3'-phosphorothioate
  modified_base 22: mod_base = OTHER; note = 2'-O-methyluridine-3'-phosphorothioate
  modified_base 23: mod_base = OTHER; note = 2'-O-methyladenosine-3'-phosphate
tagctcatattctctcgaatgta

SEQ ID NO: 1815 - RNA, 23 nt, synthetic construct
  source 1..23: mol_type = other RNA
  modified_base 1: mod_base = OTHER; note = Vinyl-phosphonate 2'-O-methyluridine-3'-phosphorothioate
  modified_base 2: mod_base = OTHER; note = 2'-fluorouridine -3'-phosphorothioate
  modified_base 3: mod_base = OTHER; note = 2'-O-methyladenosine-3'-phosphate
  modified_base 4: mod_base = OTHER; note = 2'-O-methylcytidine-3'-phosphate
  modified_base 5: mod_base = OTHER; note = 2'-O-methyladenosine-3'-phosphate
  modified_base 6: mod_base = OTHER; note = 2'-fluorouridine-3'-phosphate
  modified_base 7: mod_base = OTHER; note = 2'-O-methyluridine-3'-phosphate
  modified_base 8: mod_base = OTHER; note = 2'-fluorouridine-3'-phosphate
  modified_base 9: mod_base = OTHER; note = 2'-fluorouridine-3'-phosphate
  modified_base 10: mod_base = OTHER; note = 2'-O-methylcytidine-3'-phosphate
  modified_base 11: mod_base = OTHER; note = 2'-O-methyladenosine-3'-phosphate
  modified_base 12: mod_base = OTHER; note = 2'-O-methylguanosine-3'-phosphate
  modified_base 13: mod_base = OTHER; note = 2'-O-methyladenosine-3'-phosphate
  modified_base 14: mod_base = OTHER; note = 2'-fluoroadenosine-3'-phosphate
  modified_base 15: mod_base = OTHER; note = 2'-O-methyladenosine-3'-phosphate
  modified_base 16: mod_base = OTHER; note = 2'-fluoroadenosine-3'-phosphate
  modified_base 17: mod_base = OTHER; note = 2'-O-methyluridine-3'-phosphate
  modified_base 18: mod_base = OTHER; note = 2'-O-methylguanosine-3'-phosphate
  modified_base 19: mod_base = OTHER; note = 2'-O-methylcytidine-3'-phosphate
  modified_base 20: mod_base = OTHER; note = 2'-O-methyladenosine-3'-phosphate
  modified_base 21: mod_base = OTHER; note = 2'-O-methyluridine-3'-phosphorothioate
  modified_base 22: mod_base = OTHER; note = 2'-O-methyladenosine-3'-phosphorothioate
  modified_base 23: mod_base = OTHER; note = 2'-O-methylcytidine-3'-phosphate
ttacattttcagaaaatgcatac

SEQ ID NO: 1816 - RNA, 23 nt, synthetic construct
  source 1..23: mol_type = other RNA
  modified_base 1: mod_base = OTHER; note = Vinyl-phosphonate 2'-O-methyluridine-3'-phosphorothioate
  modified_base 2: mod_base = OTHER; note = 2'-fluorouridine -3'-phosphorothioate
  modified_base 3: mod_base = OTHER; note = 2'-O-methyluridine-3'-phosphate
  modified_base 4: mod_base = OTHER; note = 2'-O-methylguanosine-3'-phosphate
  modified_base 5: mod_base = OTHER; note = 2'-O-methylguanosine-3'-phosphate
  modified_base 6: mod_base = OTHER; note = 2'-fluoroguanosine-3'-phosphate
  modified_base 7: mod_base = OTHER; note = 2'-O-methyladenosine-3'-phosphate
  modified_base 8: mod_base = OTHER; note = 2'-fluorouridine-3'-phosphate
  modified_base 9: mod_base = OTHER; note = 2'-fluoroadenosine-3'-phosphate
  modified_base 10: mod_base = OTHER; note = 2'-O-methylcytidine-3'-phosphate
  modified_base 11: mod_base = OTHER; note = 2'-O-methyluridine-3'-phosphate
  modified_base 12: mod_base = OTHER; note = 2'-O-methyluridine-3'-phosphate
  modified_base 13: mod_base = OTHER; note = 2'-O-methylguanosine-3'-phosphate
  modified_base 14: mod_base = OTHER; note = 2'-fluoroguanosine-3'-phosphate
  modified_base 15: mod_base = OTHER; note = 2'-O-methyluridine-3'-phosphate
  modified_base 16: mod_base = OTHER; note = 2'-fluorocytidine-3'-phosphate
  modified_base 17: mod_base = OTHER; note = 2'-O-methylguanosine-3'-phosphate
  modified_base 18: mod_base = OTHER; note = 2'-O-methyladenosine-3'-phosphate
  modified_base 19: mod_base = OTHER; note = 2'-O-methyladenosine-3'-phosphate
  modified_base 20: mod_base = OTHER; note = 2'-O-methyladenosine-3'-phosphate
  modified_base 21: mod_base = OTHER; note = 2'-O-methylcytidine-3'-phosphorothioate
  modified_base 22: mod_base = OTHER; note = 2'-O-methyluridine-3'-phosphorothioate
  modified_base 23: mod_base = OTHER; note = 2'-O-methyluridine-3'-phosphate
tttgggatacttggtcgaaactt

SEQ ID NO: 1817 - RNA, 23 nt, synthetic construct
  source 1..23: mol_type = other RNA
  modified_base 1: mod_base = OTHER; note = Vinyl-phosphonate 2'-O-methyluridine-3'-phosphorothioate
  modified_base 2: mod_base = OTHER; note = 2'-fluorocytidine-3'-phosphorothioate
  modified_base 3: mod_base = OTHER; note = 2'-O-methylguanosine-3'-phosphate
  modified_base 4: mod_base = OTHER; note = 2'-O-methyladenosine-3'-phosphate
  modified_base 5: mod_base = OTHER; note = 2'-O-methyluridine-3'-phosphate
  modified_base 6: mod_base = OTHER; note = 2'-fluoroadenosine-3'-phosphate
  modified_base 7: mod_base = OTHER; note = 2'-O-methyluridine-3'-phosphate
  modified_base 8: mod_base = OTHER; note = 2'-fluorouridine-3'-phosphate
  modified_base 9: mod_base = OTHER; note = 2'-fluoroguanosine-3'-phosphate
  modified_base 10: mod_base = OTHER; note = 2'-O-methyluridine-3'-phosphate
  modified_base 11: mod_base = OTHER; note = 2'-O-methylguanosine-3'-phosphate
  modified_base 12: mod_base = OTHER; note = 2'-O-methylguanosine-3'-phosphate
  modified_base 13: mod_base = OTHER; note = 2'-O-methylcytidine-3'-phosphate
  modified_base 14: mod_base = OTHER; note = 2'-fluoroadenosine-3'-phosphate
  modified_base 15: mod_base = OTHER; note = 2'-O-methyladenosine-3'-phosphate
  modified_base 16: mod_base = OTHER; note = 2'-fluoroguanosine-3'-phosphate
  modified_base 17: mod_base = OTHER; note = 2'-O-methylcytidine-3'-phosphate
  modified_base 18: mod_base = OTHER; note = 2'-O-methyladenosine-3'-phosphate
  modified_base 19: mod_base = OTHER; note = 2'-O-methyladenosine-3'-phosphate
  modified_base 20: mod_base = OTHER; note = 2'-O-methylguanosine-3'-phosphate
  modified_base 21: mod_base = OTHER; note = 2'-O-methyladenosine-3'-phosphorothioate
  modified_base 22: mod_base = OTHER; note = 2'-O-methyluridine-3'-phosphorothioate
  modified_base 23: mod_base = OTHER; note = 2'-O-methyladenosine-3'-phosphate
tcgatattgtggcaagcaagata

SEQ ID NO: 1818 - RNA, 23 nt, synthetic construct
  source 1..23: mol_type = other RNA
  modified_base 1: mod_base = OTHER; note = Vinyl-phosphonate 2'-O-methyluridine-3'-phosphorothioate
  modified_base 2: mod_base = OTHER; note = 2'-fluorouridine -3'-phosphorothioate
  modified_base 3: mod_base = OTHER; note = 2'-O-methyluridine-3'-phosphate
  modified_base 4: mod_base = OTHER; note = 2'-O-methylguanosine-3'-phosphate
  modified_base 5: mod_base = OTHER; note = 2'-O-methyluridine-3'-phosphate
  modified_base 6: mod_base = OTHER; note = 2'-fluoroadenosine-3'-phosphate
  modified_base 7: mod_base = OTHER; note = 2'-O-methyluridine-3'-phosphate
  modified_base 8: mod_base = OTHER; note = 2'-fluorouridine-3'-phosphate
  modified_base 9: mod_base = OTHER; note = 2'-fluorocytidine-3'-phosphate
  modified_base 10: mod_base = OTHER; note = 2'-O-methylcytidine-3'-phosphate
  modified_base 11: mod_base = OTHER; note = 2'-O-methylcytidine-3'-phosphate
  modified_base 12: mod_base = OTHER; note = 2'-O-methyluridine-3'-phosphate
  modified_base 13: mod_base = OTHER; note = 2'-O-methylcytidine-3'-phosphate
  modified_base 14: mod_base = OTHER; note = 2'-fluorouridine-3'-phosphate
  modified_base 15: mod_base = OTHER; note = 2'-O-methyluridine-3'-phosphate
  modified_base 16: mod_base = OTHER; note = 2'-fluoroguanosine-3'-phosphate
  modified_base 17: mod_base = OTHER; note = 2'-O-methyluridine-3'-phosphate
  modified_base 18: mod_base = OTHER; note = 2'-O-methyladenosine-3'-phosphate
  modified_base 19: mod_base = OTHER; note = 2'-O-methylcytidine-3'-phosphate
  modified_base 20: mod_base = OTHER; note = 2'-O-methylcytidine-3'-phosphate
  modified_base 21: mod_base = OTHER; note = 2'-O-methylcytidine-3'-phosphorothioate
  modified_base 22: mod_base = OTHER; note = 2'-O-methylguanosine-3'-phosphorothioate
  modified_base 23: mod_base = OTHER; note = 2'-O-methyladenosine-3'-phosphate
tttgtattccctcttgtacccga

SEQ ID NO: 1819 - RNA, 23 nt, synthetic construct
  source 1..23: mol_type = other RNA
  modified_base 1: mod_base = OTHER; note = Vinyl-phosphonate 2'-O-methyluridine-3'-phosphorothioate
  modified_base 2: mod_base = OTHER; note = 2'-fluoroadenosine-3'-phosphorothioate
  modified_base 3: mod_base = OTHER; note = 2'-O-methylguanosine-3'-phosphate
  modified_base 4: mod_base = OTHER; note = 2'-O-methyladenosine-3'-phosphate
  modified_base 5: mod_base = OTHER; note = 2'-O-methylcytidine-3'-phosphate
  modified_base 6: mod_base = OTHER; note = 2'-fluoroadenosine-3'-phosphate
  modified_base 7: mod_base = OTHER; note = 2'-O-methylcytidine-3'-phosphate
  modified_base 8: mod_base = OTHER; note = 2'-fluoroadenosine-3'-phosphate
  modified_base 9: mod_base = OTHER; note = 2'-fluoroguanosine-3'-phosphate
  modified_base 10: mod_base = OTHER; note = 2'-O-methylguanosine-3'-phosphate
  modified_base 11: mod_base = OTHER; note = 2'-O-methyladenosine-3'-phosphate
  modified_base 12: mod_base = OTHER; note = 2'-O-methyluridine-3'-phosphate
  modified_base 13: mod_base = OTHER; note = 2'-O-methyluridine-3'-phosphate
  modified_base 14: mod_base = OTHER; note = 2'-fluorouridine-3'-phosphate
  modified_base 15: mod_base = OTHER; note = 2'-O-methylguanosine-3'-phosphate
  modified_base 16: mod_base = OTHER; note = 2'-fluoroadenosine-3'-phosphate
  modified_base 17: mod_base = OTHER; note = 2'-O-methyluridine-3'-phosphate
  modified_base 18: mod_base = OTHER; note = 2'-O-methylcytidine-3'-phosphate
  modified_base 19: mod_base = OTHER; note = 2'-O-methyladenosine-3'-phosphate
  modified_base 20: mod_base = OTHER; note = 2'-O-methylcytidine-3'-phosphate
  modified_base 21: mod_base = OTHER; note = 2'-O-methylcytidine-3'-phosphorothioate
  modified_base 22: mod_base = OTHER; note = 2'-O-methyluridine-3'-phosphorothioate
  modified_base 23: mod_base = OTHER; note = 2'-O-methylguanosine-3'-phosphate
tagacacaggatttgatcacctg

SEQ ID NO: 1820 - RNA, 23 nt, synthetic construct
  source 1..23: mol_type = other RNA
  modified_base 1: mod_base = OTHER; note = Vinyl-phosphonate 2'-O-methyluridine-3'-phosphorothioate
  modified_base 2: mod_base = OTHER; note = 2'-fluorocytidine-3'-phosphorothioate
  modified_base 3: mod_base = OTHER; note = 2'-O-methylcytidine-3'-phosphate
  modified_base 4: mod_base = OTHER; note = 2'-O-methyluridine-3'-phosphate
  modified_base 5: mod_base = OTHER; note = 2'-O-methyladenosine-3'-phosphate
  modified_base 6: mod_base = OTHER; note = 2'-fluorouridine-3'-phosphate
  modified_base 7: mod_base = OTHER; note = 2'-O-methylcytidine-3'-phosphate
  modified_base 8: mod_base = OTHER; note = 2'-fluorocytidine-3'-phosphate
  modified_base 9: mod_base = OTHER; note = 2'-fluorouridine-3'-phosphate
  modified_base 10: mod_base = OTHER; note = 2'-O-methyladenosine-3'-phosphate
  modified_base 11: mod_base = OTHER; note = 2'-O-methylguanosine-3'-phosphate
  modified_base 12: mod_base = OTHER; note = 2'-O-methyladenosine-3'-phosphate
  modified_base 13: mod_base = OTHER; note = 2'-O-methyladenosine-3'-phosphate
  modified_base 14: mod_base = OTHER; note = 2'-fluoroadenosine-3'-phosphate
  modified_base 15: mod_base = OTHER; note = 2'-O-methylcytidine-3'-phosphate
  modified_base 16: mod_base = OTHER; note = 2'-fluorocytidine-3'-phosphate
  modified_base 17: mod_base = OTHER; note = 2'-O-methylcytidine-3'-phosphate
  modified_base 18: mod_base = OTHER; note = 2'-O-methyladenosine-3'-phosphate
  modified_base 19: mod_base = OTHER; note = 2'-O-methylcytidine-3'-phosphate
  modified_base 20: mod_base = OTHER; note = 2'-O-methyluridine-3'-phosphate
  modified_base 21: mod_base = OTHER; note = 2'-O-methylguanosine-3'-phosphorothioate
  modified_base 22: mod_base = OTHER; note = 2'-O-methyluridine-3'-phosphorothioate
  modified_base 23: mod_base = OTHER; note = 2'-O-methylcytidine-3'-phosphate
tcctatcctagaaacccactgtc

SEQ ID NO: 1821 - RNA, 23 nt, synthetic construct
  source 1..23: mol_type = other RNA
  modified_base 1: mod_base = OTHER; note = Vinyl-phosphonate 2'-O-methyluridine-3'-phosphorothioate
  modified_base 2: mod_base = OTHER; note = 2'-fluoroguanosine-3'-phosphorothioate
  modified_base 3: mod_base = OTHER; note = 2'-O-methyluridine-3'-phosphate
  modified_base 4: mod_base = OTHER; note = 2'-O-methylcytidine-3'-phosphate
  modified_base 5: mod_base = OTHER; note = 2'-O-methylcytidine-3'-phosphate
  modified_base 6: mod_base = OTHER; note = 2'-fluorouridine-3'-phosphate
  modified_base 7: mod_base = OTHER; note = 2'-O-methyluridine-3'-phosphate
  modified_base 8: mod_base = OTHER; note = 2'-fluoroadenosine-3'-phosphate
  modified_base 9: mod_base = OTHER; note = 2'-fluoroadenosine-3'-phosphate
  modified_base 10: mod_base = OTHER; note = 2'-O-methyladenosine-3'-phosphate
  modified_base 11: mod_base = OTHER; note = 2'-O-methyladenosine-3'-phosphate
  modified_base 12: mod_base = OTHER; note = 2'-O-methyladenosine-3'-phosphate
  modified_base 13: mod_base = OTHER; note = 2'-O-methyluridine-3'-phosphate
  modified_base 14: mod_base = OTHER; note = 2'-fluoroadenosine-3'-phosphate
  modified_base 15: mod_base = OTHER; note = 2'-O-methylcytidine-3'-phosphate
  modified_base 16: mod_base = OTHER; note = 2'-fluorouridine-3'-phosphate
  modified_base 17: mod_base = OTHER; note = 2'-O-methyluridine-3'-phosphate
  modified_base 18: mod_base = OTHER; note = 2'-O-methyladenosine-3'-phosphate
  modified_base 19: mod_base = OTHER; note = 2'-O-methylguanosine-3'-phosphate
  modified_base 20: mod_base = OTHER; note = 2'-O-methyluridine-3'-phosphate
  modified_base 21: mod_base = OTHER; note = 2'-O-methyluridine-3'-phosphorothioate
  modified_base 22: mod_base = OTHER; note = 2'-O-methyladenosine-3'-phosphorothioate
  modified_base 23: mod_base = OTHER; note = 2'-O-methylcytidine-3'-phosphate
tgtccttaaaaatacttagttac

SEQ ID NO: 1822 - RNA, 23 nt, synthetic construct
  source 1..23: mol_type = other RNA
  modified_base 1: mod_base = OTHER; note = Vinyl-phosphonate 2'-O-methyluridine-3'-phosphorothioate
  modified_base 2: mod_base = OTHER; note = 2'-fluoroadenosine-3'-phosphorothioate
  modified_base 3: mod_base = OTHER; note = 2'-O-methyladenosine-3'-phosphate
  modified_base 4: mod_base = OTHER; note = 2'-O-methyluridine-3'-phosphate
  modified_base 5: mod_base = OTHER; note = 2'-O-methyluridine-3'-phosphate
  modified_base 6: mod_base = OTHER; note = 2'-fluorouridine-3'-phosphate
  modified_base 7: mod_base = OTHER; note = 2'-O-methyladenosine-3'-phosphate
  modified_base 8: mod_base = OTHER; note = 2'-fluoroadenosine-3'-phosphate
  modified_base 9: mod_base = OTHER; note = 2'-fluorocytidine-3'-phosphate
  modified_base 10: mod_base = OTHER; note = 2'-O-methyladenosine-3'-phosphate
  modified_base 11: mod_base = OTHER; note = 2'-O-methyladenosine-3'-phosphate
  modified_base 12: mod_base = OTHER; note = 2'-O-methyluridine-3'-phosphate
  modified_base 13: mod_base = OTHER; note = 2'-O-methylcytidine-3'-phosphate
  modified_base 14: mod_base = OTHER; note = 2'-fluoroadenosine-3'-phosphate
  modified_base 15: mod_base = OTHER; note = 2'-O-methylcytidine-3'-phosphate
  modified_base 16: mod_base = OTHER; note = 2'-fluoroadenosine-3'-phosphate
  modified_base 17: mod_base = OTHER; note = 2'-O-methyluridine-3'-phosphate
  modified_base 18: mod_base = OTHER; note = 2'-O-methyluridine-3'-phosphate
  modified_base 19: mod_base = OTHER; note = 2'-O-methyladenosine-3'-phosphate
  modified_base 20: mod_base = OTHER; note = 2'-O-methyluridine-3'-phosphate
  modified_base 21: mod_base = OTHER; note = 2'-O-methylguanosine-3'-phosphorothioate
  modified_base 22: mod_base = OTHER; note = 2'-O-methylguanosine-3'-phosphorothioate
  modified_base 23: mod_base = OTHER; note = 2'-O-methylguanosine-3'-phosphate
taatttaacaatcacattatggg

SEQ ID NO: 1823 - RNA, 23 nt, synthetic construct
  source 1..23: mol_type = other RNA
  modified_base 1: mod_base = OTHER; note = Vinyl-phosphonate 2'-O-methyluridine-3'-phosphorothioate
  modified_base 2: mod_base = OTHER; note = 2'-fluoroguanosine-3'-phosphorothioate
  modified_base 3: mod_base = OTHER; note = 2'-O-methyladenosine-3'-phosphate
  modified_base 4: mod_base = OTHER; note = 2'-O-methylguanosine-3'-phosphate
  modified_base 5: mod_base = OTHER; note = 2'-O-methyluridine-3'-phosphate
  modified_base 6: mod_base = OTHER; note = 2'-fluorouridine-3'-phosphate
  modified_base 7: mod_base = OTHER; note = 2'-O-methyluridine-3'-phosphate
  modified_base 8: mod_base = OTHER; note = 2'-fluorouridine-3'-phosphate
  modified_base 9: mod_base = OTHER; note = 2'-fluorocytidine-3'-phosphate
  modified_base 10: mod_base = OTHER; note = 2'-O-methyluridine-3'-phosphate
  modified_base 11: mod_base = OTHER; note = 2'-O-methyluridine-3'-phosphate
  modified_base 12: mod_base = OTHER; note = 2'-O-methyladenosine-3'-phosphate
  modified_base 13: mod_base = OTHER; note = 2'-O-methyladenosine-3'-phosphate
  modified_base 14: mod_base = OTHER; note = 2'-fluorouridine-3'-phosphate
  modified_base 15: mod_base = OTHER; note = 2'-O-methyluridine-3'-phosphate
  modified_base 16: mod_base = OTHER; note = 2'-fluorocytidine-3'-phosphate
  modified_base 17: mod_base = OTHER; note = 2'-O-methyluridine-3'-phosphate
  modified_base 18: mod_base = OTHER; note = 2'-O-methyluridine-3'-phosphate
  modified_base 19: mod_base = OTHER; note = 2'-O-methylcytidine-3'-phosphate
  modified_base 20: mod_base = OTHER; note = 2'-O-methyluridine-3'-phosphate
  modified_base 21: mod_base = OTHER; note = 2'-O-methylcytidine-3'-phosphorothioate
  modified_base 22: mod_base = OTHER; note = 2'-O-methyladenosine-3'-phosphorothioate
  modified_base 23: mod_base = OTHER; note = 2'-O-methyladenosine-3'-phosphate
tgagttttcttaattcttctcaa

SEQ ID NO: 1824 - RNA, 23 nt, synthetic construct
  source 1..23: mol_type = other RNA
  modified_base 1: mod_base = OTHER; note = Vinyl-phosphonate 2'-O-methyluridine-3'-phosphorothioate
  modified_base 2: mod_base = OTHER; note = 2'-fluorouridine -3'-phosphorothioate
  modified_base 3: mod_base = OTHER; note = 2'-O-methyladenosine-3'-phosphate
  modified_base 4: mod_base = OTHER; note = 2'-O-methyladenosine-3'-phosphate
  modified_base 5: mod_base = OTHER; note = 2'-O-methyladenosine-3'-phosphate
  modified_base 6: mod_base = OTHER; note = 2'-fluorocytidine-3'-phosphate
  modified_base 7: mod_base = OTHER; note = 2'-O-methyladenosine-3'-phosphate
  modified_base 8: mod_base = OTHER; note = 2'-fluoroadenosine-3'-phosphate
  modified_base 9: mod_base = OTHER; note = 2'-fluorouridine-3'-phosphate
  modified_base 10: mod_base = OTHER; note = 2'-O-methylcytidine-3'-phosphate
  modified_base 11: mod_base = OTHER; note = 2'-O-methyladenosine-3'-phosphate
  modified_base 12: mod_base = OTHER; note = 2'-O-methyladenosine-3'-phosphate
  modified_base 13: mod_base = OTHER; note = 2'-O-methyluridine-3'-phosphate
  modified_base 14: mod_base = OTHER; note = 2'-fluorouridine-3'-phosphate
  modified_base 15: mod_base = OTHER; note = 2'-O-methyluridine-3'-phosphate
  modified_base 16: mod_base = OTHER; note = 2'-fluorocytidine-3'-phosphate
  modified_base 17: mod_base = OTHER; note = 2'-O-methyluridine-3'-phosphate
  modified_base 18: mod_base = OTHER; note = 2'-O-methylcytidine-3'-phosphate
  modified_base 19: mod_base = OTHER; note = 2'-O-methyluridine-3'-phosphate
  modified_base 20: mod_base = OTHER; note = 2'-O-methyluridine-3'-phosphate
  modified_base 21: mod_base = OTHER; note = 2'-O-methylcytidine-3'-phosphorothioate
  modified_base 22: mod_base = OTHER; note = 2'-O-methyluridine-3'-phosphorothioate
  modified_base 23: mod_base = OTHER; note = 2'-O-methylcytidine-3'-phosphate
ttaaacaatcaatttctcttctc

SEQ ID NO: 1825 - RNA, 23 nt, synthetic construct
  source 1..23: mol_type = other RNA
  modified_base 1: mod_base = OTHER; note = Vinyl-phosphonate 2'-O-methyluridine-3'-phosphorothioate
  modified_base 2: mod_base = OTHER; note = 2'-fluorouridine -3'-phosphorothioate
  modified_base 3: mod_base = OTHER; note = 2'-O-methyladenosine-3'-phosphate
  modified_base 4: mod_base = OTHER; note = 2'-O-methyluridine-3'-phosphate
  modified_base 5: mod_base = OTHER; note = 2'-O-methylguanosine-3'-phosphate
  modified_base 6: mod_base = OTHER; note = 2'-fluoroguanosine-3'-phosphate
  modified_base 7: mod_base = OTHER; note = 2'-O-methylcytidine-3'-phosphate
  modified_base 8: mod_base = OTHER; note = 2'-fluoroadenosine-3'-phosphate
  modified_base 9: mod_base = OTHER; note = 2'-fluorocytidine-3'-phosphate
  modified_base 10: mod_base = OTHER; note = 2'-O-methyladenosine-3'-phosphate
  modified_base 11: mod_base = OTHER; note = 2'-O-methyladenosine-3'-phosphate
  modified_base 12: mod_base = OTHER; note = 2'-O-methylguanosine-3'-phosphate
  modified_base 13: mod_base = OTHER; note = 2'-O-methyluridine-3'-phosphate
  modified_base 14: mod_base = OTHER; note = 2'-fluorouridine-3'-phosphate
  modified_base 15: mod_base = OTHER; note = 2'-O-methyluridine-3'-phosphate
  modified_base 16: mod_base = OTHER; note = 2'-fluorocytidine-3'-phosphate
  modified_base 17: mod_base = OTHER; note = 2'-O-methyladenosine-3'-phosphate
  modified_base 18: mod_base = OTHER; note = 2'-O-methylcytidine-3'-phosphate
  modified_base 19: mod_base = OTHER; note = 2'-O-methyladenosine-3'-phosphate
  modified_base 20: mod_base = OTHER; note = 2'-O-methylcytidine-3'-phosphate
  modified_base 21: mod_base = OTHER; note = 2'-O-methyluridine-3'-phosphorothioate
  modified_base 22: mod_base = OTHER; note = 2'-O-methyluridine-3'-phosphorothioate
  modified_base 23: mod_base = OTHER; note = 2'-O-methyluridine-3'-phosphate
ttatggcacaagtttcacacttt

SEQ ID NO: 1826 - RNA, 23 nt, synthetic construct
  source 1..23: mol_type = other RNA
  modified_base 1: mod_base = OTHER; note = Vinyl-phosphonate 2'-O-methyluridine-3'-phosphorothioate
  modified_base 2: mod_base = OTHER; note = 2'-fluoroguanosine-3'-phosphorothioate
  modified_base 3: mod_base = OTHER; note = 2'-O-methyladenosine-3'-phosphate
  modified_base 4: mod_base = OTHER; note = 2'-O-methylcytidine-3'-phosphate
  modified_base 5: mod_base = OTHER; note = 2'-O-methyladenosine-3'-phosphate
  modified_base 6: mod_base = OTHER; note = 2'-fluorouridine-3'-phosphate
  modified_base 7: mod_base = OTHER; note = 2'-O-methyluridine-3'-phosphate
  modified_base 8: mod_base = OTHER; note = 2'-fluorouridine-3'-phosphate
  modified_base 9: mod_base = OTHER; note = 2'-fluorocytidine-3'-phosphate
  modified_base 10: mod_base = OTHER; note = 2'-O-methyluridine-3'-phosphate
  modified_base 11: mod_base = OTHER; note = 2'-O-methylcytidine-3'-phosphate
  modified_base 12: mod_base = OTHER; note = 2'-O-methyladenosine-3'-phosphate
  modified_base 13: mod_base = OTHER; note = 2'-O-methylguanosine-3'-phosphate
  modified_base 14: mod_base = OTHER; note = 2'-fluorouridine-3'-phosphate
  modified_base 15: mod_base = OTHER; note = 2'-O-methylguanosine-3'-phosphate
  modified_base 16: mod_base = OTHER; note = 2'-fluorouridine-3'-phosphate
  modified_base 17: mod_base = OTHER; note = 2'-O-methylcytidine-3'-phosphate
  modified_base 18: mod_base = OTHER; note = 2'-O-methyluridine-3'-phosphate
  modified_base 19: mod_base = OTHER; note = 2'-O-methylcytidine-3'-phosphate
  modified_base 20: mod_base = OTHER; note = 2'-O-methyladenosine-3'-phosphate
  modified_base 21: mod_base = OTHER; note = 2'-O-methylguanosine-3'-phosphorothioate
  modified_base 22: mod_base = OTHER; note = 2'-O-methylguanosine-3'-phosphorothioate
  modified_base 23: mod_base = OTHER; note = 2'-O-methyladenosine-3'-phosphate
tgacatttctcagtgtctcagga

SEQ ID NO: 1827 - RNA, 23 nt, synthetic construct
  source 1..23: mol_type = other RNA
  modified_base 1: mod_base = OTHER; note = Vinyl-phosphonate 2'-O-methyluridine-3'-phosphorothioate
  modified_base 2: mod_base = OTHER; note = 2'-fluorocytidine-3'-phosphorothioate
  modified_base 3: mod_base = OTHER; note = 2'-O-methyluridine-3'-phosphate
  modified_base 4: mod_base = OTHER; note = 2'-O-methyluridine-3'-phosphate
  modified_base 5: mod_base = OTHER; note = 2'-O-methyluridine-3'-phosphate
  modified_base 6: mod_base = OTHER; note = 2'-fluoroadenosine-3'-phosphate
  modified_base 7: mod_base = OTHER; note = 2'-O-methyladenosine-3'-phosphate
  modified_base 8: mod_base = OTHER; note = 2'-fluoroadenosine-3'-phosphate
  modified_base 9: mod_base = OTHER; note = 2'-fluorocytidine-3'-phosphate
  modified_base 10: mod_base = OTHER; note = 2'-O-methyladenosine-3'-phosphate
  modified_base 11: mod_base = OTHER; note = 2'-O-methylcytidine-3'-phosphate
  modified_base 12: mod_base = OTHER; note = 2'-O-methyladenosine-3'-phosphate
  modified_base 13: mod_base = OTHER; note = 2'-O-methyluridine-3'-phosphate
  modified_base 14: mod_base = OTHER; note = 2'-fluoroadenosine-3'-phosphate
  modified_base 15: mod_base = OTHER; note = 2'-O-methyluridine-3'-phosphate
  modified_base 16: mod_base = OTHER; note = 2'-fluoroadenosine-3'-phosphate
  modified_base 17: mod_base = OTHER; note = 2'-O-methyladenosine-3'-phosphate
  modified_base 18: mod_base = OTHER; note = 2'-O-methylguanosine-3'-phosphate
  modified_base 19: mod_base = OTHER; note = 2'-O-methylcytidine-3'-phosphate
  modified_base 20: mod_base = OTHER; note = 2'-O-methylcytidine-3'-phosphate
  modified_base 21: mod_base = OTHER; note = 2'-O-methyladenosine-3'-phosphorothioate
  modified_base 22: mod_base = OTHER; note = 2'-O-methyladenosine-3'-phosphorothioate
  modified_base 23: mod_base = OTHER; note = 2'-O-methyluridine-3'-phosphate
tctttaaacacatataagccaat

SEQ ID NO: 1828 - RNA, 23 nt, synthetic construct
  source 1..23: mol_type = other RNA
  modified_base 1: mod_base = OTHER; note = Vinyl-phosphonate 2'-O-methyluridine-3'-phosphorothioate
  modified_base 2: mod_base = OTHER; note = 2'-fluorouridine -3'-phosphorothioate
  modified_base 3: mod_base = OTHER; note = 2'-O-methyluridine-3'-phosphate
  modified_base 4: mod_base = OTHER; note = 2'-O-methyluridine-3'-phosphate
  modified_base 5: mod_base = OTHER; note = 2'-O-methyluridine-3'-phosphate
  modified_base 6: mod_base = OTHER; note = 2'-fluoroguanosine-3'-phosphate
  modified_base 7: mod_base = OTHER; note = 2'-O-methylcytidine-3'-phosphate
  modified_base 8: mod_base = OTHER; note = 2'-fluoroadenosine-3'-phosphate
  modified_base 9: mod_base = OTHER; note = 2'-fluoroadenosine-3'-phosphate
  modified_base 10: mod_base = OTHER; note = 2'-O-methyluridine-3'-phosphate
  modified_base 11: mod_base = OTHER; note = 2'-O-methylguanosine-3'-phosphate
  modified_base 12: mod_base = OTHER; note = 2'-O-methyluridine-3'-phosphate
  modified_base 13: mod_base = OTHER; note = 2'-O-methylcytidine-3'-phosphate
  modified_base 14: mod_base = OTHER; note = 2'-fluoroadenosine-3'-phosphate
  modified_base 15: mod_base = OTHER; note = 2'-O-methyladenosine-3'-phosphate
  modified_base 16: mod_base = OTHER; note = 2'-fluoroadenosine-3'-phosphate
  modified_base 17: mod_base = OTHER; note = 2'-O-methyladenosine-3'-phosphate
  modified_base 18: mod_base = OTHER; note = 2'-O-methyluridine-3'-phosphate
  modified_base 19: mod_base = OTHER; note = 2'-O-methylguanosine-3'-phosphate
  modified_base 20: mod_base = OTHER; note = 2'-O-methylcytidine-3'-phosphate
  modified_base 21: mod_base = OTHER; note = 2'-O-methyladenosine-3'-phosphorothioate
  modified_base 22: mod_base = OTHER; note = 2'-O-methyladenosine-3'-phosphorothioate
  modified_base 23: mod_base = OTHER; note = 2'-O-methyluridine-3'-phosphate
tttttgcaatgtcaaaatgcaat

SEQ ID NO: 1829 - RNA, 23 nt, synthetic construct
  source 1..23: mol_type = other RNA
  modified_base 1: mod_base = OTHER; note = Vinyl-phosphonate 2'-O-methyluridine-3'-phosphorothioate
  modified_base 2: mod_base = OTHER; note = 2'-fluorouridine -3'-phosphorothioate
  modified_base 3: mod_base = OTHER; note = 2'-O-methyluridine-3'-phosphate
  modified_base 4: mod_base = OTHER; note = 2'-O-methylcytidine-3'-phosphate
  modified_base 5: mod_base = OTHER; note = 2'-O-methyluridine-3'-phosphate
  modified_base 6: mod_base = OTHER; note = 2'-fluoroguanosine-3'-phosphate
  modified_base 7: mod_base = OTHER; note = 2'-O-methylguanosine-3'-phosphate
  modified_base 8: mod_base = OTHER; note = 2'-fluoroadenosine-3'-phosphate
  modified_base 9: mod_base = OTHER; note = 2'-fluoroadenosine-3'-phosphate
  modified_base 10: mod_base = OTHER; note = 2'-O-methylcytidine-3'-phosphate
  modified_base 11: mod_base = OTHER; note = 2'-O-methyluridine-3'-phosphate
  modified_base 12: mod_base = OTHER; note = 2'-O-methyluridine-3'-phosphate
  modified_base 13: mod_base = OTHER; note = 2'-O-methylcytidine-3'-phosphate
  modified_base 14: mod_base = OTHER; note = 2'-fluorouridine-3'-phosphate
  modified_base 15: mod_base = OTHER; note = 2'-O-methyladenosine-3'-phosphate
  modified_base 16: mod_base = OTHER; note = 2'-fluoroadenosine-3'-phosphate
  modified_base 17: mod_base = OTHER; note = 2'-O-methylcytidine-3'-phosphate
  modified_base 18: mod_base = OTHER; note = 2'-O-methylcytidine-3'-phosphate
  modified_base 19: mod_base = OTHER; note = 2'-O-methyluridine-3'-phosphate
  modified_base 20: mod_base = OTHER; note = 2'-O-methyladenosine-3'-phosphate
  modified_base 21: mod_base = OTHER; note = 2'-O-methyladenosine-3'-phosphorothioate
  modified_base 22: mod_base = OTHER; note = 2'-O-methyluridine-3'-phosphorothioate
  modified_base 23: mod_base = OTHER; note = 2'-O-methylguanosine-3'-phosphate
tttctggaacttctaacctaatg

SEQ ID NO: 1830 - RNA, 23 nt, synthetic construct
  source 1..23: mol_type = other RNA
  modified_base 1: mod_base = OTHER; note = Vinyl-phosphonate 2'-O-methyluridine-3'-phosphorothioate
  modified_base 2: mod_base = OTHER; note = 2'-fluoroadenosine-3'-phosphorothioate
  modified_base 3: mod_base = OTHER; note = 2'-O-methyladenosine-3'-phosphate
  modified_base 4: mod_base = OTHER; note = 2'-O-methylguanosine-3'-phosphate
  modified_base 5: mod_base = OTHER; note = 2'-O-methylguanosine-3'-phosphate
  modified_base 6: mod_base = OTHER; note = 2'-fluoroadenosine-3'-phosphate
  modified_base 7: mod_base = OTHER; note = 2'-O-methyluridine-3'-phosphate
  modified_base 8: mod_base = OTHER; note = 2'-fluoroguanosine-3'-phosphate
  modified_base 9: mod_base = OTHER; note = 2'-fluorouridine-3'-phosphate
  modified_base 10: mod_base = OTHER; note = 2'-O-methyluridine-3'-phosphate
  modified_base 11: mod_base = OTHER; note = 2'-O-methyluridine-3'-phosphate
  modified_base 12: mod_base = OTHER; note = 2'-O-methyluridine-3'-phosphate
  modified_base 13: mod_base = OTHER; note = 2'-O-methylcytidine-3'-phosphate
  modified_base 14: mod_base = OTHER; note = 2'-fluoroadenosine-3'-phosphate
  modified_base 15: mod_base = OTHER; note = 2'-O-methyluridine-3'-phosphate
  modified_base 16: mod_base = OTHER; note = 2'-fluoroguanosine-3'-phosphate
  modified_base 17: mod_base = OTHER; note = 2'-O-methyluridine-3'-phosphate
  modified_base 18: mod_base = OTHER; note = 2'-O-methylcytidine-3'-phosphate
  modified_base 19: mod_base = OTHER; note = 2'-O-methylguanosine-3'-phosphate
  modified_base 20: mod_base = OTHER; note = 2'-O-methylcytidine-3'-phosphate
  modified_base 21: mod_base = OTHER; note = 2'-O-methyladenosine-3'-phosphorothioate
  modified_base 22: mod_base = OTHER; note = 2'-O-methylguanosine-3'-phosphorothioate
  modified_base 23: mod_base = OTHER; note = 2'-O-methylcytidine-3'-phosphate
taaggatgttttcatgtcgcagc

SEQ ID NO: 1831 - RNA, 23 nt, synthetic construct
  source 1..23: mol_type = other RNA
  modified_base 1: mod_base = OTHER; note = Vinyl-phosphonate 2'-O-methyluridine-3'-phosphorothioate
  modified_base 2: mod_base = OTHER; note = 2'-fluoroadenosine-3'-phosphorothioate
  modified_base 3: mod_base = OTHER; note = 2'-O-methylguanosine-3'-phosphate
  modified_base 4: mod_base = OTHER; note = 2'-O-methyladenosine-3'-phosphate
  modified_base 5: mod_base = OTHER; note = 2'-O-methyluridine-3'-phosphate
  modified_base 6: mod_base = OTHER; note = 2'-fluoroguanosine-3'-phosphate
  modified_base 7: mod_base = OTHER; note = 2'-O-methylguanosine-3'-phosphate
  modified_base 8: mod_base = OTHER; note = 2'-fluorouridine-3'-phosphate
  modified_base 9: mod_base = OTHER; note = 2'-fluoroadenosine-3'-phosphate
  modified_base 10: mod_base = OTHER; note = 2'-O-methyladenosine-3'-phosphate
  modified_base 11: mod_base = OTHER; note = 2'-O-methyladenosine-3'-phosphate
  modified_base 12: mod_base = OTHER; note = 2'-O-methyladenosine-3'-phosphate
  modified_base 13: mod_base = OTHER; note = 2'-O-methyladenosine-3'-phosphate
  modified_base 14: mod_base = OTHER; note = 2'-fluoroadenosine-3'-phosphate
  modified_base 15: mod_base = OTHER; note = 2'-O-methyluridine-3'-phosphate
  modified_base 16: mod_base = OTHER; note = 2'-fluorocytidine-3'-phosphate
  modified_base 17: mod_base = OTHER; note = 2'-O-methylcytidine-3'-phosphate
  modified_base 18: mod_base = OTHER; note = 2'-O-methyluridine-3'-phosphate
  modified_base 19: mod_base = OTHER; note = 2'-O-methylcytidine-3'-phosphate
  modified_base 20: mod_base = OTHER; note = 2'-O-methyluridine-3'-phosphate
  modified_base 21: mod_base = OTHER; note = 2'-O-methylcytidine-3'-phosphorothioate
  modified_base 22: mod_base = OTHER; note = 2'-O-methyluridine-3'-phosphorothioate
  modified_base 23: mod_base = OTHER; note = 2'-O-methyluridine-3'-phosphate
tagatggtaaaaaatcctctctt

SEQ ID NO: 1832 - RNA, 23 nt, synthetic construct
  source 1..23: mol_type = other RNA
  modified_base 1: mod_base = OTHER; note = Vinyl-phosphonate 2'-O-methyluridine-3'-phosphorothioate
  modified_base 2: mod_base = OTHER; note = 2'-fluorouridine -3'-phosphorothioate
  modified_base 3: mod_base = OTHER; note = 2'-O-methyluridine-3'-phosphate
  modified_base 4: mod_base = OTHER; note = 2'-O-methylguanosine-3'-phosphate
  modified_base 5: mod_base = OTHER; note = 2'-O-methyladenosine-3'-phosphate
  modified_base 6: mod_base = OTHER; note = 2'-fluoroadenosine-3'-phosphate
  modified_base 7: mod_base = OTHER; note = 2'-O-methyladenosine-3'-phosphate
  modified_base 8: mod_base = OTHER; note = 2'-fluorouridine-3'-phosphate
  modified_base 9: mod_base = OTHER; note = 2'-fluorouridine-3'-phosphate
  modified_base 10: mod_base = OTHER; note = 2'-O-methylcytidine-3'-phosphate
  modified_base 11: mod_base = OTHER; note = 2'-O-methyluridine-3'-phosphate
  modified_base 12: mod_base = OTHER; note = 2'-O-methylcytidine-3'-phosphate
  modified_base 13: mod_base = OTHER; note = 2'-O-methyluridine-3'-phosphate
  modified_base 14: mod_base = OTHER; note = 2'-fluorouridine-3'-phosphate
  modified_base 15: mod_base = OTHER; note = 2'-O-methylcytidine-3'-phosphate
  modified_base 16: mod_base = OTHER; note = 2'-fluoroadenosine-3'-phosphate
  modified_base 17: mod_base = OTHER; note = 2'-O-methylcytidine-3'-phosphate
  modified_base 18: mod_base = OTHER; note = 2'-O-methylcytidine-3'-phosphate
  modified_base 19: mod_base = OTHER; note = 2'-O-methyluridine-3'-phosphate
  modified_base 20: mod_base = OTHER; note = 2'-O-methyluridine-3'-phosphate
  modified_base 21: mod_base = OTHER; note = 2'-O-methylcytidine-3'-phosphorothioate
  modified_base 22: mod_base = OTHER; note = 2'-O-methylcytidine-3'-phosphorothioate
  modified_base 23: mod_base = OTHER; note = 2'-O-methyladenosine-3'-phosphate
tttgaaattctcttcaccttcca

SEQ ID NO: 1833 - RNA, 23 nt, synthetic construct
  source 1..23: mol_type = other RNA
  modified_base 1: mod_base = OTHER; note = Vinyl-phosphonate 2'-O-methyluridine-3'-phosphorothioate
  modified_base 2: mod_base = OTHER; note = 2'-fluorouridine -3'-phosphorothioate
  modified_base 3: mod_base = OTHER; note = 2'-O-methyluridine-3'-phosphate
  modified_base 4: mod_base = OTHER; note = 2'-O-methylcytidine-3'-phosphate
  modified_base 5: mod_base = OTHER; note = 2'-O-methyladenosine-3'-phosphate
  modified_base 6: mod_base = OTHER; note = 2'-fluorouridine-3'-phosphate
  modified_base 7: mod_base = OTHER; note = 2'-O-methylguanosine-3'-phosphate
  modified_base 8: mod_base = OTHER; note = 2'-fluoroadenosine-3'-phosphate
  modified_base 9: mod_base = OTHER; note = 2'-fluorouridine-3'-phosphate
  modified_base 10: mod_base = OTHER; note = 2'-O-methyladenosine-3'-phosphate
  modified_base 11: mod_base = OTHER; note = 2'-O-methyluridine-3'-phosphate
  modified_base 12: mod_base = OTHER; note = 2'-O-methyluridine-3'-phosphate
  modified_base 13: mod_base = OTHER; note = 2'-O-methylcytidine-3'-phosphate
  modified_base 14: mod_base = OTHER; note = 2'-fluoroadenosine-3'-phosphate
  modified_base 15: mod_base = OTHER; note = 2'-O-methylguanosine-3'-phosphate
  modified_base 16: mod_base = OTHER; note = 2'-fluoroadenosine-3'-phosphate
  modified_base 17: mod_base = OTHER; note = 2'-O-methyluridine-3'-phosphate
  modified_base 18: mod_base = OTHER; note = 2'-O-methyladenosine-3'-phosphate
  modified_base 19: mod_base = OTHER; note = 2'-O-methylcytidine-3'-phosphate
  modified_base 20: mod_base = OTHER; note = 2'-O-methylcytidine-3'-phosphate
  modified_base 21: mod_base = OTHER; note = 2'-O-methyladenosine-3'-phosphorothioate
  modified_base 22: mod_base = OTHER; note = 2'-O-methylguanosine-3'-phosphorothioate
  modified_base 23: mod_base = OTHER; note = 2'-O-methylcytidine-3'-phosphate
tttcatgatattcagataccagc

SEQ ID NO: 1834 - RNA, 23 nt, synthetic construct
  source 1..23: mol_type = other RNA
  modified_base 1: mod_base = OTHER; note = Vinyl-phosphonate 2'-O-methyluridine-3'-phosphorothioate
  modified_base 2: mod_base = OTHER; note = 2'-fluoroguanosine-3'-phosphorothioate
  modified_base 3: mod_base = OTHER; note = 2'-O-methyluridine-3'-phosphate
  modified_base 4: mod_base = OTHER; note = 2'-O-methyluridine-3'-phosphate
  modified_base 5: mod_base = OTHER; note = 2'-O-methylguanosine-3'-phosphate
  modified_base 6: mod_base = OTHER; note = 2'-fluoroadenosine-3'-phosphate
  modified_base 7: mod_base = OTHER; note = 2'-O-methyladenosine-3'-phosphate
  modified_base 8: mod_base = OTHER; note = 2'-fluoroadenosine-3'-phosphate
  modified_base 9: mod_base = OTHER; note = 2'-fluoroadenosine-3'-phosphate
  modified_base 10: mod_base = OTHER; note = 2'-O-methyladenosine-3'-phosphate
  modified_base 11: mod_base = OTHER; note = 2'-O-methyluridine-3'-phosphate
  modified_base 12: mod_base = OTHER; note = 2'-O-methyluridine-3'-phosphate
  modified_base 13: mod_base = OTHER; note = 2'-O-methyladenosine-3'-phosphate
  modified_base 14: mod_base = OTHER; note = 2'-fluoroadenosine-3'-phosphate
  modified_base 15: mod_base = OTHER; note = 2'-O-methyladenosine-3'-phosphate
  modified_base 16: mod_base = OTHER; note = 2'-fluorocytidine-3'-phosphate
  modified_base 17: mod_base = OTHER; note = 2'-O-methylcytidine-3'-phosphate
  modified_base 18: mod_base = OTHER; note = 2'-O-methyladenosine-3'-phosphate
  modified_base 19: mod_base = OTHER; note = 2'-O-methyladenosine-3'-phosphate
  modified_base 20: mod_base = OTHER; note = 2'-O-methylcytidine-3'-phosphate
  modified_base 21: mod_base = OTHER; note = 2'-O-methyladenosine-3'-phosphorothioate
  modified_base 22: mod_base = OTHER; note = 2'-O-methyluridine-3'-phosphorothioate
  modified_base 23: mod_base = OTHER; note = 2'-O-methylguanosine-3'-phosphate
tgttgaaaaattaaaccaacatg

SEQ ID NO: 1835 - RNA, 23 nt, synthetic construct
  source 1..23: mol_type = other RNA
  modified_base 1: mod_base = OTHER; note = Vinyl-phosphonate 2'-O-methyluridine-3'-phosphorothioate
  modified_base 2: mod_base = OTHER; note = 2'-fluorocytidine-3'-phosphorothioate
  modified_base 3: mod_base = OTHER; note = 2'-O-methylcytidine-3'-phosphate
  modified_base 4: mod_base = OTHER; note = 2'-O-methyladenosine-3'-phosphate
  modified_base 5: mod_base = OTHER; note = 2'-O-methylcytidine-3'-phosphate
  modified_base 6: mod_base = OTHER; note = 2'-fluoroadenosine-3'-phosphate
  modified_base 7: mod_base = OTHER; note = 2'-O-methyluridine-3'-phosphate
  modified_base 8: mod_base = OTHER; note = 2'-fluorouridine-3'-phosphate
  modified_base 9: mod_base = OTHER; note = 2'-fluorouridine-3'-phosphate
  modified_base 10: mod_base = OTHER; note = 2'-O-methyladenosine-3'-phosphate
  modified_base 11: mod_base = OTHER; note = 2'-O-methyladenosine-3'-phosphate
  modified_base 12: mod_base = OTHER; note = 2'-O-methyladenosine-3'-phosphate
  modified_base 13: mod_base = OTHER; note = 2'-O-methyluridine-3'-phosphate
  modified_base 14: mod_base = OTHER; note = 2'-fluorouridine-3'-phosphate
  modified_base 15: mod_base = OTHER; note = 2'-O-methyladenosine-3'-phosphate
  modified_base 16: mod_base = OTHER; note = 2'-fluorocytidine-3'-phosphate
  modified_base 17: mod_base = OTHER; note = 2'-O-methyladenosine-3'-phosphate
  modified_base 18: mod_base = OTHER; note = 2'-O-methyladenosine-3'-phosphate
  modified_base 19: mod_base = OTHER; note = 2'-O-methylcytidine-3'-phosphate
  modified_base 20: mod_base = OTHER; note = 2'-O-methyluridine-3'-phosphate
  modified_base 21: mod_base = OTHER; note = 2'-O-methyladenosine-3'-phosphorothioate
  modified_base 22: mod_base = OTHER; note = 2'-O-methylcytidine-3'-phosphorothioate
  modified_base 23: mod_base = OTHER; note = 2'-O-methyluridine-3'-phosphate
tccacatttaaattacaactact

SEQ ID NO: 1836 - RNA, 23 nt, synthetic construct
  source 1..23: mol_type = other RNA
  modified_base 1: mod_base = OTHER; note = Vinyl-phosphonate 2'-O-methyluridine-3'-phosphorothioate
  modified_base 2: mod_base = OTHER; note = 2'-fluoroadenosine-3'-phosphorothioate
  modified_base 3: mod_base = OTHER; note = 2'-O-methyladenosine-3'-phosphate
  modified_base 4: mod_base = OTHER; note = 2'-O-methyladenosine-3'-phosphate
  modified_base 5: mod_base = OTHER; note = 2'-O-methyladenosine-3'-phosphate
  modified_base 6: mod_base = OTHER; note = 2'-fluorouridine-3'-phosphate
  modified_base 7: mod_base = OTHER; note = 2'-O-methylguanosine-3'-phosphate
  modified_base 8: mod_base = OTHER; note = 2'-fluoroguanosine-3'-phosphate
  modified_base 9: mod_base = OTHER; note = 2'-fluorocytidine-3'-phosphate
  modified_base 10: mod_base = OTHER; note = 2'-O-methyladenosine-3'-phosphate
  modified_base 11: mod_base = OTHER; note = 2'-O-methyladenosine-3'-phosphate
  modified_base 12: mod_base = OTHER; note = 2'-O-methyladenosine-3'-phosphate
  modified_base 13: mod_base = OTHER; note = 2'-O-methyladenosine-3'-phosphate
  modified_base 14: mod_base = OTHER; note = 2'-fluoroadenosine-3'-phosphate
  modified_base 15: mod_base = OTHER; note = 2'-O-methylcytidine-3'-phosphate
  modified_base 16: mod_base = OTHER; note = 2'-fluoroadenosine-3'-phosphate
  modified_base 17: mod_base = OTHER; note = 2'-O-methyluridine-3'-phosphate
  modified_base 18: mod_base = OTHER; note = 2'-O-methyluridine-3'-phosphate
  modified_base 19: mod_base = OTHER; note = 2'-O-methylcytidine-3'-phosphate
  modified_base 20: mod_base = OTHER; note = 2'-O-methyladenosine-3'-phosphate
  modified_base 21: mod_base = OTHER; note = 2'-O-methylcytidine-3'-phosphorothioate
  modified_base 22: mod_base = OTHER; note = 2'-O-methyladenosine-3'-phosphorothioate
  modified_base 23: mod_base = OTHER; note = 2'-O-methyluridine-3'-phosphate
taaaatggcaaaaacattcacat

SEQ ID NO: 1837 - RNA, 23 nt, synthetic construct
  source 1..23: mol_type = other RNA
  modified_base 1: mod_base = OTHER; note = Vinyl-phosphonate 2'-O-methyluridine-3'-phosphorothioate
  modified_base 2: mod_base = OTHER; note = 2'-fluorouridine -3'-phosphorothioate
  modified_base 3: mod_base = OTHER; note = 2'-O-methyladenosine-3'-phosphate
  modified_base 4: mod_base = OTHER; note = 2'-O-methyladenosine-3'-phosphate
  modified_base 5: mod_base = OTHER; note = 2'-O-methyladenosine-3'-phosphate
  modified_base 6: mod_base = OTHER; note = 2'-fluoroadenosine-3'-phosphate
  modified_base 7: mod_base = OTHER; note = 2'-O-methylguanosine-3'-phosphate
  modified_base 8: mod_base = OTHER; note = 2'-fluoroadenosine-3'-phosphate
  modified_base 9: mod_base = OTHER; note = 2'-fluoroadenosine-3'-phosphate
  modified_base 10: mod_base = OTHER; note = 2'-O-methyladenosine-3'-phosphate
  modified_base 11: mod_base = OTHER; note = 2'-O-methyladenosine-3'-phosphate
  modified_base 12: mod_base = OTHER; note = 2'-O-methyladenosine-3'-phosphate
  modified_base 13: mod_base = OTHER; note = 2'-O-methyluridine-3'-phosphate
  modified_base 14: mod_base = OTHER; note = 2'-fluorocytidine-3'-phosphate
  modified_base 15: mod_base = OTHER; note = 2'-O-methyladenosine-3'-phosphate
  modified_base 16: mod_base = OTHER; note = 2'-fluorouridine-3'-phosphate
  modified_base 17: mod_base = OTHER; note = 2'-O-methylcytidine-3'-phosphate
  modified_base 18: mod_base = OTHER; note = 2'-O-methyluridine-3'-phosphate
  modified_base 19: mod_base = OTHER; note = 2'-O-methylcytidine-3'-phosphate
  modified_base 20: mod_base = OTHER; note = 2'-O-methyluridine-3'-phosphate
  modified_base 21: mod_base = OTHER; note = 2'-O-methylguanosine-3'-phosphorothioate
  modified_base 22: mod_base = OTHER; note = 2'-O-methylcytidine-3'-phosphorothioate
  modified_base 23: mod_base = OTHER; note = 2'-O-methylcytidine-3'-phosphate
ttaaaagaaaaatcatctctgcc

SEQ ID NO: 1838 - RNA, 23 nt, synthetic construct
  source 1..23: mol_type = other RNA
  modified_base 1: mod_base = OTHER; note = Vinyl-phosphonate 2'-O-methyluridine-3'-phosphorothioate
  modified_base 2: mod_base = OTHER; note = 2'-fluoroadenosine-3'-phosphorothioate
  modified_base 3: mod_base = OTHER; note = 2'-O-methylguanosine-3'-phosphate
  modified_base 4: mod_base = OTHER; note = 2'-O-methyladenosine-3'-phosphate
  modified_base 5: mod_base = OTHER; note = 2'-O-methyluridine-3'-phosphate
  modified_base 6: mod_base = OTHER; note = 2'-fluorocytidine-3'-phosphate
  modified_base 7: mod_base = OTHER; note = 2'-O-methyluridine-3'-phosphate
  modified_base 8: mod_base = OTHER; note = 2'-fluoroguanosine-3'-phosphate
  modified_base 9: mod_base = OTHER; note = 2'-fluoroadenosine-3'-phosphate
  modified_base 10: mod_base = OTHER; note = 2'-O-methyladenosine-3'-phosphate
  modified_base 11: mod_base = OTHER; note = 2'-O-methyluridine-3'-phosphate
  modified_base 12: mod_base = OTHER; note = 2'-O-methylcytidine-3'-phosphate
  modified_base 13: mod_base = OTHER; note = 2'-O-methyluridine-3'-phosphate
  modified_base 14: mod_base = OTHER; note = 2'-fluoroadenosine-3'-phosphate
  modified_base 15: mod_base = OTHER; note = 2'-O-methyladenosine-3'-phosphate
  modified_base 16: mod_base = OTHER; note = 2'-fluorouridine-3'-phosphate
  modified_base 17: mod_base = OTHER; note = 2'-O-methyluridine-3'-phosphate
  modified_base 18: mod_base = OTHER; note = 2'-O-methyluridine-3'-phosphate
  modified_base 19: mod_base = OTHER; note = 2'-O-methyluridine-3'-phosphate
  modified_base 20: mod_base = OTHER; note = 2'-O-methylcytidine-3'-phosphate
  modified_base 21: mod_base = OTHER; note = 2'-O-methyluridine-3'-phosphorothioate
  modified_base 22: mod_base = OTHER; note = 2'-O-methylguanosine-3'-phosphorothioate
  modified_base 23: mod_base = OTHER; note = 2'-O-methyluridine-3'-phosphate
tagatctgaatctaattttctgt

SEQ ID NO: 1839 - RNA, 23 nt, synthetic construct
  source 1..23: mol_type = other RNA
  modified_base 1: mod_base = OTHER; note = Vinyl-phosphonate 2'-O-methyluridine-3'-phosphorothioate
  modified_base 2: mod_base = OTHER; note = 2'-fluorouridine -3'-phosphorothioate
  modified_base 3: mod_base = OTHER; note = 2'-O-methyladenosine-3'-phosphate
  modified_base 4: mod_base = OTHER; note = 2'-O-methylcytidine-3'-phosphate
  modified_base 5: mod_base = OTHER; note = 2'-O-methyluridine-3'-phosphate
  modified_base 6: mod_base = OTHER; note = 2'-fluorouridine-3'-phosphate
  modified_base 7: mod_base = OTHER; note = 2'-O-methyluridine-3'-phosphate
  modified_base 8: mod_base = OTHER; note = 2'-fluorocytidine-3'-phosphate
  modified_base 9: mod_base = OTHER; note = 2'-fluorouridine-3'-phosphate
  modified_base 10: mod_base = OTHER; note = 2'-O-methyluridine-3'-phosphate
  modified_base 11: mod_base = OTHER; note = 2'-O-methyladenosine-3'-phosphate
  modified_base 12: mod_base = OTHER; note = 2'-O-methyladenosine-3'-phosphate
  modified_base 13: mod_base = OTHER; note = 2'-O-methyluridine-3'-phosphate
  modified_base 14: mod_base = OTHER; note = 2'-fluorouridine-3'-phosphate
  modified_base 15: mod_base = OTHER; note = 2'-O-methyluridine-3'-phosphate
  modified_base 16: mod_base = OTHER; note = 2'-fluorouridine-3'-phosphate
  modified_base 17: mod_base = OTHER; note = 2'-O-methylcytidine-3'-phosphate
  modified_base 18: mod_base = OTHER; note = 2'-O-methylcytidine-3'-phosphate
  modified_base 19: mod_base = OTHER; note = 2'-O-methyladenosine-3'-phosphate
  modified_base 20: mod_base = OTHER; note = 2'-O-methylguanosine-3'-phosphate
  modified_base 21: mod_base = OTHER; note = 2'-O-methyluridine-3'-phosphorothioate
  modified_base 22: mod_base = OTHER; note = 2'-O-methylguanosine-3'-phosphorothioate
  modified_base 23: mod_base = OTHER; note = 2'-O-methylguanosine-3'-phosphate
ttactttcttaattttccagtgg

SEQ ID NO: 1840 - RNA, 23 nt, synthetic construct
  source 1..23: mol_type = other RNA
  modified_base 1: mod_base = OTHER; note = Vinyl-phosphonate 2'-O-methyluridine-3'-phosphorothioate
  modified_base 2: mod_base = OTHER; note = 2'-fluorouridine -3'-phosphorothioate
  modified_base 3: mod_base = OTHER; note = 2'-O-methyluridine-3'-phosphate
  modified_base 4: mod_base = OTHER; note = 2'-O-methyladenosine-3'-phosphate
  modified_base 5: mod_base = OTHER; note = 2'-O-methyluridine-3'-phosphate
  modified_base 6: mod_base = OTHER; note = 2'-fluorouridine-3'-phosphate
  modified_base 7: mod_base = OTHER; note = 2'-O-methyladenosine-3'-phosphate
  modified_base 8: mod_base = OTHER; note = 2'-fluorouridine-3'-phosphate
  modified_base 9: mod_base = OTHER; note = 2'-fluorocytidine-3'-phosphate
  modified_base 10: mod_base = OTHER; note = 2'-O-methyluridine-3'-phosphate
  modified_base 11: mod_base = OTHER; note = 2'-O-methyluridine-3'-phosphate
  modified_base 12: mod_base = OTHER; note = 2'-O-methyluridine-3'-phosphate
  modified_base 13: mod_base = OTHER; note = 2'-O-methylcytidine-3'-phosphate
  modified_base 14: mod_base = OTHER; note = 2'-fluorocytidine-3'-phosphate
  modified_base 15: mod_base = OTHER; note = 2'-O-methylcytidine-3'-phosphate
  modified_base 16: mod_base = OTHER; note = 2'-fluoroadenosine-3'-phosphate
  modified_base 17: mod_base = OTHER; note = 2'-O-methylcytidine-3'-phosphate
  modified_base 18: mod_base = OTHER; note = 2'-O-methyluridine-3'-phosphate
  modified_base 19: mod_base = OTHER; note = 2'-O-methyluridine-3'-phosphate
  modified_base 20: mod_base = OTHER; note = 2'-O-methyluridine-3'-phosphate
  modified_base 21: mod_base = OTHER; note = 2'-O-methyladenosine-3'-phosphorothioate
  modified_base 22: mod_base = OTHER; note = 2'-O-methylcytidine-3'-phosphorothioate
  modified_base 23: mod_base = OTHER; note = 2'-O-methyladenosine-3'-phosphate
tttattatctttcccactttaca

SEQ ID NO: 1841 - RNA, 23 nt, synthetic construct
  source 1..23: mol_type = other RNA
  modified_base 1: mod_base = OTHER; note = Vinyl-phosphonate 2'-O-methyluridine-3'-phosphorothioate
  modified_base 2: mod_base = OTHER; note = 2'-fluoroadenosine-3'-phosphorothioate
  modified_base 3: mod_base = OTHER; note = 2'-O-methylcytidine-3'-phosphate
  modified_base 4: mod_base = OTHER; note = 2'-O-methyladenosine-3'-phosphate
  modified_base 5: mod_base = OTHER; note = 2'-O-methyladenosine-3'-phosphate
  modified_base 6: mod_base = OTHER; note = 2'-fluorocytidine-3'-phosphate
  modified_base 7: mod_base = OTHER; note = 2'-O-methyluridine-3'-phosphate
  modified_base 8: mod_base = OTHER; note = 2'-fluorocytidine-3'-phosphate
  modified_base 9: mod_base = OTHER; note = 2'-fluorouridine-3'-phosphate
  modified_base 10: mod_base = OTHER; note = 2'-O-methyluridine-3'-phosphate
  modified_base 11: mod_base = OTHER; note = 2'-O-methyluridine-3'-phosphate
  modified_base 12: mod_base = OTHER; note = 2'-O-methylcytidine-3'-phosphate
  modified_base 13: mod_base = OTHER; note = 2'-O-methyluridine-3'-phosphate
  modified_base 14: mod_base = OTHER; note = 2'-fluorouridine-3'-phosphate
  modified_base 15: mod_base = OTHER; note = 2'-O-methyladenosine-3'-phosphate
  modified_base 16: mod_base = OTHER; note = 2'-fluoroguanosine-3'-phosphate
  modified_base 17: mod_base = OTHER; note = 2'-O-methylcytidine-3'-phosphate
  modified_base 18: mod_base = OTHER; note = 2'-O-methylcytidine-3'-phosphate
  modified_base 19: mod_base = OTHER; note = 2'-O-methyluridine-3'-phosphate
  modified_base 20: mod_base = OTHER; note = 2'-O-methyladenosine-3'-phosphate
  modified_base 21: mod_base = OTHER; note = 2'-O-methylguanosine-3'-phosphorothioate
  modified_base 22: mod_base = OTHER; note = 2'-O-methyluridine-3'-phosphorothioate
  modified_base 23: mod_base = OTHER; note = 2'-O-methyluridine-3'-phosphate
tacaactctttcttagcctagtt

SEQ ID NO: 1842 - RNA, 23 nt, synthetic construct
  source 1..23: mol_type = other RNA
  modified_base 1: mod_base = OTHER; note = Vinyl-phosphonate 2'-O-methyluridine-3'-phosphorothioate
  modified_base 2: mod_base = OTHER; note = 2'-fluorouridine -3'-phosphorothioate
  modified_base 3: mod_base = OTHER; note = 2'-O-methyladenosine-3'-phosphate
  modified_base 4: mod_base = OTHER; note = 2'-O-methyluridine-3'-phosphate
  modified_base 5: mod_base = OTHER; note = 2'-O-methylcytidine-3'-phosphate
  modified_base 6: mod_base = OTHER; note = 2'-fluorocytidine-3'-phosphate
  modified_base 7: mod_base = OTHER; note = 2'-O-methyladenosine-3'-phosphate
  modified_base 8: mod_base = OTHER; note = 2'-fluorouridine-3'-phosphate
  modified_base 9: mod_base = OTHER; note = 2'-fluorouridine-3'-phosphate
  modified_base 10: mod_base = OTHER; note = 2'-O-methyladenosine-3'-phosphate
  modified_base 11: mod_base = OTHER; note = 2'-O-methyladenosine-3'-phosphate
  modified_base 12: mod_base = OTHER; note = 2'-O-methyluridine-3'-phosphate
  modified_base 13: mod_base = OTHER; note = 2'-O-methyluridine-3'-phosphate
  modified_base 14: mod_base = OTHER; note = 2'-fluorouridine-3'-phosphate
  modified_base 15: mod_base = OTHER; note = 2'-O-methyluridine-3'-phosphate
  modified_base 16: mod_base = OTHER; note = 2'-fluoroadenosine-3'-phosphate
  modified_base 17: mod_base = OTHER; note = 2'-O-methyluridine-3'-phosphate
  modified_base 18: mod_base = OTHER; note = 2'-O-methylcytidine-3'-phosphate
  modified_base 19: mod_base = OTHER; note = 2'-O-methyladenosine-3'-phosphate
  modified_base 20: mod_base = OTHER; note = 2'-O-methylguanosine-3'-phosphate
  modified_base 21: mod_base = OTHER; note = 2'-O-methylcytidine-3'-phosphorothioate
  modified_base 22: mod_base = OTHER; note = 2'-O-methyladenosine-3'-phosphorothioate
  modified_base 23: mod_base = OTHER; note = 2'-O-methylcytidine-3'-phosphate
ttatccattaattttatcagcac

SEQ ID NO: 1843 - RNA, 23 nt, synthetic construct
  source 1..23: mol_type = other RNA
  modified_base 1: mod_base = OTHER; note = Vinyl-phosphonate 2'-O-methyluridine-3'-phosphorothioate
  modified_base 2: mod_base = OTHER; note = 2'-fluoroguanosine-3'-phosphorothioate
  modified_base 3: mod_base = OTHER; note = 2'-O-methyladenosine-3'-phosphate
  modified_base 4: mod_base = OTHER; note = 2'-O-methylcytidine-3'-phosphate
  modified_base 5: mod_base = OTHER; note = 2'-O-methyladenosine-3'-phosphate
  modified_base 6: mod_base = OTHER; note = 2'-fluoroadenosine-3'-phosphate
  modified_base 7: mod_base = OTHER; note = 2'-O-methylcytidine-3'-phosphate
  modified_base 8: mod_base = OTHER; note = 2'-fluorouridine-3'-phosphate
  modified_base 9: mod_base = OTHER; note = 2'-fluoroadenosine-3'-phosphate
  modified_base 10: mod_base = OTHER; note = 2'-O-methyladenosine-3'-phosphate
  modified_base 11: mod_base = OTHER; note = 2'-O-methyladenosine-3'-phosphate
  modified_base 12: mod_base = OTHER; note = 2'-O-methylguanosine-3'-phosphate
  modified_base 13: mod_base = OTHER; note = 2'-O-methyladenosine-3'-phosphate
  modified_base 14: mod_base = OTHER; note = 2'-fluoroadenosine-3'-phosphate
  modified_base 15: mod_base = OTHER; note = 2'-O-methyladenosine-3'-phosphate
  modified_base 16: mod_base = OTHER; note = 2'-fluorouridine-3'-phosphate
  modified_base 17: mod_base = OTHER; note = 2'-O-methyladenosine-3'-phosphate
  modified_base 18: mod_base = OTHER; note = 2'-O-methylcytidine-3'-phosphate
  modified_base 19: mod_base = OTHER; note = 2'-O-methyladenosine-3'-phosphate
  modified_base 20: mod_base = OTHER; note = 2'-O-methylguanosine-3'-phosphate
  modified_base 21: mod_base = OTHER; note = 2'-O-methylguanosine-3'-phosphorothioate
  modified_base 22: mod_base = OTHER; note = 2'-O-methyladenosine-3'-phosphorothioate
  modified_base 23: mod_base = OTHER; note = 2'-O-methyladenosine-3'-phosphate
tgacaactaaagaaatacaggaa

SEQ ID NO: 1844 - RNA, 23 nt, synthetic construct
  source 1..23: mol_type = other RNA
  modified_base 1: mod_base = OTHER; note = Vinyl-phosphonate 2'-O-methyluridine-3'-phosphorothioate
  modified_base 2: mod_base = OTHER; note = 2'-fluorouridine -3'-phosphorothioate
  modified_base 3: mod_base = OTHER; note = 2'-O-methyluridine-3'-phosphate
  modified_base 4: mod_base = OTHER; note = 2'-O-methyluridine-3'-phosphate
  modified_base 5: mod_base = OTHER; note = 2'-O-methylguanosine-3'-phosphate
  modified_base 6: mod_base = OTHER; note = 2'-fluorouridine-3'-phosphate
  modified_base 7: mod_base = OTHER; note = 2'-O-methylcytidine-3'-phosphate
  modified_base 8: mod_base = OTHER; note = 2'-fluoroadenosine-3'-phosphate
  modified_base 9: mod_base = OTHER; note = 2'-fluoroadenosine-3'-phosphate
  modified_base 10: mod_base = OTHER; note = 2'-O-methyladenosine-3'-phosphate
  modified_base 11: mod_base = OTHER; note = 2'-O-methyladenosine-3'-phosphate
  modified_base 12: mod_base = OTHER; note = 2'-O-methylguanosine-3'-phosphate
  modified_base 13: mod_base = OTHER; note = 2'-O-methylcytidine-3'-phosphate
  modified_base 14: mod_base = OTHER; note = 2'-fluoroadenosine-3'-phosphate
  modified_base 15: mod_base = OTHER; note = 2'-O-methyladenosine-3'-phosphate
  modified_base 16: mod_base = OTHER; note = 2'-fluoroadenosine-3'-phosphate
  modified_base 17: mod_base = OTHER; note = 2'-O-methyladenosine-3'-phosphate
  modified_base 18: mod_base = OTHER; note = 2'-O-methylcytidine-3'-phosphate
  modified_base 19: mod_base = OTHER; note = 2'-O-methyladenosine-3'-phosphate
  modified_base 20: mod_base = OTHER; note = 2'-O-methyladenosine-3'-phosphate
  modified_base 21: mod_base = OTHER; note = 2'-O-methyladenosine-3'-phosphorothioate
  modified_base 22: mod_base = OTHER; note = 2'-O-methylguanosine-3'-phosphorothioate
  modified_base 23: mod_base = OTHER; note = 2'-O-methylcytidine-3'-phosphate
ttttgtcaaaagcaaaacaaagc

SEQ ID NO: 1845 - RNA, 23 nt, synthetic construct
  source 1..23: mol_type = other RNA
  modified_base 1: mod_base = OTHER; note = Vinyl-phosphonate 2'-O-methyluridine-3'-phosphorothioate
  modified_base 2: mod_base = OTHER; note = 2'-fluoroguanosine-3'-phosphorothioate
  modified_base 3: mod_base = OTHER; note = 2'-O-methylguanosine-3'-phosphate
  modified_base 4: mod_base = OTHER; note = 2'-O-methyladenosine-3'-phosphate
  modified_base 5: mod_base = OTHER; note = 2'-O-methylguanosine-3'-phosphate
  modified_base 6: mod_base = OTHER; note = 2'-fluoroadenosine-3'-phosphate
  modified_base 7: mod_base = OTHER; note = 2'-O-methyladenosine-3'-phosphate
  modified_base 8: mod_base = OTHER; note = 2'-fluorouridine-3'-phosphate
  modified_base 9: mod_base = OTHER; note = 2'-fluoroadenosine-3'-phosphate
  modified_base 10: mod_base = OTHER; note = 2'-O-methyluridine-3'-phosphate
  modified_base 11: mod_base = OTHER; note = 2'-O-methyluridine-3'-phosphate
  modified_base 12: mod_base = OTHER; note = 2'-O-methyluridine-3'-phosphate
  modified_base 13: mod_base = OTHER; note = 2'-O-methyluridine-3'-phosphate
  modified_base 14: mod_base = OTHER; note = 2'-fluorocytidine-3'-phosphate
  modified_base 15: mod_base = OTHER; note = 2'-O-methyladenosine-3'-phosphate
  modified_base 16: mod_base = OTHER; note = 2'-fluorocytidine-3'-phosphate
  modified_base 17: mod_base = OTHER; note = 2'-O-methyladenosine-3'-phosphate
  modified_base 18: mod_base = OTHER; note = 2'-O-methylguanosine-3'-phosphate
  modified_base 19: mod_base = OTHER; note = 2'-O-methylcytidine-3'-phosphate
  modified_base 20: mod_base = OTHER; note = 2'-O-methylcytidine-3'-phosphate
  modified_base 21: mod_base = OTHER; note = 2'-O-methyladenosine-3'-phosphorothioate
  modified_base 22: mod_base = OTHER; note = 2'-O-methylcytidine-3'-phosphorothioate
  modified_base 23: mod_base = OTHER; note = 2'-O-methyladenosine-3'-phosphate
tggagaatattttcacagccaca

SEQ ID NO: 1846 - RNA, 23 nt, synthetic construct
  source 1..23: mol_type = other RNA
  modified_base 1: mod_base = OTHER; note = Vinyl-phosphonate 2'-O-methyluridine-3'-phosphorothioate
  modified_base 2: mod_base = OTHER; note = 2'-fluoroadenosine-3'-phosphorothioate
  modified_base 3: mod_base = OTHER; note = 2'-O-methylguanosine-3'-phosphate
  modified_base 4: mod_base = OTHER; note = 2'-O-methyluridine-3'-phosphate
  modified_base 5: mod_base = OTHER; note = 2'-O-methylguanosine-3'-phosphate
  modified_base 6: mod_base = OTHER; note = 2'-fluorocytidine-3'-phosphate
  modified_base 7: mod_base = OTHER; note = 2'-O-methyluridine-3'-phosphate
  modified_base 8: mod_base = OTHER; note = 2'-fluoroadenosine-3'-phosphate
  modified_base 9: mod_base = OTHER; note = 2'-fluorouridine-3'-phosphate
  modified_base 10: mod_base = OTHER; note = 2'-O-methylguanosine-3'-phosphate
  modified_base 11: mod_base = OTHER; note = 2'-O-methylcytidine-3'-phosphate
  modified_base 12: mod_base = OTHER; note = 2'-O-methylcytidine-3'-phosphate
  modified_base 13: mod_base = OTHER; note = 2'-O-methyluridine-3'-phosphate
  modified_base 14: mod_base = OTHER; note = 2'-fluoroadenosine-3'-phosphate
  modified_base 15: mod_base = OTHER; note = 2'-O-methyladenosine-3'-phosphate
  modified_base 16: mod_base = OTHER; note = 2'-fluoroadenosine-3'-phosphate
  modified_base 17: mod_base = OTHER; note = 2'-O-methyladenosine-3'-phosphate
  modified_base 18: mod_base = OTHER; note = 2'-O-methyluridine-3'-phosphate
  modified_base 19: mod_base = OTHER; note = 2'-O-methyladenosine-3'-phosphate
  modified_base 20: mod_base = OTHER; note = 2'-O-methylguanosine-3'-phosphate
  modified_base 21: mod_base = OTHER; note = 2'-O-methyluridine-3'-phosphorothioate
  modified_base 22: mod_base = OTHER; note = 2'-O-methylguanosine-3'-phosphorothioate
  modified_base 23: mod_base = OTHER; note = 2'-O-methylcytidine-3'-phosphate
tagtgctatgcctaaaatagtgc

SEQ ID NO: 1847 - RNA, 23 nt, synthetic construct
  source 1..23: mol_type = other RNA
  modified_base 1: mod_base = OTHER; note = Vinyl-phosphonate 2'-O-methyluridine-3'-phosphorothioate
  modified_base 2: mod_base = OTHER; note = 2'-fluorocytidine-3'-phosphorothioate
  modified_base 3: mod_base = OTHER; note = 2'-O-methyladenosine-3'-phosphate
  modified_base 4: mod_base = OTHER; note = 2'-O-methylcytidine-3'-phosphate
  modified_base 5: mod_base = OTHER; note = 2'-O-methyluridine-3'-phosphate
  modified_base 6: mod_base = OTHER; note = 2'-fluorouridine-3'-phosphate
  modified_base 7: mod_base = OTHER; note = 2'-O-methyluridine-3'-phosphate
  modified_base 8: mod_base = OTHER; note = 2'-fluoroadenosine-3'-phosphate
  modified_base 9: mod_base = OTHER; note = 2'-fluorouridine-3'-phosphate
  modified_base 10: mod_base = OTHER; note = 2'-O-methyladenosine-3'-phosphate
  modified_base 11: mod_base = OTHER; note = 2'-O-methylcytidine-3'-phosphate
  modified_base 12: mod_base = OTHER; note = 2'-O-methyladenosine-3'-phosphate
  modified_base 13: mod_base = OTHER; note = 2'-O-methylguanosine-3'-phosphate
  modified_base 14: mod_base = OTHER; note = 2'-fluorouridine-3'-phosphate
  modified_base 15: mod_base = OTHER; note = 2'-O-methyladenosine-3'-phosphate
  modified_base 16: mod_base = OTHER; note = 2'-fluorocytidine-3'-phosphate
  modified_base 17: mod_base = OTHER; note = 2'-O-methyluridine-3'-phosphate
  modified_base 18: mod_base = OTHER; note = 2'-O-methylguanosine-3'-phosphate
  modified_base 19: mod_base = OTHER; note = 2'-O-methyladenosine-3'-phosphate
  modified_base 20: mod_base = OTHER; note = 2'-O-methyladenosine-3'-phosphate
  modified_base 21: mod_base = OTHER; note = 2'-O-methyladenosine-3'-phosphorothioate
  modified_base 22: mod_base = OTHER; note = 2'-O-methyladenosine-3'-phosphorothioate
  modified_base 23: mod_base = OTHER; note = 2'-O-methyluridine-3'-phosphate
tcactttatacagtactgaaaat

SEQ ID NO: 1848 - RNA, 23 nt, synthetic construct
  source 1..23: mol_type = other RNA
  modified_base 1: mod_base = OTHER; note = Vinyl-phosphonate 2'-O-methyluridine-3'-phosphorothioate
  modified_base 2: mod_base = OTHER; note = 2'-fluoroguanosine-3'-phosphorothioate
  modified_base 3: mod_base = OTHER; note = 2'-O-methylguanosine-3'-phosphate
  modified_base 4: mod_base = OTHER; note = 2'-O-methyladenosine-3'-phosphate
  modified_base 5: mod_base = OTHER; note = 2'-O-methyladenosine-3'-phosphate
  modified_base 6: mod_base = OTHER; note = 2'-fluoroadenosine-3'-phosphate
  modified_base 7: mod_base = OTHER; note = 2'-O-methylcytidine-3'-phosphate
  modified_base 8: mod_base = OTHER; note = 2'-fluoroadenosine-3'-phosphate
  modified_base 9: mod_base = OTHER; note = 2'-fluorouridine-3'-phosphate
  modified_base 10: mod_base = OTHER; note = 2'-O-methyladenosine-3'-phosphate
  modified_base 11: mod_base = OTHER; note = 2'-O-methylguanosine-3'-phosphate
  modified_base 12: mod_base = OTHER; note = 2'-O-methyladenosine-3'-phosphate
  modified_base 13: mod_base = OTHER; note = 2'-O-methyluridine-3'-phosphate
  modified_base 14: mod_base = OTHER; note = 2'-fluorouridine-3'-phosphate
  modified_base 15: mod_base = OTHER; note = 2'-O-methylguanosine-3'-phosphate
  modified_base 16: mod_base = OTHER; note = 2'-fluorocytidine-3'-phosphate
  modified_base 17: mod_base = OTHER; note = 2'-O-methyladenosine-3'-phosphate
  modified_base 18: mod_base = OTHER; note = 2'-O-methyluridine-3'-phosphate
  modified_base 19: mod_base = OTHER; note = 2'-O-methylcytidine-3'-phosphate
  modified_base 20: mod_base = OTHER; note = 2'-O-methyladenosine-3'-phosphate
  modified_base 21: mod_base = OTHER; note = 2'-O-methylcytidine-3'-phosphorothioate
  modified_base 22: mod_base = OTHER; note = 2'-O-methylcytidine-3'-phosphorothioate
  modified_base 23: mod_base = OTHER; note = 2'-O-methyluridine-3'-phosphate
tggaaacatagattgcatcacct

SEQ ID NO: 1849 - RNA, 23 nt, synthetic construct
  source 1..23: mol_type = other RNA
  modified_base 1: mod_base = OTHER; note = Vinyl-phosphonate 2'-O-methyluridine-3'-phosphorothioate
  modified_base 2: mod_base = OTHER; note = 2'-fluorouridine -3'-phosphorothioate
  modified_base 3: mod_base = OTHER; note = 2'-O-methyluridine-3'-phosphate
  modified_base 4: mod_base = OTHER; note = 2'-O-methylguanosine-3'-phosphate
  modified_base 5: mod_base = OTHER; note = 2'-O-methyladenosine-3'-phosphate
  modified_base 6: mod_base = OTHER; note = 2'-fluorouridine-3'-phosphate
  modified_base 7: mod_base = OTHER; note = 2'-O-methylguanosine-3'-phosphate
  modified_base 8: mod_base = OTHER; note = 2'-fluoroadenosine-3'-phosphate
  modified_base 9: mod_base = OTHER; note = 2'-fluoroguanosine-3'-phosphate
  modified_base 10: mod_base = OTHER; note = 2'-O-methyladenosine-3'-phosphate
  modified_base 11: mod_base = OTHER; note = 2'-O-methyluridine-3'-phosphate
  modified_base 12: mod_base = OTHER; note = 2'-O-methylcytidine-3'-phosphate
  modified_base 13: mod_base = OTHER; note = 2'-O-methyluridine-3'-phosphate
  modified_base 14: mod_base = OTHER; note = 2'-fluoroguanosine-3'-phosphate
  modified_base 15: mod_base = OTHER; note = 2'-O-methylcytidine-3'-phosphate
  modified_base 16: mod_base = OTHER; note = 2'-fluorocytidine-3'-phosphate
  modified_base 17: mod_base = OTHER; note = 2'-O-methyladenosine-3'-phosphate
  modified_base 18: mod_base = OTHER; note = 2'-O-methyladenosine-3'-phosphate
  modified_base 19: mod_base = OTHER; note = 2'-O-methyladenosine-3'-phosphate
  modified_base 20: mod_base = OTHER; note = 2'-O-methylcytidine-3'-phosphate
  modified_base 21: mod_base = OTHER; note = 2'-O-methyladenosine-3'-phosphorothioate
  modified_base 22: mod_base = OTHER; note = 2'-O-methyluridine-3'-phosphorothioate
  modified_base 23: mod_base = OTHER; note = 2'-O-methyluridine-3'-phosphate
tttgatgagatctgccaaacatt

SEQ ID NO: 1850 - RNA, 23 nt, synthetic construct
  source 1..23: mol_type = other RNA
  modified_base 1: mod_base = OTHER; note = Vinyl-phosphonate 2'-O-methyluridine-3'-phosphorothioate
  modified_base 2: mod_base = OTHER; note = 2'-fluorouridine -3'-phosphorothioate
  modified_base 3: mod_base = OTHER; note = 2'-O-methyluridine-3'-phosphate
  modified_base 4: mod_base = OTHER; note = 2'-O-methylcytidine-3'-phosphate
  modified_base 5: mod_base = OTHER; note = 2'-O-methyluridine-3'-phosphate
  modified_base 6: mod_base = OTHER; note = 2'-fluoroguanosine-3'-phosphate
  modified_base 7: mod_base = OTHER; note = 2'-O-methylguanosine-3'-phosphate
  modified_base 8: mod_base = OTHER; note = 2'-fluorouridine-3'-phosphate
  modified_base 9: mod_base = OTHER; note = 2'-fluorocytidine-3'-phosphate
  modified_base 10: mod_base = OTHER; note = 2'-O-methyladenosine-3'-phosphate
  modified_base 11: mod_base = OTHER; note = 2'-O-methylcytidine-3'-phosphate
  modified_base 12: mod_base = OTHER; note = 2'-O-methyladenosine-3'-phosphate
  modified_base 13: mod_base = OTHER; note = 2'-O-methyladenosine-3'-phosphate
  modified_base 14: mod_base = OTHER; note = 2'-fluoroadenosine-3'-phosphate
  modified_base 15: mod_base = OTHER; note = 2'-O-methylcytidine-3'-phosphate
  modified_base 16: mod_base = OTHER; note = 2'-fluoroadenosine-3'-phosphate
  modified_base 17: mod_base = OTHER; note = 2'-O-methyladenosine-3'-phosphate
  modified_base 18: mod_base = OTHER; note = 2'-O-methylcytidine-3'-phosphate
  modified_base 19: mod_base = OTHER; note = 2'-O-methylcytidine-3'-phosphate
  modified_base 20: mod_base = OTHER; note = 2'-O-methyluridine-3'-phosphate
  modified_base 21: mod_base = OTHER; note = 2'-O-methyluridine-3'-phosphorothioate
  modified_base 22: mod_base = OTHER; note = 2'-O-methyluridine-3'-phosphorothioate
  modified_base 23: mod_base = OTHER; note = 2'-O-methylcytidine-3'-phosphate
tttctggtcacaaacaacctttc

SEQ ID NO: 1851 - RNA, 23 nt, synthetic construct
  source 1..23: mol_type = other RNA
  modified_base 1: mod_base = OTHER; note = Vinyl-phosphonate 2'-O-methyluridine-3'-phosphorothioate
  modified_base 2: mod_base = OTHER; note = 2'-fluorouridine -3'-phosphorothioate
  modified_base 3: mod_base = OTHER; note = 2'-O-methyluridine-3'-phosphate
  modified_base 4: mod_base = OTHER; note = 2'-O-methylcytidine-3'-phosphate
  modified_base 5: mod_base = OTHER; note = 2'-O-methyluridine-3'-phosphate
  modified_base 6: mod_base = OTHER; note = 2'-fluorocytidine-3'-phosphate
  modified_base 7: mod_base = OTHER; note = 2'-O-methyladenosine-3'-phosphate
  modified_base 8: mod_base = OTHER; note = 2'-fluoroadenosine-3'-phosphate
  modified_base 9: mod_base = OTHER; note = 2'-fluoroadenosine-3'-phosphate
  modified_base 10: mod_base = OTHER; note = 2'-O-methyladenosine-3'-phosphate
  modified_base 11: mod_base = OTHER; note = 2'-O-methyluridine-3'-phosphate
  modified_base 12: mod_base = OTHER; note = 2'-O-methyladenosine-3'-phosphate
  modified_base 13: mod_base = OTHER; note = 2'-O-methyluridine-3'-phosphate
  modified_base 14: mod_base = OTHER; note = 2'-fluorouridine-3'-phosphate
  modified_base 15: mod_base = OTHER; note = 2'-O-methyluridine-3'-phosphate
  modified_base 16: mod_base = OTHER; note = 2'-fluorocytidine-3'-phosphate
  modified_base 17: mod_base = OTHER; note = 2'-O-methylcytidine-3'-phosphate
  modified_base 18: mod_base = OTHER; note = 2'-O-methyluridine-3'-phosphate
  modified_base 19: mod_base = OTHER; note = 2'-O-methyluridine-3'-phosphate
  modified_base 20: mod_base = OTHER; note = 2'-O-methylcytidine-3'-phosphate
  modified_base 21: mod_base = OTHER; note = 2'-O-methylcytidine-3'-phosphorothioate
  modified_base 22: mod_base = OTHER; note = 2'-O-methyluridine-3'-phosphorothioate
  modified_base 23: mod_base = OTHER; note = 2'-O-methyluridine-3'-phosphate
tttctcaaaatatttccttcctt

SEQ ID NO: 1852 - RNA, 23 nt, synthetic construct
  source 1..23: mol_type = other RNA
  modified_base 1: mod_base = OTHER; note = Vinyl-phosphonate 2'-O-methyluridine-3'-phosphorothioate
  modified_base 2: mod_base = OTHER; note = 2'-fluoroguanosine-3'-phosphorothioate
  modified_base 3: mod_base = OTHER; note = 2'-O-methyladenosine-3'-phosphate
  modified_base 4: mod_base = OTHER; note = 2'-O-methyladenosine-3'-phosphate
  modified_base 5: mod_base = OTHER; note = 2'-O-methylguanosine-3'-phosphate
  modified_base 6: mod_base = OTHER; note = 2'-fluoroadenosine-3'-phosphate
  modified_base 7: mod_base = OTHER; note = 2'-O-methylguanosine-3'-phosphate
  modified_base 8: mod_base = OTHER; note = 2'-fluorouridine-3'-phosphate
  modified_base 9: mod_base = OTHER; note = 2'-fluorocytidine-3'-phosphate
  modified_base 10: mod_base = OTHER; note = 2'-O-methyladenosine-3'-phosphate
  modified_base 11: mod_base = OTHER; note = 2'-O-methylcytidine-3'-phosphate
  modified_base 12: mod_base = OTHER; note = 2'-O-methylguanosine-3'-phosphate
  modified_base 13: mod_base = OTHER; note = 2'-O-methylcytidine-3'-phosphate
  modified_base 14: mod_base = OTHER; note = 2'-fluorouridine-3'-phosphate
  modified_base 15: mod_base = OTHER; note = 2'-O-methyladenosine-3'-phosphate
  modified_base 16: mod_base = OTHER; note = 2'-fluorocytidine-3'-phosphate
  modified_base 17: mod_base = OTHER; note = 2'-O-methylcytidine-3'-phosphate
  modified_base 18: mod_base = OTHER; note = 2'-O-methyladenosine-3'-phosphate
  modified_base 19: mod_base = OTHER; note = 2'-O-methyladenosine-3'-phosphate
  modified_base 20: mod_base = OTHER; note = 2'-O-methyladenosine-3'-phosphate
  modified_base 21: mod_base = OTHER; note = 2'-O-methyladenosine-3'-phosphorothioate
  modified_base 22: mod_base = OTHER; note = 2'-O-methylguanosine-3'-phosphorothioate
  modified_base 23: mod_base = OTHER; note = 2'-O-methyladenosine-3'-phosphate
tgaagagtcacgctaccaaaaga

SEQ ID NO: 1853 - RNA, 23 nt, synthetic construct
  source 1..23: mol_type = other RNA
  modified_base 1: mod_base = OTHER; note = Vinyl-phosphonate 2'-O-methyluridine-3'-phosphorothioate
  modified_base 2: mod_base = OTHER; note = 2'-fluorouridine -3'-phosphorothioate
  modified_base 3: mod_base = OTHER; note = 2'-O-methyluridine-3'-phosphate
  modified_base 4: mod_base = OTHER; note = 2'-O-methyluridine-3'-phosphate
  modified_base 5: mod_base = OTHER; note = 2'-O-methyladenosine-3'-phosphate
  modified_base 6: mod_base = OTHER; note = 2'-fluorocytidine-3'-phosphate
  modified_base 7: mod_base = OTHER; note = 2'-O-methyladenosine-3'-phosphate
  modified_base 8: mod_base = OTHER; note = 2'-fluorouridine-3'-phosphate
  modified_base 9: mod_base = OTHER; note = 2'-fluorocytidine-3'-phosphate
  modified_base 10: mod_base = OTHER; note = 2'-O-methyluridine-3'-phosphate
  modified_base 11: mod_base = OTHER; note = 2'-O-methyluridine-3'-phosphate
  modified_base 12: mod_base = OTHER; note = 2'-O-methyluridine-3'-phosphate
  modified_base 13: mod_base = OTHER; note = 2'-O-methyluridine-3'-phosphate
  modified_base 14: mod_base = OTHER; note = 2'-fluorocytidine-3'-phosphate
  modified_base 15: mod_base = OTHER; note = 2'-O-methylcytidine-3'-phosphate
  modified_base 16: mod_base = OTHER; note = 2'-fluorouridine-3'-phosphate
  modified_base 17: mod_base = OTHER; note = 2'-O-methylguanosine-3'-phosphate
  modified_base 18: mod_base = OTHER; note = 2'-O-methyluridine-3'-phosphate
  modified_base 19: mod_base = OTHER; note = 2'-O-methyluridine-3'-phosphate
  modified_base 20: mod_base = OTHER; note = 2'-O-methylcytidine-3'-phosphate
  modified_base 21: mod_base = OTHER; note = 2'-O-methyladenosine-3'-phosphorothioate
  modified_base 22: mod_base = OTHER; note = 2'-O-methyluridine-3'-phosphorothioate
  modified_base 23: mod_base = OTHER; note = 2'-O-methyluridine-3'-phosphate
ttttacatcttttcctgttcatt

SEQ ID NO: 1854 - RNA, 23 nt, synthetic construct
  source 1..23: mol_type = other RNA
  modified_base 1: mod_base = OTHER; note = Vinyl-phosphonate 2'-O-methyluridine-3'-phosphorothioate
  modified_base 2: mod_base = OTHER; note = 2'-fluorocytidine-3'-phosphorothioate
  modified_base 3: mod_base = OTHER; note = 2'-O-methylcytidine-3'-phosphate
  modified_base 4: mod_base = OTHER; note = 2'-O-methyladenosine-3'-phosphate
  modified_base 5: mod_base = OTHER; note = 2'-O-methyluridine-3'-phosphate
  modified_base 6: mod_base = OTHER; note = 2'-fluoroadenosine-3'-phosphate
  modified_base 7: mod_base = OTHER; note = 2'-O-methyluridine-3'-phosphate
  modified_base 8: mod_base = OTHER; note = 2'-fluoroadenosine-3'-phosphate
  modified_base 9: mod_base = OTHER; note = 2'-fluorocytidine-3'-phosphate
  modified_base 10: mod_base = OTHER; note = 2'-O-methylcytidine-3'-phosphate
  modified_base 11: mod_base = OTHER; note = 2'-O-methyluridine-3'-phosphate
  modified_base 12: mod_base = OTHER; note = 2'-O-methylcytidine-3'-phosphate
  modified_base 13: mod_base = OTHER; note = 2'-O-methyluridine-3'-phosphate
  modified_base 14: mod_base = OTHER; note = 2'-fluorouridine-3'-phosphate
  modified_base 15: mod_base = OTHER; note = 2'-O-methylguanosine-3'-phosphate
  modified_base 16: mod_base = OTHER; note = 2'-fluoroguanosine-3'-phosphate
  modified_base 17: mod_base = OTHER; note = 2'-O-methyluridine-3'-phosphate
  modified_base 18: mod_base = OTHER; note = 2'-O-methyluridine-3'-phosphate
  modified_base 19: mod_base = OTHER; note = 2'-O-methylcytidine-3'-phosphate
  modified_base 20: mod_base = OTHER; note = 2'-O-methylcytidine-3'-phosphate
  modified_base 21: mod_base = OTHER; note = 2'-O-methylcytidine-3'-phosphorothioate
  modified_base 22: mod_base = OTHER; note = 2'-O-methyladenosine-3'-phosphorothioate
  modified_base 23: mod_base = OTHER; note = 2'-O-methylcytidine-3'-phosphate
tccatatacctcttggttcccac

SEQ ID NO: 1855 - RNA, 23 nt, synthetic construct
  source 1..23: mol_type = other RNA
  modified_base 1: mod_base = OTHER; note = Vinyl-phosphonate 2'-O-methyluridine-3'-phosphorothioate
  modified_base 2: mod_base = OTHER; note = 2'-fluoroadenosine-3'-phosphorothioate
  modified_base 3: mod_base = OTHER; note = 2'-O-methyladenosine-3'-phosphate
  modified_base 4: mod_base = OTHER; note = 2'-O-methylguanosine-3'-phosphate
  modified_base 5: mod_base = OTHER; note = 2'-O-methyladenosine-3'-phosphate
  modified_base 6: mod_base = OTHER; note = 2'-fluorouridine-3'-phosphate
  modified_base 7: mod_base = OTHER; note = 2'-O-methyluridine-3'-phosphate
  modified_base 8: mod_base = OTHER; note = 2'-fluorouridine-3'-phosphate
  modified_base 9: mod_base = OTHER; note = 2'-fluoroguanosine-3'-phosphate
  modified_base 10: mod_base = OTHER; note = 2'-O-methylguanosine-3'-phosphate
  modified_base 11: mod_base = OTHER; note = 2'-O-methyladenosine-3'-phosphate
  modified_base 12: mod_base = OTHER; note = 2'-O-methylcytidine-3'-phosphate
  modified_base 13: mod_base = OTHER; note = 2'-O-methylcytidine-3'-phosphate
  modified_base 14: mod_base = OTHER; note = 2'-fluorouridine-3'-phosphate
  modified_base 15: mod_base = OTHER; note = 2'-O-methyladenosine-3'-phosphate
  modified_base 16: mod_base = OTHER; note = 2'-fluoroguanosine-3'-phosphate
  modified_base 17: mod_base = OTHER; note = 2'-O-methyluridine-3'-phosphate
  modified_base 18: mod_base = OTHER; note = 2'-O-methylguanosine-3'-phosphate
  modified_base 19: mod_base = OTHER; note = 2'-O-methylcytidine-3'-phosphate
  modified_base 20: mod_base = OTHER; note = 2'-O-methylcytidine-3'-phosphate
  modified_base 21: mod_base = OTHER; note = 2'-O-methyladenosine-3'-phosphorothioate
  modified_base 22: mod_base = OTHER; note = 2'-O-methylguanosine-3'-phosphorothioate
  modified_base 23: mod_base = OTHER; note = 2'-O-methyluridine-3'-phosphate
taagatttggacctagtgccagt

SEQ ID NO: 1856 - RNA, 23 nt, synthetic construct
  source 1..23: mol_type = other RNA
  modified_base 1: mod_base = OTHER; note = Vinyl-phosphonate 2'-O-methyluridine-3'-phosphorothioate
  modified_base 2: mod_base = OTHER; note = 2'-fluoroadenosine-3'-phosphorothioate
  modified_base 3: mod_base = OTHER; note = 2'-O-methyladenosine-3'-phosphate
  modified_base 4: mod_base = OTHER; note = 2'-O-methyluridine-3'-phosphate
  modified_base 5: mod_base = OTHER; note = 2'-O-methylcytidine-3'-phosphate
  modified_base 6: mod_base = OTHER; note = 2'-fluorouridine-3'-phosphate
  modified_base 7: mod_base = OTHER; note = 2'-O-methylcytidine-3'-phosphate
  modified_base 8: mod_base = OTHER; note = 2'-fluorocytidine-3'-phosphate
  modified_base 9: mod_base = OTHER; note = 2'-fluoroadenosine-3'-phosphate
  modified_base 10: mod_base = OTHER; note = 2'-O-methyluridine-3'-phosphate
  modified_base 11: mod_base = OTHER; note = 2'-O-methyladenosine-3'-phosphate
  modified_base 12: mod_base = OTHER; note = 2'-O-methyluridine-3'-phosphate
  modified_base 13: mod_base = OTHER; note = 2'-O-methylguanosine-3'-phosphate
  modified_base 14: mod_base = OTHER; note = 2'-fluoroadenosine-3'-phosphate
  modified_base 15: mod_base = OTHER; note = 2'-O-methyladenosine-3'-phosphate
  modified_base 16: mod_base = OTHER; note = 2'-fluoroguanosine-3'-phosphate
  modified_base 17: mod_base = OTHER; note = 2'-O-methylguanosine-3'-phosphate
  modified_base 18: mod_base = OTHER; note = 2'-O-methyluridine-3'-phosphate
  modified_base 19: mod_base = OTHER; note = 2'-O-methylguanosine-3'-phosphate
  modified_base 20: mod_base = OTHER; note = 2'-O-methyluridine-3'-phosphate
  modified_base 21: mod_base = OTHER; note = 2'-O-methylguanosine-3'-phosphorothioate
  modified_base 22: mod_base = OTHER; note = 2'-O-methylcytidine-3'-phosphorothioate
  modified_base 23: mod_base = OTHER; note = 2'-O-methylcytidine-3'-phosphate
taatctccatatgaaggtgtgcc

SEQ ID NO: 1857 - RNA, 23 nt, synthetic construct
  source 1..23: mol_type = other RNA
  modified_base 1: mod_base = OTHER; note = Vinyl-phosphonate 2'-O-methyluridine-3'-phosphorothioate
  modified_base 2: mod_base = OTHER; note = 2'-fluoroguanosine-3'-phosphorothioate
  modified_base 3: mod_base = OTHER; note = 2'-O-methylcytidine-3'-phosphate
  modified_base 4: mod_base = OTHER; note = 2'-O-methyluridine-3'-phosphate
  modified_base 5: mod_base = OTHER; note = 2'-O-methyladenosine-3'-phosphate
  modified_base 6: mod_base = OTHER; note = 2'-fluorouridine-3'-phosphate
  modified_base 7: mod_base = OTHER; note = 2'-O-methyluridine-3'-phosphate
  modified_base 8: mod_base = OTHER; note = 2'-fluorouridine-3'-phosphate
  modified_base 9: mod_base = OTHER; note = 2'-fluorocytidine-3'-phosphate
  modified_base 10: mod_base = OTHER; note = 2'-O-methylcytidine-3'-phosphate
  modified_base 11: mod_base = OTHER; note = 2'-O-methylcytidine-3'-phosphate
  modified_base 12: mod_base = OTHER; note = 2'-O-methyladenosine-3'-phosphate
  modified_base 13: mod_base = OTHER; note = 2'-O-methylguanosine-3'-phosphate
  modified_base 14: mod_base = OTHER; note = 2'-fluorouridine-3'-phosphate
  modified_base 15: mod_base = OTHER; note = 2'-O-methyladenosine-3'-phosphate
  modified_base 16: mod_base = OTHER; note = 2'-fluoroadenosine-3'-phosphate
  modified_base 17: mod_base = OTHER; note = 2'-O-methyladenosine-3'-phosphate
  modified_base 18: mod_base = OTHER; note = 2'-O-methylcytidine-3'-phosphate
  modified_base 19: mod_base = OTHER; note = 2'-O-methylcytidine-3'-phosphate
  modified_base 20: mod_base = OTHER; note = 2'-O-methyladenosine-3'-phosphate
  modified_base 21: mod_base = OTHER; note = 2'-O-methylguanosine-3'-phosphorothioate
  modified_base 22: mod_base = OTHER; note = 2'-O-methyladenosine-3'-phosphorothioate
  modified_base 23: mod_base = OTHER; note = 2'-O-methylcytidine-3'-phosphate
tgctatttcccagtaaaccagac

SEQ ID NO: 1858 - RNA, 23 nt, synthetic construct
  source 1..23: mol_type = other RNA
  modified_base 1: mod_base = OTHER; note = Vinyl-phosphonate 2'-O-methyluridine-3'-phosphorothioate
  modified_base 2: mod_base = OTHER; note = 2'-fluorouridine -3'-phosphorothioate
  modified_base 3: mod_base = OTHER; note = 2'-O-methyluridine-3'-phosphate
  modified_base 4: mod_base = OTHER; note = 2'-O-methyladenosine-3'-phosphate
  modified_base 5: mod_base = OTHER; note = 2'-O-methyluridine-3'-phosphate
  modified_base 6: mod_base = OTHER; note = 2'-fluoroadenosine-3'-phosphate
  modified_base 7: mod_base = OTHER; note = 2'-O-methyluridine-3'-phosphate
  modified_base 8: mod_base = OTHER; note = 2'-fluoroadenosine-3'-phosphate
  modified_base 9: mod_base = OTHER; note = 2'-fluorocytidine-3'-phosphate
  modified_base 10: mod_base = OTHER; note = 2'-O-methyladenosine-3'-phosphate
  modified_base 11: mod_base = OTHER; note = 2'-O-methyluridine-3'-phosphate
  modified_base 12: mod_base = OTHER; note = 2'-O-methyluridine-3'-phosphate
  modified_base 13: mod_base = OTHER; note = 2'-O-methylcytidine-3'-phosphate
  modified_base 14: mod_base = OTHER; note = 2'-fluorocytidine-3'-phosphate
  modified_base 15: mod_base = OTHER; note = 2'-O-methyluridine-3'-phosphate
  modified_base 16: mod_base = OTHER; note = 2'-fluorouridine-3'-phosphate
  modified_base 17: mod_base = OTHER; note = 2'-O-methyluridine-3'-phosphate
  modified_base 18: mod_base = OTHER; note = 2'-O-methylguanosine-3'-phosphate
  modified_base 19: mod_base = OTHER; note = 2'-O-methylguanosine-3'-phosphate
  modified_base 20: mod_base = OTHER; note = 2'-O-methylguanosine-3'-phosphate
  modified_base 21: mod_base = OTHER; note = 2'-O-methylcytidine-3'-phosphorothioate
  modified_base 22: mod_base = OTHER; note = 2'-O-methylcytidine-3'-phosphorothioate
  modified_base 23: mod_base = OTHER; note = 2'-O-methyluridine-3'-phosphate
tttatatacattcctttgggcct

SEQ ID NO: 1859 - RNA, 23 nt, synthetic construct
  source 1..23: mol_type = other RNA
  modified_base 1: mod_base = OTHER; note = Vinyl-phosphonate 2'-O-methyluridine-3'-phosphorothioate
  modified_base 2: mod_base = OTHER; note = 2'-fluorocytidine-3'-phosphorothioate
  modified_base 3: mod_base = OTHER; note = 2'-O-methyladenosine-3'-phosphate
  modified_base 4: mod_base = OTHER; note = 2'-O-methylguanosine-3'-phosphate
  modified_base 5: mod_base = OTHER; note = 2'-O-methyluridine-3'-phosphate
  modified_base 6: mod_base = OTHER; note = 2'-fluoroadenosine-3'-phosphate
  modified_base 7: mod_base = OTHER; note = 2'-O-methyladenosine-3'-phosphate
  modified_base 8: mod_base = OTHER; note = 2'-fluoroadenosine-3'-phosphate
  modified_base 9: mod_base = OTHER; note = 2'-fluorocytidine-3'-phosphate
  modified_base 10: mod_base = OTHER; note = 2'-O-methyluridine-3'-phosphate
  modified_base 11: mod_base = OTHER; note = 2'-O-methylcytidine-3'-phosphate
  modified_base 12: mod_base = OTHER; note = 2'-O-methyluridine-3'-phosphate
  modified_base 13: mod_base = OTHER; note = 2'-O-methyluridine-3'-phosphate
  modified_base 14: mod_base = OTHER; note = 2'-fluoroguanosine-3'-phosphate
  modified_base 15: mod_base = OTHER; note = 2'-O-methylcytidine-3'-phosphate
  modified_base 16: mod_base = OTHER; note = 2'-fluoroadenosine-3'-phosphate
  modified_base 17: mod_base = OTHER; note = 2'-O-methylguanosine-3'-phosphate
  modified_base 18: mod_base = OTHER; note = 2'-O-methyluridine-3'-phosphate
  modified_base 19: mod_base = OTHER; note = 2'-O-methyluridine-3'-phosphate
  modified_base 20: mod_base = OTHER; note = 2'-O-methyladenosine-3'-phosphate
  modified_base 21: mod_base = OTHER; note = 2'-O-methyladenosine-3'-phosphorothioate
  modified_base 22: mod_base = OTHER; note = 2'-O-methyladenosine-3'-phosphorothioate
  modified_base 23: mod_base = OTHER; note = 2'-O-methyladenosine-3'-phosphate
tcagtaaactcttgcagttaaaa

SEQ ID NO: 1860 - RNA, 23 nt, synthetic construct
  source 1..23: mol_type = other RNA
  modified_base 1: mod_base = OTHER; note = Vinyl-phosphonate 2'-O-methyluridine-3'-phosphorothioate
  modified_base 2: mod_base = OTHER; note = 2'-fluorouridine -3'-phosphorothioate
  modified_base 3: mod_base = OTHER; note = 2'-O-methyluridine-3'-phosphate
  modified_base 4: mod_base = OTHER; note = 2'-O-methylguanosine-3'-phosphate
  modified_base 5: mod_base = OTHER; note = 2'-O-methylcytidine-3'-phosphate
  modified_base 6: mod_base = OTHER; note = 2'-fluoroadenosine-3'-phosphate
  modified_base 7: mod_base = OTHER; note = 2'-O-methylcytidine-3'-phosphate
  modified_base 8: mod_base = OTHER; note = 2'-fluorouridine-3'-phosphate
  modified_base 9: mod_base = OTHER; note = 2'-fluorocytidine-3'-phosphate
  modified_base 10: mod_base = OTHER; note = 2'-O-methyladenosine-3'-phosphate
  modified_base 11: mod_base = OTHER; note = 2'-O-methylguanosine-3'-phosphate
  modified_base 12: mod_base = OTHER; note = 2'-O-methyladenosine-3'-phosphate
  modified_base 13: mod_base = OTHER; note = 2'-O-methylguanosine-3'-phosphate
  modified_base 14: mod_base = OTHER; note = 2'-fluoroadenosine-3'-phosphate
  modified_base 15: mod_base = OTHER; note = 2'-O-methylguanosine-3'-phosphate
  modified_base 16: mod_base = OTHER; note = 2'-fluorouridine-3'-phosphate
  modified_base 17: mod_base = OTHER; note = 2'-O-methylguanosine-3'-phosphate
  modified_base 18: mod_base = OTHER; note = 2'-O-methylguanosine-3'-phosphate
  modified_base 19: mod_base = OTHER; note = 2'-O-methyluridine-3'-phosphate
  modified_base 20: mod_base = OTHER; note = 2'-O-methyluridine-3'-phosphate
  modified_base 21: mod_base = OTHER; note = 2'-O-methylcytidine-3'-phosphorothioate
  modified_base 22: mod_base = OTHER; note = 2'-O-methylcytidine-3'-phosphorothioate
  modified_base 23: mod_base = OTHER; note = 2'-O-methyluridine-3'-phosphate
tttgcactcagagagtggttcct

SEQ ID NO: 1861 - RNA, 23 nt, synthetic construct
  source 1..23: mol_type = other RNA
  modified_base 1: mod_base = OTHER; note = Vinyl-phosphonate 2'-O-methyluridine-3'-phosphorothioate
  modified_base 2: mod_base = OTHER; note = 2'-fluoroadenosine-3'-phosphorothioate
  modified_base 3: mod_base = OTHER; note = 2'-O-methyluridine-3'-phosphate
  modified_base 4: mod_base = OTHER; note = 2'-O-methylguanosine-3'-phosphate
  modified_base 5: mod_base = OTHER; note = 2'-O-methylcytidine-3'-phosphate
  modified_base 6: mod_base = OTHER; note = 2'-fluorocytidine-3'-phosphate
  modified_base 7: mod_base = OTHER; note = 2'-O-methyladenosine-3'-phosphate
  modified_base 8: mod_base = OTHER; note = 2'-fluoroguanosine-3'-phosphate
  modified_base 9: mod_base = OTHER; note = 2'-fluoroguanosine-3'-phosphate
  modified_base 10: mod_base = OTHER; note = 2'-O-methyladenosine-3'-phosphate
  modified_base 11: mod_base = OTHER; note = 2'-O-methyluridine-3'-phosphate
  modified_base 12: mod_base = OTHER; note = 2'-O-methylguanosine-3'-phosphate
  modified_base 13: mod_base = OTHER; note = 2'-O-methyladenosine-3'-phosphate
  modified_base 14: mod_base = OTHER; note = 2'-fluoroadenosine-3'-phosphate
  modified_base 15: mod_base = OTHER; note = 2'-O-methyladenosine-3'-phosphate
  modified_base 16: mod_base = OTHER; note = 2'-fluoroadenosine-3'-phosphate
  modified_base 17: mod_base = OTHER; note = 2'-O-methylguanosine-3'-phosphate
  modified_base 18: mod_base = OTHER; note = 2'-O-methyladenosine-3'-phosphate
  modified_base 19: mod_base = OTHER; note = 2'-O-methyluridine-3'-phosphate
  modified_base 20: mod_base = OTHER; note = 2'-O-methyladenosine-3'-phosphate
  modified_base 21: mod_base = OTHER; note = 2'-O-methyladenosine-3'-phosphorothioate
  modified_base 22: mod_base = OTHER; note = 2'-O-methyladenosine-3'-phosphorothioate
  modified_base 23: mod_base = OTHER; note = 2'-O-methylguanosine-3'-phosphate
tatgccaggatgaaaagataaag

SEQ ID NO: 1862 - RNA, 23 nt, synthetic construct
  source 1..23: mol_type = other RNA
  modified_base 1: mod_base = OTHER; note = Vinyl-phosphonate 2'-O-methyluridine-3'-phosphorothioate
  modified_base 2: mod_base = OTHER; note = 2'-fluoroguanosine-3'-phosphorothioate
  modified_base 3: mod_base = OTHER; note = 2'-O-methyluridine-3'-phosphate
  modified_base 4: mod_base = OTHER; note = 2'-O-methyluridine-3'-phosphate
  modified_base 5: mod_base = OTHER; note = 2'-O-methylguanosine-3'-phosphate
  modified_base 6: mod_base = OTHER; note = 2'-fluoroguanosine-3'-phosphate
  modified_base 7: mod_base = OTHER; note = 2'-O-methylcytidine-3'-phosphate
  modified_base 8: mod_base = OTHER; note = 2'-fluoroadenosine-3'-phosphate
  modified_base 9: mod_base = OTHER; note = 2'-fluorouridine-3'-phosphate
  modified_base 10: mod_base = OTHER; note = 2'-O-methyladenosine-3'-phosphate
  modified_base 11: mod_base = OTHER; note = 2'-O-methylcytidine-3'-phosphate
  modified_base 12: mod_base = OTHER; note = 2'-O-methylcytidine-3'-phosphate
  modified_base 13: mod_base = OTHER; note = 2'-O-methyladenosine-3'-phosphate
  modified_base 14: mod_base = OTHER; note = 2'-fluoroadenosine-3'-phosphate
  modified_base 15: mod_base = OTHER; note = 2'-O-methylcytidine-3'-phosphate
  modified_base 16: mod_base = OTHER; note = 2'-fluoroadenosine-3'-phosphate
  modified_base 17: mod_base = OTHER; note = 2'-O-methylcytidine-3'-phosphate
  modified_base 18: mod_base = OTHER; note = 2'-O-methyluridine-3'-phosphate
  modified_base 19: mod_base = OTHER; note = 2'-O-methylcytidine-3'-phosphate
  modified_base 20: mod_base = OTHER; note = 2'-O-methyladenosine-3'-phosphate
  modified_base 21: mod_base = OTHER; note = 2'-O-methylcytidine-3'-phosphorothioate
  modified_base 22: mod_base = OTHER; note = 2'-O-methylguanosine-3'-phosphorothioate
  modified_base 23: mod_base = OTHER; note = 2'-O-methylcytidine-3'-phosphate
tgttggcataccaacactcacgc

SEQ ID NO: 1863 - RNA, 23 nt, synthetic construct
  source 1..23: mol_type = other RNA
  modified_base 1: mod_base = OTHER; note = Vinyl-phosphonate 2'-O-methyluridine-3'-phosphorothioate
  modified_base 2: mod_base = OTHER; note = 2'-fluorouridine -3'-phosphorothioate
  modified_base 3: mod_base = OTHER; note = 2'-O-methyladenosine-3'-phosphate
  modified_base 4: mod_base = OTHER; note = 2'-O-methyluridine-3'-phosphate
  modified_base 5: mod_base = OTHER; note = 2'-O-methyluridine-3'-phosphate
  modified_base 6: mod_base = OTHER; note = 2'-fluorouridine-3'-phosphate
  modified_base 7: mod_base = OTHER; note = 2'-O-methyladenosine-3'-phosphate
  modified_base 8: mod_base = OTHER; note = 2'-fluoroguanosine-3'-phosphate
  modified_base 9: mod_base = OTHER; note = 2'-fluorocytidine-3'-phosphate
  modified_base 10: mod_base = OTHER; note = 2'-O-methylcytidine-3'-phosphate
  modified_base 11: mod_base = OTHER; note = 2'-O-methyladenosine-3'-phosphate
  modified_base 12: mod_base = OTHER; note = 2'-O-methyladenosine-3'-phosphate
  modified_base 13: mod_base = OTHER; note = 2'-O-methyladenosine-3'-phosphate
  modified_base 14: mod_base = OTHER; note = 2'-fluorouridine-3'-phosphate
  modified_base 15: mod_base = OTHER; note = 2'-O-methyladenosine-3'-phosphate
  modified_base 16: mod_base = OTHER; note = 2'-fluorocytidine-3'-phosphate
  modified_base 17: mod_base = OTHER; note = 2'-O-methyladenosine-3'-phosphate
  modified_base 18: mod_base = OTHER; note = 2'-O-methyluridine-3'-phosphate
  modified_base 19: mod_base = OTHER; note = 2'-O-methyluridine-3'-phosphate
  modified_base 20: mod_base = OTHER; note = 2'-O-methylcytidine-3'-phosphate
  modified_base 21: mod_base = OTHER; note = 2'-O-methyluridine-3'-phosphorothioate
  modified_base 22: mod_base = OTHER; note = 2'-O-methylcytidine-3'-phosphorothioate
  modified_base 23: mod_base = OTHER; note = 2'-O-methyladenosine-3'-phosphate
ttatttagccaaatacattctca

SEQ ID NO: 1864 - RNA, 23 nt, synthetic construct
  source 1..23: mol_type = other RNA
  modified_base 1: mod_base = OTHER; note = Vinyl-phosphonate 2'-O-methyluridine-3'-phosphorothioate
  modified_base 2: mod_base = OTHER; note = 2'-fluorouridine -3'-phosphorothioate
  modified_base 3: mod_base = OTHER; note = 2'-O-methylcytidine-3'-phosphate
  modified_base 4: mod_base = OTHER; note = 2'-O-methylcytidine-3'-phosphate
  modified_base 5: mod_base = OTHER; note = 2'-O-methyluridine-3'-phosphate
  modified_base 6: mod_base = OTHER; note = 2'-fluorocytidine-3'-phosphate
  modified_base 7: mod_base = OTHER; note = 2'-O-methyluridine-3'-phosphate
  modified_base 8: mod_base = OTHER; note = 2'-fluorouridine-3'-phosphate
  modified_base 9: mod_base = OTHER; note = 2'-fluoroadenosine-3'-phosphate
  modified_base 10: mod_base = OTHER; note = 2'-O-methyladenosine-3'-phosphate
  modified_base 11: mod_base = OTHER; note = 2'-O-methyluridine-3'-phosphate
  modified_base 12: mod_base = OTHER; note = 2'-O-methyladenosine-3'-phosphate
  modified_base 13: mod_base = OTHER; note = 2'-O-methyladenosine-3'-phosphate
  modified_base 14: mod_base = OTHER; note = 2'-fluoroadenosine-3'-phosphate
  modified_base 15: mod_base = OTHER; note = 2'-O-methyladenosine-3'-phosphate
  modified_base 16: mod_base = OTHER; note = 2'-fluoroguanosine-3'-phosphate
  modified_base 17: mod_base = OTHER; note = 2'-O-methylguanosine-3'-phosphate
  modified_base 18: mod_base = OTHER; note = 2'-O-methylguanosine-3'-phosphate
  modified_base 19: mod_base = OTHER; note = 2'-O-methyluridine-3'-phosphate
  modified_base 20: mod_base = OTHER; note = 2'-O-methyluridine-3'-phosphate
  modified_base 21: mod_base = OTHER; note = 2'-O-methylcytidine-3'-phosphorothioate
  modified_base 22: mod_base = OTHER; note = 2'-O-methylcytidine-3'-phosphorothioate
  modified_base 23: mod_base = OTHER; note = 2'-O-methyladenosine-3'-phosphate
ttcctcttaataaaagggttcca

SEQ ID NO: 1865 - RNA, 23 nt, synthetic construct
  source 1..23: mol_type = other RNA
  modified_base 1: mod_base = OTHER; note = Vinyl-phosphonate 2'-O-methyluridine-3'-phosphorothioate
  modified_base 2: mod_base = OTHER; note = 2'-fluoroadenosine-3'-phosphorothioate
  modified_base 3: mod_base = OTHER; note = 2'-O-methyluridine-3'-phosphate
  modified_base 4: mod_base = OTHER; note = 2'-O-methylcytidine-3'-phosphate
  modified_base 5: mod_base = OTHER; note = 2'-O-methylguanosine-3'-phosphate
  modified_base 6: mod_base = OTHER; note = 2'-fluorocytidine-3'-phosphate
  modified_base 7: mod_base = OTHER; note = 2'-O-methyladenosine-3'-phosphate
  modified_base 8: mod_base = OTHER; note = 2'-fluoroguanosine-3'-phosphate
  modified_base 9: mod_base = OTHER; note = 2'-fluorocytidine-3'-phosphate
  modified_base 10: mod_base = OTHER; note = 2'-O-methyluridine-3'-phosphate
  modified_base 11: mod_base = OTHER; note = 2'-O-methyladenosine-3'-phosphate
  modified_base 12: mod_base = OTHER; note = 2'-O-methyluridine-3'-phosphate
  modified_base 13: mod_base = OTHER; note = 2'-O-methylguanosine-3'-phosphate
  modified_base 14: mod_base = OTHER; note = 2'-fluoroguanosine-3'-phosphate
  modified_base 15: mod_base = OTHER; note = 2'-O-methyladenosine-3'-phosphate
  modified_base 16: mod_base = OTHER; note = 2'-fluorocytidine-3'-phosphate
  modified_base 17: mod_base = OTHER; note = 2'-O-methyladenosine-3'-phosphate
  modified_base 18: mod_base = OTHER; note = 2'-O-methylguanosine-3'-phosphate
  modified_base 19: mod_base = OTHER; note = 2'-O-methylguanosine-3'-phosphate
  modified_base 20: mod_base = OTHER; note = 2'-O-methyladenosine-3'-phosphate
  modified_base 21: mod_base = OTHER; note = 2'-O-methylguanosine-3'-phosphorothioate
  modified_base 22: mod_base = OTHER; note = 2'-O-methylguanosine-3'-phosphorothioate
  modified_base 23: mod_base = OTHER; note = 2'-O-methylcytidine-3'-phosphate
tatcgcagctatggacaggaggc

SEQ ID NO: 1866 - RNA, 23 nt, synthetic construct
  source 1..23: mol_type = other RNA
  modified_base 1: mod_base = OTHER; note = Vinyl-phosphonate 2'-O-methyluridine-3'-phosphorothioate
  modified_base 2: mod_base = OTHER; note = 2'-fluorocytidine-3'-phosphorothioate
  modified_base 3: mod_base = OTHER; note = 2'-O-methyluridine-3'-phosphate
  modified_base 4: mod_base = OTHER; note = 2'-O-methyluridine-3'-phosphate
  modified_base 5: mod_base = OTHER; note = 2'-O-methylcytidine-3'-phosphate
  modified_base 6: mod_base = OTHER; note = 2'-fluorocytidine-3'-phosphate
  modified_base 7: mod_base = OTHER; note = 2'-O-methyluridine-3'-phosphate
  modified_base 8: mod_base = OTHER; note = 2'-fluorouridine-3'-phosphate
  modified_base 9: mod_base = OTHER; note = 2'-fluoroadenosine-3'-phosphate
  modified_base 10: mod_base = OTHER; note = 2'-O-methyluridine-3'-phosphate
  modified_base 11: mod_base = OTHER; note = 2'-O-methyluridine-3'-phosphate
  modified_base 12: mod_base = OTHER; note = 2'-O-methyluridine-3'-phosphate
  modified_base 13: mod_base = OTHER; note = 2'-O-methylcytidine-3'-phosphate
  modified_base 14: mod_base = OTHER; note = 2'-fluoroadenosine-3'-phosphate
  modified_base 15: mod_base = OTHER; note = 2'-O-methyladenosine-3'-phosphate
  modified_base 16: mod_base = OTHER; note = 2'-fluorocytidine-3'-phosphate
  modified_base 17: mod_base = OTHER; note = 2'-O-methyluridine-3'-phosphate
  modified_base 18: mod_base = OTHER; note = 2'-O-methylcytidine-3'-phosphate
  modified_base 19: mod_base = OTHER; note = 2'-O-methyladenosine-3'-phosphate
  modified_base 20: mod_base = OTHER; note = 2'-O-methylguanosine-3'-phosphate
  modified_base 21: mod_base = OTHER; note = 2'-O-methyluridine-3'-phosphorothioate
  modified_base 22: mod_base = OTHER; note = 2'-O-methyladenosine-3'-phosphorothioate
  modified_base 23: mod_base = OTHER; note = 2'-O-methyladenosine-3'-phosphate
tcttccttatttcaactcagtaa

SEQ ID NO: 1867 - RNA, 23 nt, synthetic construct
  source 1..23: mol_type = other RNA
  modified_base 1: mod_base = OTHER; note = Vinyl-phosphonate 2'-O-methyluridine-3'-phosphorothioate
  modified_base 2: mod_base = OTHER; note = 2'-fluoroadenosine-3'-phosphorothioate
  modified_base 3: mod_base = OTHER; note = 2'-O-methyluridine-3'-phosphate
  modified_base 4: mod_base = OTHER; note = 2'-O-methylguanosine-3'-phosphate
  modified_base 5: mod_base = OTHER; note = 2'-O-methylcytidine-3'-phosphate
  modified_base 6: mod_base = OTHER; note = 2'-fluorouridine-3'-phosphate
  modified_base 7: mod_base = OTHER; note = 2'-O-methylcytidine-3'-phosphate
  modified_base 8: mod_base = OTHER; note = 2'-fluorocytidine-3'-phosphate
  modified_base 9: mod_base = OTHER; note = 2'-fluorouridine-3'-phosphate
  modified_base 10: mod_base = OTHER; note = 2'-O-methyluridine-3'-phosphate
  modified_base 11: mod_base = OTHER; note = 2'-O-methylcytidine-3'-phosphate
  modified_base 12: mod_base = OTHER; note = 2'-O-methyluridine-3'-phosphate
  modified_base 13: mod_base = OTHER; note = 2'-O-methylguanosine-3'-phosphate
  modified_base 14: mod_base = OTHER; note = 2'-fluorouridine-3'-phosphate
  modified_base 15: mod_base = OTHER; note = 2'-O-methyluridine-3'-phosphate
  modified_base 16: mod_base = OTHER; note = 2'-fluorouridine-3'-phosphate
  modified_base 17: mod_base = OTHER; note = 2'-O-methylguanosine-3'-phosphate
  modified_base 18: mod_base = OTHER; note = 2'-O-methylguanosine-3'-phosphate
  modified_base 19: mod_base = OTHER; note = 2'-O-methylcytidine-3'-phosphate
  modified_base 20: mod_base = OTHER; note = 2'-O-methyladenosine-3'-phosphate
  modified_base 21: mod_base = OTHER; note = 2'-O-methylguanosine-3'-phosphorothioate
  modified_base 22: mod_base = OTHER; note = 2'-O-methylguanosine-3'-phosphorothioate
  modified_base 23: mod_base = OTHER; note = 2'-O-methyluridine-3'-phosphate
tatgctccttctgtttggcaggt

SEQ ID NO: 1868 - RNA, 23 nt, synthetic construct
  source 1..23: mol_type = other RNA
  modified_base 1: mod_base = OTHER; note = Vinyl-phosphonate 2'-O-methyluridine-3'-phosphorothioate
  modified_base 2: mod_base = OTHER; note = 2'-fluoroguanosine-3'-phosphorothioate
  modified_base 3: mod_base = OTHER; note = 2'-O-methyladenosine-3'-phosphate
  modified_base 4: mod_base = OTHER; note = 2'-O-methylguanosine-3'-phosphate
  modified_base 5: mod_base = OTHER; note = 2'-O-methyluridine-3'-phosphate
  modified_base 6: mod_base = OTHER; note = 2'-fluoroguanosine-3'-phosphate
  modified_base 7: mod_base = OTHER; note = 2'-O-methylcytidine-3'-phosphate
  modified_base 8: mod_base = OTHER; note = 2'-fluorouridine-3'-phosphate
  modified_base 9: mod_base = OTHER; note = 2'-fluorouridine-3'-phosphate
  modified_base 10: mod_base = OTHER; note = 2'-O-methylcytidine-3'-phosphate
  modified_base 11: mod_base = OTHER; note = 2'-O-methyladenosine-3'-phosphate
  modified_base 12: mod_base = OTHER; note = 2'-O-methylcytidine-3'-phosphate
  modified_base 13: mod_base = OTHER; note = 2'-O-methyladenosine-3'-phosphate
  modified_base 14: mod_base = OTHER; note = 2'-fluoroadenosine-3'-phosphate
  modified_base 15: mod_base = OTHER; note = 2'-O-methylcytidine-3'-phosphate
  modified_base 16: mod_base = OTHER; note = 2'-fluorouridine-3'-phosphate
  modified_base 17: mod_base = OTHER; note = 2'-O-methyluridine-3'-phosphate
  modified_base 18: mod_base = OTHER; note = 2'-O-methyluridine-3'-phosphate
  modified_base 19: mod_base = OTHER; note = 2'-O-methylguanosine-3'-phosphate
  modified_base 20: mod_base = OTHER; note = 2'-O-methylcytidine-3'-phosphate
  modified_base 21: mod_base = OTHER; note = 2'-O-methylcytidine-3'-phosphorothioate
  modified_base 22: mod_base = OTHER; note = 2'-O-methyladenosine-3'-phosphorothioate
  modified_base 23: mod_base = OTHER; note = 2'-O-methylcytidine-3'-phosphate
tgagtgcttcacaactttgccac

SEQ ID NO: 1869 - RNA, 23 nt, synthetic construct
  source 1..23: mol_type = other RNA
  modified_base 1: mod_base = OTHER; note = Vinyl-phosphonate 2'-O-methyluridine-3'-phosphorothioate
  modified_base 2: mod_base = OTHER; note = 2'-fluorouridine -3'-phosphorothioate
  modified_base 3: mod_base = OTHER; note = 2'-O-methylcytidine-3'-phosphate
  modified_base 4: mod_base = OTHER; note = 2'-O-methyluridine-3'-phosphate
  modified_base 5: mod_base = OTHER; note = 2'-O-methyladenosine-3'-phosphate
  modified_base 6: mod_base = OTHER; note = 2'-fluoroadenosine-3'-phosphate
  modified_base 7: mod_base = OTHER; note = 2'-O-methyladenosine-3'-phosphate
  modified_base 8: mod_base = OTHER; note = 2'-fluorocytidine-3'-phosphate
  modified_base 9: mod_base = OTHER; note = 2'-fluorouridine-3'-phosphate
  modified_base 10: mod_base = OTHER; note = 2'-O-methyluridine-3'-phosphate
  modified_base 11: mod_base = OTHER; note = 2'-O-methylcytidine-3'-phosphate
  modified_base 12: mod_base = OTHER; note = 2'-O-methyladenosine-3'-phosphate
  modified_base 13: mod_base = OTHER; note = 2'-O-methyluridine-3'-phosphate
  modified_base 14: mod_base = OTHER; note = 2'-fluorocytidine-3'-phosphate
  modified_base 15: mod_base = OTHER; note = 2'-O-methyladenosine-3'-phosphate
  modified_base 16: mod_base = OTHER; note = 2'-fluorouridine-3'-phosphate
  modified_base 17: mod_base = OTHER; note = 2'-O-methylcytidine-3'-phosphate
  modified_base 18: mod_base = OTHER; note = 2'-O-methylcytidine-3'-phosphate
  modified_base 19: mod_base = OTHER; note = 2'-O-methyluridine-3'-phosphate
  modified_base 20: mod_base = OTHER; note = 2'-O-methyladenosine-3'-phosphate
  modified_base 21: mod_base = OTHER; note = 2'-O-methyluridine-3'-phosphorothioate
  modified_base 22: mod_base = OTHER; note = 2'-O-methyluridine-3'-phosphorothioate
  modified_base 23: mod_base = OTHER; note = 2'-O-methyluridine-3'-phosphate
ttctaaacttcatcatcctattt

SEQ ID NO: 1870 - RNA, 23 nt, synthetic construct
  source 1..23: mol_type = other RNA
  modified_base 1: mod_base = OTHER; note = Vinyl-phosphonate 2'-O-methyluridine-3'-phosphorothioate
  modified_base 2: mod_base = OTHER; note = 2'-fluorouridine -3'-phosphorothioate
  modified_base 3: mod_base = OTHER; note = 2'-O-methylguanosine-3'-phosphate
  modified_base 4: mod_base = OTHER; note = 2'-O-methylcytidine-3'-phosphate
  modified_base 5: mod_base = OTHER; note = 2'-O-methylcytidine-3'-phosphate
  modified_base 6: mod_base = OTHER; note = 2'-fluoroadenosine-3'-phosphate
  modified_base 7: mod_base = OTHER; note = 2'-O-methyluridine-3'-phosphate
  modified_base 8: mod_base = OTHER; note = 2'-fluorouridine-3'-phosphate
  modified_base 9: mod_base = OTHER; note = 2'-fluorouridine-3'-phosphate
  modified_base 10: mod_base = OTHER; note = 2'-O-methyluridine-3'-phosphate
  modified_base 11: mod_base = OTHER; note = 2'-O-methyladenosine-3'-phosphate
  modified_base 12: mod_base = OTHER; note = 2'-O-methyladenosine-3'-phosphate
  modified_base 13: mod_base = OTHER; note = 2'-O-methylguanosine-3'-phosphate
  modified_base 14: mod_base = OTHER; note = 2'-fluoroadenosine-3'-phosphate
  modified_base 15: mod_base = OTHER; note = 2'-O-methyluridine-3'-phosphate
  modified_base 16: mod_base = OTHER; note = 2'-fluoroadenosine-3'-phosphate
  modified_base 17: mod_base = OTHER; note = 2'-O-methylcytidine-3'-phosphate
  modified_base 18: mod_base = OTHER; note = 2'-O-methylguanosine-3'-phosphate
  modified_base 19: mod_base = OTHER; note = 2'-O-methyladenosine-3'-phosphate
  modified_base 20: mod_base = OTHER; note = 2'-O-methyladenosine-3'-phosphate
  modified_base 21: mod_base = OTHER; note = 2'-O-methyluridine-3'-phosphorothioate
  modified_base 22: mod_base = OTHER; note = 2'-O-methyladenosine-3'-phosphorothioate
  modified_base 23: mod_base = OTHER; note = 2'-O-methylcytidine-3'-phosphate
ttgccattttaagatacgaatac

SEQ ID NO: 1871 - RNA, 23 nt, synthetic construct
  source 1..23: mol_type = other RNA
  modified_base 1: mod_base = OTHER; note = Vinyl-phosphonate 2'-O-methyluridine-3'-phosphorothioate
  modified_base 2: mod_base = OTHER; note = 2'-fluoroadenosine-3'-phosphorothioate
  modified_base 3: mod_base = OTHER; note = 2'-O-methylcytidine-3'-phosphate
  modified_base 4: mod_base = OTHER; note = 2'-O-methylguanosine-3'-phosphate
  modified_base 5: mod_base = OTHER; note = 2'-O-methylcytidine-3'-phosphate
  modified_base 6: mod_base = OTHER; note = 2'-fluorouridine-3'-phosphate
  modified_base 7: mod_base = OTHER; note = 2'-O-methyladenosine-3'-phosphate
  modified_base 8: mod_base = OTHER; note = 2'-fluorouridine-3'-phosphate
  modified_base 9: mod_base = OTHER; note = 2'-fluorouridine-3'-phosphate
  modified_base 10: mod_base = OTHER; note = 2'-O-methyladenosine-3'-phosphate
  modified_base 11: mod_base = OTHER; note = 2'-O-methylcytidine-3'-phosphate
  modified_base 12: mod_base = OTHER; note = 2'-O-methylcytidine-3'-phosphate
  modified_base 13: mod_base = OTHER; note = 2'-O-methylcytidine-3'-phosphate
  modified_base 14: mod_base = OTHER; note = 2'-fluoroadenosine-3'-phosphate
  modified_base 15: mod_base = OTHER; note = 2'-O-methyladenosine-3'-phosphate
  modified_base 16: mod_base = OTHER; note = 2'-fluoroguanosine-3'-phosphate
  modified_base 17: mod_base = OTHER; note = 2'-O-methylcytidine-3'-phosphate
  modified_base 18: mod_base = OTHER; note = 2'-O-methyluridine-3'-phosphate
  modified_base 19: mod_base = OTHER; note = 2'-O-methylguanosine-3'-phosphate
  modified_base 20: mod_base = OTHER; note = 2'-O-methyluridine-3'-phosphate
  modified_base 21: mod_base = OTHER; note = 2'-O-methylguanosine-3'-phosphorothioate
  modified_base 22: mod_base = OTHER; note = 2'-O-methylcytidine-3'-phosphorothioate
  modified_base 23: mod_base = OTHER; note = 2'-O-methyluridine-3'-phosphate
tacgctattacccaagctgtgct

SEQ ID NO: 1872 - RNA, 23 nt, synthetic construct
  source 1..23: mol_type = other RNA
  modified_base 1: mod_base = OTHER; note = Vinyl-phosphonate 2'-O-methyluridine-3'-phosphorothioate
  modified_base 2: mod_base = OTHER; note = 2'-fluorocytidine-3'-phosphorothioate
  modified_base 3: mod_base = OTHER; note = 2'-O-methyladenosine-3'-phosphate
  modified_base 4: mod_base = OTHER; note = 2'-O-methylguanosine-3'-phosphate
  modified_base 5: mod_base = OTHER; note = 2'-O-methyluridine-3'-phosphate
  modified_base 6: mod_base = OTHER; note = 2'-fluoroguanosine-3'-phosphate
  modified_base 7: mod_base = OTHER; note = 2'-O-methyluridine-3'-phosphate
  modified_base 8: mod_base = OTHER; note = 2'-fluorouridine-3'-phosphate
  modified_base 9: mod_base = OTHER; note = 2'-fluoroadenosine-3'-phosphate
  modified_base 10: mod_base = OTHER; note = 2'-O-methyluridine-3'-phosphate
  modified_base 11: mod_base = OTHER; note = 2'-O-methylguanosine-3'-phosphate
  modified_base 12: mod_base = OTHER; note = 2'-O-methyluridine-3'-phosphate
  modified_base 13: mod_base = OTHER; note = 2'-O-methyluridine-3'-phosphate
  modified_base 14: mod_base = OTHER; note = 2'-fluoroguanosine-3'-phosphate
  modified_base 15: mod_base = OTHER; note = 2'-O-methyluridine-3'-phosphate
  modified_base 16: mod_base = OTHER; note = 2'-fluorouridine-3'-phosphate
  modified_base 17: mod_base = OTHER; note = 2'-O-methylguanosine-3'-phosphate
  modified_base 18: mod_base = OTHER; note = 2'-O-methylcytidine-3'-phosphate
  modified_base 19: mod_base = OTHER; note = 2'-O-methyladenosine-3'-phosphate
  modified_base 20: mod_base = OTHER; note = 2'-O-methyladenosine-3'-phosphate
  modified_base 21: mod_base = OTHER; note = 2'-O-methyladenosine-3'-phosphorothioate
  modified_base 22: mod_base = OTHER; note = 2'-O-methyladenosine-3'-phosphorothioate
  modified_base 23: mod_base = OTHER; note = 2'-O-methyladenosine-3'-phosphate
tcagtgttatgttgttgcaaaaa

SEQ ID NO: 1873 - RNA, 23 nt, synthetic construct
  source 1..23: mol_type = other RNA
  modified_base 1: mod_base = OTHER; note = Vinyl-phosphonate 2'-O-methyluridine-3'-phosphorothioate
  modified_base 2: mod_base = OTHER; note = 2'-fluorocytidine-3'-phosphorothioate
  modified_base 3: mod_base = OTHER; note = 2'-O-methyladenosine-3'-phosphate
  modified_base 4: mod_base = OTHER; note = 2'-O-methyladenosine-3'-phosphate
  modified_base 5: mod_base = OTHER; note = 2'-O-methyluridine-3'-phosphate
  modified_base 6: mod_base = OTHER; note = 2'-fluoroadenosine-3'-phosphate
  modified_base 7: mod_base = OTHER; note = 2'-O-methyladenosine-3'-phosphate
  modified_base 8: mod_base = OTHER; note = 2'-fluoroguanosine-3'-phosphate
  modified_base 9: mod_base = OTHER; note = 2'-fluorouridine-3'-phosphate
  modified_base 10: mod_base = OTHER; note = 2'-O-methylcytidine-3'-phosphate
  modified_base 11: mod_base = OTHER; note = 2'-O-methyladenosine-3'-phosphate
  modified_base 12: mod_base = OTHER; note = 2'-O-methylcytidine-3'-phosphate
  modified_base 13: mod_base = OTHER; note = 2'-O-methyladenosine-3'-phosphate
  modified_base 14: mod_base = OTHER; note = 2'-fluorouridine-3'-phosphate
  modified_base 15: mod_base = OTHER; note = 2'-O-methylguanosine-3'-phosphate
  modified_base 16: mod_base = OTHER; note = 2'-fluoroguanosine-3'-phosphate
  modified_base 17: mod_base = OTHER; note = 2'-O-methyluridine-3'-phosphate
  modified_base 18: mod_base = OTHER; note = 2'-O-methylguanosine-3'-phosphate
  modified_base 19: mod_base = OTHER; note = 2'-O-methylguanosine-3'-phosphate
  modified_base 20: mod_base = OTHER; note = 2'-O-methylcytidine-3'-phosphate
  modified_base 21: mod_base = OTHER; note = 2'-O-methyladenosine-3'-phosphorothioate
  modified_base 22: mod_base = OTHER; note = 2'-O-methyladenosine-3'-phosphorothioate
  modified_base 23: mod_base = OTHER; note = 2'-O-methyladenosine-3'-phosphate
tcaataagtcacatggtggcaaa

SEQ ID NO: 1874 - RNA, 23 nt, synthetic construct
  source 1..23: mol_type = other RNA
  modified_base 1: mod_base = OTHER; note = Vinyl-phosphonate 2'-O-methyluridine-3'-phosphorothioate
  modified_base 2: mod_base = OTHER; note = 2'-fluorouridine -3'-phosphorothioate
  modified_base 3: mod_base = OTHER; note = 2'-O-methyluridine-3'-phosphate
  modified_base 4: mod_base = OTHER; note = 2'-O-methyluridine-3'-phosphate
  modified_base 5: mod_base = OTHER; note = 2'-O-methylcytidine-3'-phosphate
  modified_base 6: mod_base = OTHER; note = 2'-fluorouridine-3'-phosphate
  modified_base 7: mod_base = OTHER; note = 2'-O-methylcytidine-3'-phosphate
  modified_base 8: mod_base = OTHER; note = 2'-fluoroadenosine-3'-phosphate
  modified_base 9: mod_base = OTHER; note = 2'-fluorouridine-3'-phosphate
  modified_base 10: mod_base = OTHER; note = 2'-O-methyluridine-3'-phosphate
  modified_base 11: mod_base = OTHER; note = 2'-O-methyluridine-3'-phosphate
  modified_base 12: mod_base = OTHER; note = 2'-O-methylcytidine-3'-phosphate
  modified_base 13: mod_base = OTHER; note = 2'-O-methylcytidine-3'-phosphate
  modified_base 14: mod_base = OTHER; note = 2'-fluorouridine-3'-phosphate
  modified_base 15: mod_base = OTHER; note = 2'-O-methylcytidine-3'-phosphate
  modified_base 16: mod_base = OTHER; note = 2'-fluorouridine-3'-phosphate
  modified_base 17: mod_base = OTHER; note = 2'-O-methyladenosine-3'-phosphate
  modified_base 18: mod_base = OTHER; note = 2'-O-methyluridine-3'-phosphate
  modified_base 19: mod_base = OTHER; note = 2'-O-methylcytidine-3'-phosphate
  modified_base 20: mod_base = OTHER; note = 2'-O-methylguanosine-3'-phosphate
  modified_base 21: mod_base = OTHER; note = 2'-O-methyladenosine-3'-phosphorothioate
  modified_base 22: mod_base = OTHER; note = 2'-O-methylguanosine-3'-phosphorothioate
  modified_base 23: mod_base = OTHER; note = 2'-O-methylguanosine-3'-phosphate
ttttctcatttcctctatcgagg

SEQ ID NO: 1875 - RNA, 23 nt, synthetic construct
  source 1..23: mol_type = other RNA
  modified_base 1: mod_base = OTHER; note = Vinyl-phosphonate 2'-O-methyluridine-3'-phosphorothioate
  modified_base 2: mod_base = OTHER; note = 2'-fluoroadenosine-3'-phosphorothioate
  modified_base 3: mod_base = OTHER; note = 2'-O-methyladenosine-3'-phosphate
  modified_base 4: mod_base = OTHER; note = 2'-O-methylguanosine-3'-phosphate
  modified_base 5: mod_base = OTHER; note = 2'-O-methyluridine-3'-phosphate
  modified_base 6: mod_base = OTHER; note = 2'-fluorocytidine-3'-phosphate
  modified_base 7: mod_base = OTHER; note = 2'-O-methylcytidine-3'-phosphate
  modified_base 8: mod_base = OTHER; note = 2'-fluorouridine-3'-phosphate
  modified_base 9: mod_base = OTHER; note = 2'-fluoroguanosine-3'-phosphate
  modified_base 10: mod_base = OTHER; note = 2'-O-methylcytidine-3'-phosphate
  modified_base 11: mod_base = OTHER; note = 2'-O-methyluridine-3'-phosphate
  modified_base 12: mod_base = OTHER; note = 2'-O-methyladenosine-3'-phosphate
  modified_base 13: mod_base = OTHER; note = 2'-O-methyladenosine-3'-phosphate
  modified_base 14: mod_base = OTHER; note = 2'-fluorocytidine-3'-phosphate
  modified_base 15: mod_base = OTHER; note = 2'-O-methyluridine-3'-phosphate
  modified_base 16: mod_base = OTHER; note = 2'-fluorouridine-3'-phosphate
  modified_base 17: mod_base = OTHER; note = 2'-O-methyladenosine-3'-phosphate
  modified_base 18: mod_base = OTHER; note = 2'-O-methyladenosine-3'-phosphate
  modified_base 19: mod_base = OTHER; note = 2'-O-methyladenosine-3'-phosphate
  modified_base 20: mod_base = OTHER; note = 2'-O-methyladenosine-3'-phosphate
  modified_base 21: mod_base = OTHER; note = 2'-O-methyladenosine-3'-phosphorothioate
  modified_base 22: mod_base = OTHER; note = 2'-O-methylguanosine-3'-phosphorothioate
  modified_base 23: mod_base = OTHER; note = 2'-O-methylguanosine-3'-phosphate
taagtcctgctaacttaaaaagg

SEQ ID NO: 1876 - RNA, 23 nt, synthetic construct
  source 1..23: mol_type = other RNA
  modified_base 1: mod_base = OTHER; note = Vinyl-phosphonate 2'-O-methyluridine-3'-phosphorothioate
  modified_base 2: mod_base = OTHER; note = 2'-fluorouridine -3'-phosphorothioate
  modified_base 3: mod_base = OTHER; note = 2'-O-methyladenosine-3'-phosphate
  modified_base 4: mod_base = OTHER; note = 2'-O-methylguanosine-3'-phosphate
  modified_base 5: mod_base = OTHER; note = 2'-O-methylguanosine-3'-phosphate
  modified_base 6: mod_base = OTHER; note = 2'-fluorocytidine-3'-phosphate
  modified_base 7: mod_base = OTHER; note = 2'-O-methyladenosine-3'-phosphate
  modified_base 8: mod_base = OTHER; note = 2'-fluoroguanosine-3'-phosphate
  modified_base 9: mod_base = OTHER; note = 2'-fluoroadenosine-3'-phosphate
  modified_base 10: mod_base = OTHER; note = 2'-O-methyluridine-3'-phosphate
  modified_base 11: mod_base = OTHER; note = 2'-O-methyladenosine-3'-phosphate
  modified_base 12: mod_base = OTHER; note = 2'-O-methyladenosine-3'-phosphate
  modified_base 13: mod_base = OTHER; note = 2'-O-methyluridine-3'-phosphate
  modified_base 14: mod_base = OTHER; note = 2'-fluorouridine-3'-phosphate
  modified_base 15: mod_base = OTHER; note = 2'-O-methyladenosine-3'-phosphate
  modified_base 16: mod_base = OTHER; note = 2'-fluorouridine-3'-phosphate
  modified_base 17: mod_base = OTHER; note = 2'-O-methyluridine-3'-phosphate
  modified_base 18: mod_base = OTHER; note = 2'-O-methyluridine-3'-phosphate
  modified_base 19: mod_base = OTHER; note = 2'-O-methyladenosine-3'-phosphate
  modified_base 20: mod_base = OTHER; note = 2'-O-methylcytidine-3'-phosphate
  modified_base 21: mod_base = OTHER; note = 2'-O-methyladenosine-3'-phosphorothioate
  modified_base 22: mod_base = OTHER; note = 2'-O-methyluridine-3'-phosphorothioate
  modified_base 23: mod_base = OTHER; note = 2'-O-methylcytidine-3'-phosphate
ttaggcagataattatttacatc

SEQ ID NO: 1877 - RNA, 23 nt, synthetic construct
  source 1..23: mol_type = other RNA
  modified_base 1: mod_base = OTHER; note = Vinyl-phosphonate 2'-O-methyluridine-3'-phosphorothioate
  modified_base 2: mod_base = OTHER; note = 2'-fluoroadenosine-3'-phosphorothioate
  modified_base 3: mod_base = OTHER; note = 2'-O-methyluridine-3'-phosphate
  modified_base 4: mod_base = OTHER; note = 2'-O-methyluridine-3'-phosphate
  modified_base 5: mod_base = OTHER; note = 2'-O-methyluridine-3'-phosphate
  modified_base 6: mod_base = OTHER; note = 2'-fluoroguanosine-3'-phosphate
  modified_base 7: mod_base = OTHER; note = 2'-O-methyladenosine-3'-phosphate
  modified_base 8: mod_base = OTHER; note = 2'-fluoroguanosine-3'-phosphate
  modified_base 9: mod_base = OTHER; note = 2'-fluoroguanosine-3'-phosphate
  modified_base 10: mod_base = OTHER; note = 2'-O-methylcytidine-3'-phosphate
  modified_base 11: mod_base = OTHER; note = 2'-O-methyladenosine-3'-phosphate
  modified_base 12: mod_base = OTHER; note = 2'-O-methylcytidine-3'-phosphate
  modified_base 13: mod_base = OTHER; note = 2'-O-methylguanosine-3'-phosphate
  modified_base 14: mod_base = OTHER; note = 2'-fluorouridine-3'-phosphate
  modified_base 15: mod_base = OTHER; note = 2'-O-methyladenosine-3'-phosphate
  modified_base 16: mod_base = OTHER; note = 2'-fluorocytidine-3'-phosphate
  modified_base 17: mod_base = OTHER; note = 2'-O-methyladenosine-3'-phosphate
  modified_base 18: mod_base = OTHER; note = 2'-O-methyladenosine-3'-phosphate
  modified_base 19: mod_base = OTHER; note = 2'-O-methylcytidine-3'-phosphate
  modified_base 20: mod_base = OTHER; note = 2'-O-methylcytidine-3'-phosphate
  modified_base 21: mod_base = OTHER; note = 2'-O-methyladenosine-3'-phosphorothioate
  modified_base 22: mod_base = OTHER; note = 2'-O-methyluridine-3'-phosphorothioate
  modified_base 23: mod_base = OTHER; note = 2'-O-methyladenosine-3'-phosphate
tatttgaggcacgtacaaccata

SEQ ID NO: 1878 - RNA, 23 nt, synthetic construct
  source 1..23: mol_type = other RNA
tcttttttcaaactccattcctt

SEQ ID NO: 1879 - RNA, 23 nt, synthetic construct
  source 1..23: mol_type = other RNA
taactttcatctgtcttcagatg

SEQ ID NO: 1880 - RNA, 23 nt, synthetic construct
  source 1..23: mol_type = other RNA
cacctcataacttctccagtaat

SEQ ID NO: 1881 - RNA, 23 nt, synthetic construct
  source 1..23: mol_type = other RNA
ccctcactatctttcaacattat

SEQ ID NO: 1882 - RNA, 23 nt, synthetic construct
  source 1..23: mol_type = other RNA
tactcgttaatgctctcatccac

SEQ ID NO: 1883 - RNA, 23 nt, synthetic construct
  source 1..23: mol_type = other RNA
ctgttcttcataatccactactg

SEQ ID NO: 1884 - RNA, 23 nt, synthetic construct
  source 1..23: mol_type = other RNA
gagttgacttcatccaatctcta

SEQ ID NO: 1885 - RNA, 23 nt, synthetic construct
  source 1..23: mol_type = other RNA
ttctacacaatgaacttcttaac

SEQ ID NO: 1886 - RNA, 23 nt, synthetic construct
  source 1..23: mol_type = other RNA
gtcacatctagaattcttaattt

SEQ ID NO: 1887 - RNA, 23 nt, synthetic construct
  source 1..23: mol_type = other RNA
agaaatctctcatagctttcttt

SEQ ID NO: 1888 - RNA, 23 nt, synthetic construct
  source 1..23: mol_type = other RNA
cacctactattgtagaattacta

SEQ ID NO: 1889 - RNA, 23 nt, synthetic construct
  source 1..23: mol_type = other RNA
tcatcttcttttagtgcattaaa

SEQ ID NO: 1890 - RNA, 23 nt, synthetic construct
  source 1..23: mol_type = other RNA
agctcatgtactcttctgattct

SEQ ID NO: 1891 - RNA, 23 nt, synthetic construct
  source 1..23: mol_type = other RNA
tctttctctttgtaccttggaat

SEQ ID NO: 1892 - RNA, 23 nt, synthetic construct
  source 1..23: mol_type = other RNA
tctggcttatacatcttcagaaa

SEQ ID NO: 1893 - RNA, 23 nt, synthetic construct
  source 1..23: mol_type = other RNA
aacaaaacaaaactactcctatt

SEQ ID NO: 1894 - RNA, 23 nt, synthetic construct
  source 1..23: mol_type = other RNA
ttactagcagaactcttatgaaa

SEQ ID NO: 1895 - RNA, 23 nt, synthetic construct
  source 1..23: mol_type = other RNA
tcccaagtcactctataattcct

SEQ ID NO: 1896 - RNA, 23 nt, synthetic construct
  source 1..23: mol_type = other RNA
tctccatttttcttgtcattatg

SEQ ID NO: 1897 - RNA, 23 nt, synthetic construct
  source 1..23: mol_type = other RNA
agcaacacctcaactcatctttt

SEQ ID NO: 1898 - RNA, 23 nt, synthetic construct
  source 1..23: mol_type = other RNA
aaactctgaaagatctgatttat

SEQ ID NO: 1899 - RNA, 23 nt, synthetic construct
  source 1..23: mol_type = other RNA
ttctagttcttttccgcaatgac

SEQ ID NO: 1900 - RNA, 23 nt, synthetic construct
  source 1..23: mol_type = other RNA
aactttcactctgaagaaatccg

SEQ ID NO: 1901 - RNA, 23 nt, synthetic construct
  source 1..23: mol_type = other RNA
tatctaacttttctctctttctc

SEQ ID NO: 1902 - RNA, 23 nt, synthetic construct
  source 1..23: mol_type = other RNA
tatctcaactttgtgtcaaagaa

SEQ ID NO: 1903 - RNA, 23 nt, synthetic construct
  source 1..23: mol_type = other RNA
gtcttcaataatcattcctttaa

SEQ ID NO: 1904 - RNA, 23 nt, synthetic construct
  source 1..23: mol_type = other RNA
cctaactgctcttcgtattaaga

SEQ ID NO: 1905 - RNA, 23 nt, synthetic construct
  source 1..23: mol_type = other RNA
agtcttctgtcatagttccaaca

SEQ ID NO: 1906 - RNA, 23 nt, synthetic construct
  source 1..23: mol_type = other RNA
aaatctcagaaccatatctgttg

SEQ ID NO: 1907 - RNA, 23 nt, synthetic construct
  source 1..23: mol_type = other RNA
actgaatctatcttcattttact

SEQ ID NO: 1908 - RNA, 23 nt, synthetic construct
  source 1..23: mol_type = other RNA
gaaccactaaacttgttcctttc

SEQ ID NO: 1909 - RNA, 23 nt, synthetic construct
  source 1..23: mol_type = other RNA
tcagtgttctttactccttacag

SEQ ID NO: 1910 - RNA, 23 nt, synthetic construct
  source 1..23: mol_type = other RNA
tcctttactcttaacaggattat

SEQ ID NO: 1911 - RNA, 23 nt, synthetic construct
  source 1..23: mol_type = other RNA
cttatacctaagaacatattaca

SEQ ID NO: 1912 - RNA, 23 nt, synthetic construct
  source 1..23: mol_type = other RNA
ttcttctactgagatgatccaag

SEQ ID NO: 1913 - RNA, 23 nt, synthetic construct
  source 1..23: mol_type = other RNA
ttctgtattttctcatagagtac

SEQ ID NO: 1914 - RNA, 23 nt, synthetic construct
  source 1..23: mol_type = other RNA
atacttttctctttcagttgtag

SEQ ID NO: 1915 - RNA, 23 nt, synthetic construct
  source 1..23: mol_type = other RNA
tcattaatttctagtctgtgaaa

SEQ ID NO: 1916 - RNA, 23 nt, synthetic construct
  source 1..23: mol_type = other RNA
ttctctgtataagaggtttcacc

SEQ ID NO: 1917 - RNA, 23 nt, synthetic construct
  source 1..23: mol_type = other RNA
ttgactttcaaagtactaatact

SEQ ID NO: 1918 - RNA, 23 nt, synthetic construct
  source 1..23: mol_type = other RNA
tgtttgccattatacaaagtttg

SEQ ID NO: 1919 - RNA, 23 nt, synthetic construct
  source 1..23: mol_type = other RNA
ctgaacactatcgacatacctca

SEQ ID NO: 1920 - RNA, 23 nt, synthetic construct
  source 1..23: mol_type = other RNA
cgtagaatgacatttactaatat

SEQ ID NO: 1921 - RNA, 23 nt, synthetic construct
  source 1..23: mol_type = other RNA
acaagctacttagaaatgtttag

SEQ ID NO: 1922 - RNA, 23 nt, synthetic construct
  source 1..23: mol_type = other RNA
tcccttagtactctcagagatta

SEQ ID NO: 1923 - RNA, 23 nt, synthetic construct
  source 1..23: mol_type = other RNA
cttgaatgcacactaacgtaatg

SEQ ID NO: 1924 - RNA, 23 nt, synthetic construct
  source 1..23: mol_type = other RNA
caaagcctaatgatgataattat

SEQ ID NO: 1925 - RNA, 23 nt, synthetic construct
  source 1..23: mol_type = other RNA
ggaaactttttactatcccatat

SEQ ID NO: 1926 - RNA, 23 nt, synthetic construct
  source 1..23: mol_type = other RNA
agctagctgatactcttaagtat

SEQ ID NO: 1927 - RNA, 23 nt, synthetic construct
  source 1..23: mol_type = other RNA
gcagcatgaaaagataactctaa

SEQ ID NO: 1928 - RNA, 23 nt, synthetic construct
  source 1..23: mol_type = other RNA
actaagccattatgctattagtt

SEQ ID NO: 1929 - RNA, 23 nt, synthetic construct
  source 1..23: mol_type = other RNA
attctagcttttagctaacatat

SEQ ID NO: 1930 - RNA, 23 nt, synthetic construct
  source 1..23: mol_type = other RNA
ttgtgtgattcttcaaacttcac

SEQ ID NO: 1931 - RNA, 23 nt, synthetic construct
  source 1..23: mol_type = other RNA
tctctccagacctaacagtttta

SEQ ID NO: 1932 - RNA, 23 nt, synthetic construct
  source 1..23: mol_type = other RNA
ttctttttttcatctagccttgc

SEQ ID NO: 1933 - RNA, 23 nt, synthetic construct
  source 1..23: mol_type = other RNA
gtcaaaataattcttgacatcta

SEQ ID NO: 1934 - RNA, 23 nt, synthetic construct
  source 1..23: mol_type = other RNA
cagcatcactttctgaaaataag

SEQ ID NO: 1935 - RNA, 23 nt, synthetic construct
  source 1..23: mol_type = other RNA
catcttttgtgaaacatactatt

SEQ ID NO: 1936 - RNA, 23 nt, synthetic construct
  source 1..23: mol_type = other RNA
ttctatttcttccataggctaaa

SEQ ID NO: 1937 - RNA, 23 nt, synthetic construct
  source 1..23: mol_type = other RNA
ctcttcaatgaagtgttaacaac

SEQ ID NO: 1938 - RNA, 23 nt, synthetic construct
  source 1..23: mol_type = other RNA
gttttgccttcattctactttct

SEQ ID NO: 1939 - RNA, 23 nt, synthetic construct
  source 1..23: mol_type = other RNA
tcaggtttttaaatgtcctaaaa

SEQ ID NO: 1940 - RNA, 23 nt, synthetic construct
  source 1..23: mol_type = other RNA
gtgaatatctttgagtccttcaa

SEQ ID NO: 1941 - RNA, 23 nt, synthetic construct
  source 1..23: mol_type = other RNA
ctgaacacttccaaagattaatc

SEQ ID NO: 1942 - RNA, 23 nt, synthetic construct
  source 1..23: mol_type = other RNA
gcctaaattttgtctaacaaatg

SEQ ID NO: 1943 - RNA, 23 nt, synthetic construct
  source 1..23: mol_type = other RNA
gagtaaacaacttaaaattgctt

SEQ ID NO: 1944 - RNA, 23 nt, synthetic construct
  source 1..23: mol_type = other RNA
ctaaaataatttactcactcaga

SEQ ID NO: 1945 - RNA, 23 nt, synthetic construct
  source 1..23: mol_type = other RNA
ctgacatctattctgttggtctg

SEQ ID NO: 1946 - RNA, 23 nt, synthetic construct
  source 1..23: mol_type = other RNA
cctaactgagtagtcttatattt

SEQ ID NO: 1947 - RNA, 23 nt, synthetic construct
  source 1..23: mol_type = other RNA
cgtctggaatttagccttctaat

SEQ ID NO: 1948 - RNA, 23 nt, synthetic construct
  source 1..23: mol_type = other RNA
aaacatgccttgaactcttgaac

SEQ ID NO: 1949 - RNA, 23 nt, synthetic construct
  source 1..23: mol_type = other RNA
aaatcaagcacttcttgcacttg

SEQ ID NO: 1950 - RNA, 23 nt, synthetic construct
  source 1..23: mol_type = other RNA
cacttgcttttcatctttatact

SEQ ID NO: 1951 - RNA, 23 nt, synthetic construct
  source 1..23: mol_type = other RNA
gcttttctccctatgtaatatct

SEQ ID NO: 1952 - RNA, 23 nt, synthetic construct
  source 1..23: mol_type = other RNA
tatgctttcttctatgtctaaaa

SEQ ID NO: 1953 - RNA, 23 nt, synthetic construct
  source 1..23: mol_type = other RNA
gaacctgcttagcaaatcgtctg

SEQ ID NO: 1954 - RNA, 23 nt, synthetic construct
  source 1..23: mol_type = other RNA
agatattcctctaccctttcaca

SEQ ID NO: 1955 - RNA, 23 nt, synthetic construct
  source 1..23: mol_type = other RNA
aatcccacttttctttgggtttc

SEQ ID NO: 1956 - RNA, 23 nt, synthetic construct
  source 1..23: mol_type = other RNA
gcaggcttcttgtatatacttat

SEQ ID NO: 1957 - RNA, 23 nt, synthetic construct
  source 1..23: mol_type = other RNA
tcaaacttgatctgtgtttcagg

SEQ ID NO: 1958 - RNA, 23 nt, synthetic construct
  source 1..23: mol_type = other RNA
cttttgctttaatgctaaattcc

SEQ ID NO: 1959 - RNA, 23 nt, synthetic construct
  source 1..23: mol_type = other RNA
aaagactagctgttatttgtatt

SEQ ID NO: 1960 - RNA, 23 nt, synthetic construct
  source 1..23: mol_type = other RNA
gcttcctactttcccttgaatag

SEQ ID NO: 1961 - RNA, 23 nt, synthetic construct
  source 1..23: mol_type = other RNA
tccagaactgaatgctcaagtct

SEQ ID NO: 1962 - RNA, 23 nt, synthetic construct
  source 1..23: mol_type = other RNA
gttcttgttactaatttctcata

SEQ ID NO: 1963 - RNA, 23 nt, synthetic construct
  source 1..23: mol_type = other RNA
aactcagtgatagcctttatacc

SEQ ID NO: 1964 - RNA, 23 nt, synthetic construct
  source 1..23: mol_type = other RNA
tcttttatgctcctaaaacatct

SEQ ID NO: 1965 - RNA, 23 nt, synthetic construct
  source 1..23: mol_type = other RNA
aattctccttaggttatgttcag

SEQ ID NO: 1966 - RNA, 23 nt, synthetic construct
  source 1..23: mol_type = other RNA
ctattgctcatcgagacataaaa

SEQ ID NO: 1967 - RNA, 23 nt, synthetic construct
  source 1..23: mol_type = other RNA
ttcctttgtacatacacacttag

SEQ ID NO: 1968 - RNA, 23 nt, synthetic construct
  source 1..23: mol_type = other RNA
acttgaaccaagagcacatgaat

SEQ ID NO: 1969 - RNA, 23 nt, synthetic construct
  source 1..23: mol_type = other RNA
cctcagggattttaaagtctaat

SEQ ID NO: 1970 - RNA, 23 nt, synthetic construct
  source 1..23: mol_type = other RNA
ggtacttgcttataaagtgatag

SEQ ID NO: 1971 - RNA, 23 nt, synthetic construct
  source 1..23: mol_type = other RNA
gcatgcatctaaacctaccttga

SEQ ID NO: 1972 - RNA, 23 nt, synthetic construct
  source 1..23: mol_type = other RNA
acttgggaaaacactattatgaa

SEQ ID NO: 1973 - RNA, 23 nt, synthetic construct
  source 1..23: mol_type = other RNA
tcaaactccaaagagaaatgaat

SEQ ID NO: 1974 - RNA, 23 nt, synthetic construct
  source 1..23: mol_type = other RNA
atatgggcatttttcaaaacatt

SEQ ID NO: 1975 - RNA, 23 nt, synthetic construct
  source 1..23: mol_type = other RNA
agataatggaacttggactcaac

SEQ ID NO: 1976 - RNA, 23 nt, synthetic construct
  source 1..23: mol_type = other RNA
tttgtgtagatgacgaaaccaag

SEQ ID NO: 1977 - RNA, 23 nt, synthetic construct
  source 1..23: mol_type = other RNA
tgttctacctcaaagataagaca

SEQ ID NO: 1978 - RNA, 23 nt, synthetic construct
  source 1..23: mol_type = other RNA
ttagaaggcatattgagttattt

SEQ ID NO: 1979 - RNA, 23 nt, synthetic construct
  source 1..23: mol_type = other RNA
acatggagtttttctgctatttt

SEQ ID NO: 1980 - RNA, 23 nt, synthetic construct
  source 1..23: mol_type = other RNA
cctcagtttctcattagtttgtc

SEQ ID NO: 1981 - RNA, 23 nt, synthetic construct
  source 1..23: mol_type = other RNA
ttctgcatatataagaacgaaat

SEQ ID NO: 1982 - RNA, 23 nt, synthetic construct
  source 1..23: mol_type = other RNA
tctgagccaaaatattaaattct

SEQ ID NO: 1983 - RNA, 23 nt, synthetic construct
  source 1..23: mol_type = other RNA
caagaatgatatttcctgtttta

SEQ ID NO: 1984 - RNA, 23 nt, synthetic construct
  source 1..23: mol_type = other RNA
ttgtgctctatataaatcttccc

SEQ ID NO: 1985 - RNA, 23 nt, synthetic construct
  source 1..23: mol_type = other RNA
attttacagagaagcatcttatt

SEQ ID NO: 1986 - RNA, 23 nt, synthetic construct
  source 1..23: mol_type = other RNA
atgtcttgagttctgcatgacag

SEQ ID NO: 1987 - RNA, 23 nt, synthetic construct
  source 1..23: mol_type = other RNA
cccttcaaatctataattttact

SEQ ID NO: 1988 - RNA, 23 nt, synthetic construct
  source 1..23: mol_type = other RNA
gtgaagcatatagaactctattt

SEQ ID NO: 1989 - RNA, 23 nt, synthetic construct
  source 1..23: mol_type = other RNA
gagagctgcttctaaataacaaa

SEQ ID NO: 1990 - RNA, 23 nt, synthetic construct
  source 1..23: mol_type = other RNA
tgtgactgtatttcctgatcatt

SEQ ID NO: 1991 - RNA, 23 nt, synthetic construct
  source 1..23: mol_type = other RNA
gcgttctgaaggatatacttctg

SEQ ID NO: 1992 - RNA, 23 nt, synthetic construct
  source 1..23: mol_type = other RNA
ctgtgaagcatgattcaatactg

SEQ ID NO: 1993 - RNA, 23 nt, synthetic construct
  source 1..23: mol_type = other RNA
cgaatgctgcttcacagattttt

SEQ ID NO: 1994 - RNA, 23 nt, synthetic construct
  source 1..23: mol_type = other RNA
actgtgggttatgttaatctgaa

SEQ ID NO: 1995 - RNA, 23 nt, synthetic construct
  source 1..23: mol_type = other RNA
gtgagtacagaagaatgctcatg

SEQ ID NO: 1996 - RNA, 23 nt, synthetic construct
  source 1..23: mol_type = other RNA
agctgtatttcatcctagatttt

SEQ ID NO: 1997 - RNA, 23 nt, synthetic construct
  source 1..23: mol_type = other RNA
gcaatctggtaaatgctggaaaa

SEQ ID NO: 1998 - RNA, 23 nt, synthetic construct
  source 1..23: mol_type = other RNA
attgctcagattacctgatcgtg

SEQ ID NO: 1999 - RNA, 23 nt, synthetic construct
  source 1..23: mol_type = other RNA
ctgacagctatggagtttgcgtg

SEQ ID NO: 2000 - RNA, 23 nt, synthetic construct
  source 1..23: mol_type = other RNA
tatagaacatgctcacttacaaa

SEQ ID NO: 2001 - RNA, 23 nt, synthetic construct
  source 1..23: mol_type = other RNA
tgattatgcttcatttcactatg

SEQ ID NO: 2002 - RNA, 23 nt, synthetic construct
  source 1..23: mol_type = other RNA
accaacagcaagtcataaaagta

SEQ ID NO: 2003 - RNA, 23 nt, synthetic construct
  source 1..23: mol_type = other RNA
cattgtctgaaaatgtctttaag

SEQ ID NO: 2004 - RNA, 23 nt, synthetic construct
  source 1..23: mol_type = other RNA
tctgttggttcaaaggacaattg

SEQ ID NO: 2005 - RNA, 23 nt, synthetic construct
  source 1..23: mol_type = other RNA
gctctaaactttaatatatcgaa

SEQ ID NO: 2006 - RNA, 23 nt, synthetic construct
  source 1..23: mol_type = other RNA
ttaagtgaaacatgactgtcgtg

SEQ ID NO: 2007 - RNA, 23 nt, synthetic construct
  source 1..23: mol_type = other RNA
atatcgtccatacagttttcatt

SEQ ID NO: 2008 - RNA, 23 nt, synthetic construct
  source 1..23: mol_type = other RNA
tgcttcaggaaatagtaggaaaa

SEQ ID NO: 2009 - RNA, 23 nt, synthetic construct
  source 1..23: mol_type = other RNA
cccaccctttctgtaaggactgt

SEQ ID NO: 2010 - RNA, 23 nt, synthetic construct
  source 1..23: mol_type = other RNA
caaaagagatacctgacatcctg

SEQ ID NO: 2011 - RNA, 23 nt, synthetic construct
  source 1..23: mol_type = other RNA
taatgagcattaatgttttctga

SEQ ID NO: 2012 - RNA, 23 nt, synthetic construct
  source 1..23: mol_type = other RNA
gttgacattttttctcatagaaa

SEQ ID NO: 2013 - RNA, 23 nt, synthetic construct
  source 1..23: mol_type = other RNA
atcagagattaaatgactactag

SEQ ID NO: 2014 - RNA, 23 nt, synthetic construct
  source 1..23: mol_type = other RNA
atgctgtcaaatgttatattgtt

SEQ ID NO: 2015 - RNA, 23 nt, synthetic construct
  source 1..23: mol_type = other RNA
ggaatataatactacagcaaaat

SEQ ID NO: 2016 - RNA, 23 nt, synthetic construct
  source 1..23: mol_type = other RNA
agggtgtctaaatataatttcat

SEQ ID NO: 2017 - RNA, 23 nt, synthetic construct
  source 1..23: mol_type = other RNA
ttctctttatacaaaatgagagt

SEQ ID NO: 2018 - RNA, 23 nt, synthetic construct
  source 1..23: mol_type = other RNA
tagcagtaccaaatgaataaaag

SEQ ID NO: 2019 - RNA, 23 nt, synthetic construct
  source 1..23: mol_type = other RNA
gattgttggtacacaaggtaaac

SEQ ID NO: 2020 - RNA, 23 nt, synthetic construct
  source 1..23: mol_type = other RNA
aactcttatttaacttaaccgtc

SEQ ID NO: 2021 - RNA, 23 nt, synthetic construct
  source 1..23: mol_type = other RNA
aatgcttgatgatacaatgaatg

SEQ ID NO: 2022 - RNA, 23 nt, synthetic construct
  source 1..23: mol_type = other RNA
gtaactgggaaagacaatttgaa

SEQ ID NO: 2023 - RNA, 23 nt, synthetic construct
  source 1..23: mol_type = other RNA
ggctccttatatgactatttgaa

SEQ ID NO: 2024 - RNA, 23 nt, synthetic construct
  source 1..23: mol_type = other RNA
tcagtcatgctaaccaatggaaa

SEQ ID NO: 2025 - RNA, 23 nt, synthetic construct
  source 1..23: mol_type = other RNA
gtcctgaagtcacacagctaatg

SEQ ID NO: 2026 - RNA, 23 nt, synthetic construct
  source 1..23: mol_type = other RNA
cattgctgctgacaacaaagata

SEQ ID NO: 2027 - RNA, 23 nt, synthetic construct
  source 1..23: mol_type = other RNA
attactgactttgcctgtaaaga

SEQ ID NO: 2028 - RNA, 23 nt, synthetic construct
  source 1..23: mol_type = other RNA
acaatccctattttaaaattccc

SEQ ID NO: 2029 - RNA, 23 nt, synthetic construct
  source 1..23: mol_type = other RNA
gagtgccttaggagattaccctt

SEQ ID NO: 2030 - RNA, 23 nt, synthetic construct
  source 1..23: mol_type = other RNA
cagacaatctaaatatatcatca

SEQ ID NO: 2031 - RNA, 23 nt, synthetic construct
  source 1..23: mol_type = other RNA
cttgtgataatgaacaccgtaag

SEQ ID NO: 2032 - RNA, 23 nt, synthetic construct
  source 1..23: mol_type = other RNA
aatcaccgttgtaaagacttttt

SEQ ID NO: 2033 - RNA, 23 nt, synthetic construct
  source 1..23: mol_type = other RNA
gattagagaagcttcctgacatc

SEQ ID NO: 2034 - RNA, 23 nt, synthetic construct
  source 1..23: mol_type = other RNA
ataacagtaaagaaatgctactt

SEQ ID NO: 2035 - RNA, 23 nt, synthetic construct
  source 1..23: mol_type = other RNA
tttatgttctgacttgagagtta

SEQ ID NO: 2036 - RNA, 23 nt, synthetic construct
  source 1..23: mol_type = other RNA
aattagagcatgctatctttagg

SEQ ID NO: 2037 - RNA, 23 nt, synthetic construct
  source 1..23: mol_type = other RNA
catagtctttgattgaaataagt

SEQ ID NO: 2038 - RNA, 23 nt, synthetic construct
  source 1..23: mol_type = other RNA
ctttggtaaacgagatttaacat

SEQ ID NO: 2039 - RNA, 23 nt, synthetic construct
  source 1..23: mol_type = other RNA
aggtctgaaaattgctttcattt

SEQ ID NO: 2040 - RNA, 23 nt, synthetic construct
  source 1..23: mol_type = other RNA
gcatgaacttgttgccttgtaaa

SEQ ID NO: 2041 - RNA, 23 nt, synthetic construct
  source 1..23: mol_type = other RNA
ttgggcaataaactgtatcaaaa

SEQ ID NO: 2042 - RNA, 23 nt, synthetic construct
  source 1..23: mol_type = other RNA
gtacatgttagcatataatgtat

SEQ ID NO: 2043 - RNA, 23 nt, synthetic construct
  source 1..23: mol_type = other RNA
actgtgagagtatagaatttctt

SEQ ID NO: 2044 - RNA, 23 nt, synthetic construct
  source 1..23: mol_type = other RNA
taatccttcatttggcactatag

SEQ ID NO: 2045 - RNA, 23 nt, synthetic construct
  source 1..23: mol_type = other RNA
acacatttagaaagtagctttat

SEQ ID NO: 2046 - RNA, 23 nt, synthetic construct
  source 1..23: mol_type = other RNA
ttaactgttctataaagcaaagc

SEQ ID NO: 2047 - RNA, 23 nt, synthetic construct
  source 1..23: mol_type = other RNA
ctcctccagagatgaaagatctt

SEQ ID NO: 2048 - RNA, 23 nt, synthetic construct
  source 1..23: mol_type = other RNA
tgttgtttaactatgactcctaa

SEQ ID NO: 2049 - RNA, 23 nt, synthetic construct
  source 1..23: mol_type = other RNA
ttctgtttgacaatgctttgttc

SEQ ID NO: 2050 - RNA, 23 nt, synthetic construct
  source 1..23: mol_type = other RNA
gttgtcctaaaagaaatttttct

SEQ ID NO: 2051 - RNA, 23 nt, synthetic construct
  source 1..23: mol_type = other RNA
ctacagattgaacaaagaactta

SEQ ID NO: 2052 - RNA, 23 nt, synthetic construct
  source 1..23: mol_type = other RNA
tcgtttaacctgtccaaacttct

SEQ ID NO: 2053 - RNA, 23 nt, synthetic construct
  source 1..23: mol_type = other RNA
accaaaatgtttaactttaccaa

SEQ ID NO: 2054 - RNA, 23 nt, synthetic construct
  source 1..23: mol_type = other RNA
agtcccattgtgtaatatttatt

SEQ ID NO: 2055 - RNA, 23 nt, synthetic construct
  source 1..23: mol_type = other RNA
atgttgggtaaatatgcttattg

SEQ ID NO: 2056 - RNA, 23 nt, synthetic construct
  source 1..23: mol_type = other RNA
ctcagggttgtctttgagtctgc

SEQ ID NO: 2057 - RNA, 23 nt, synthetic construct
  source 1..23: mol_type = other RNA
gggctaaaatccaactgcaattg

SEQ ID NO: 2058 - RNA, 23 nt, synthetic construct
  source 1..23: mol_type = other RNA
gccaggactgaagtgtgtatgtc

SEQ ID NO: 2059 - RNA, 23 nt, synthetic construct
  source 1..23: mol_type = other RNA
aggagtaccaattgccttattat

SEQ ID NO: 2060 - RNA, 23 nt, synthetic construct
  source 1..23: mol_type = other RNA
aaaagtgcctatgtgaagtgatt

SEQ ID NO: 2061 - RNA, 23 nt, synthetic construct
  source 1..23: mol_type = other RNA
cctaacaataatagaactgccag

SEQ ID NO: 2062 - RNA, 23 nt, synthetic construct
  source 1..23: mol_type = other RNA
ctgctgttccataccattgcttt

SEQ ID NO: 2063 - RNA, 23 nt, synthetic construct
  source 1..23: mol_type = other RNA
tctagactggagaagattattca

SEQ ID NO: 2064 - RNA, 23 nt, synthetic construct
  source 1..23: mol_type = other RNA
ccttccaacagcatcaccaaatg

SEQ ID NO: 2065 - RNA, 23 nt, synthetic construct
  source 1..23: mol_type = other RNA
tgtaattggtacagattctgttg

SEQ ID NO: 2066 - RNA, 23 nt, synthetic construct
  source 1..23: mol_type = other RNA
aagagaaacattatttgttgtca

SEQ ID NO: 2067 - RNA, 23 nt, synthetic construct
  source 1..23: mol_type = other RNA
ggcgctctcaattgctagtggtc

SEQ ID NO: 2068 - RNA, 23 nt, synthetic construct
  source 1..23: mol_type = other RNA
gacggtatcagaaacagcaaata

SEQ ID NO: 2069 - RNA, 23 nt, synthetic construct
  source 1..23: mol_type = other RNA
ctcccagacataattttatattt

SEQ ID NO: 2070 - RNA, 23 nt, synthetic construct
  source 1..23: mol_type = other RNA
gttagtacattttgaggtatttt

SEQ ID NO: 2071 - RNA, 23 nt, synthetic construct
  source 1..23: mol_type = other RNA
gtaaatgctattgataacagtaa

SEQ ID NO: 2072 - RNA, 23 nt, synthetic construct
  source 1..23: mol_type = other RNA
gatagctgaatttgggactatgt

SEQ ID NO: 2073 - RNA, 23 nt, synthetic construct
  source 1..23: mol_type = other RNA
ccattgtggttttcaaagatatt

SEQ ID NO: 2074 - RNA, 23 nt, synthetic construct
  source 1..23: mol_type = other RNA
aacctggttgcagtatctgaaaa

SEQ ID NO: 2075 - RNA, 23 nt, synthetic construct
  source 1..23: mol_type = other RNA
tgtagaatggttgttgagctaag

SEQ ID NO: 2076 - RNA, 23 nt, synthetic construct
  source 1..23: mol_type = other RNA
agctggccatcattattactgtg

SEQ ID NO: 2077 - RNA, 23 nt, synthetic construct
  source 1..23: mol_type = other RNA
aattgacagataaaatacgaagt

SEQ ID NO: 2078 - RNA, 23 nt, synthetic construct
  source 1..23: mol_type = other RNA
attcacaaacacatcattacaag

SEQ ID NO: 2079 - RNA, 23 nt, synthetic construct
  source 1..23: mol_type = other RNA
ttccatgattgtatgaaaatagt

SEQ ID NO: 2080 - RNA, 23 nt, synthetic construct
  source 1..23: mol_type = other RNA
gacacagagtaatgaatatttaa

SEQ ID NO: 2081 - RNA, 23 nt, synthetic construct
  source 1..23: mol_type = other RNA
ggagctgcttagtggaagatgta

SEQ ID NO: 2082 - RNA, 23 nt, synthetic construct
  source 1..23: mol_type = other RNA
tctagctctgtgtgctgatacct

SEQ ID NO: 2083 - RNA, 23 nt, synthetic construct
  source 1..23: mol_type = other RNA
tacattcgagagaatatgagctg

SEQ ID NO: 2084 - RNA, 23 nt, synthetic construct
  source 1..23: mol_type = other RNA
gtatgcattttctgaaaatgtat

SEQ ID NO: 2085 - RNA, 23 nt, synthetic construct
  source 1..23: mol_type = other RNA
aagtttcgaccaagtatcccaaa

SEQ ID NO: 2086 - RNA, 23 nt, synthetic construct
  source 1..23: mol_type = other RNA
tatcttgcttgccacaatatcgg

SEQ ID NO: 2087 - RNA, 23 nt, synthetic construct
  source 1..23: mol_type = other RNA
tcgggtacaagagggaatacaaa

SEQ ID NO: 2088 - RNA, 23 nt, synthetic construct
  source 1..23: mol_type = other RNA
caggtgatcaaatcctgtgtctc

SEQ ID NO: 2089 - RNA, 23 nt, synthetic construct
  source 1..23: mol_type = other RNA
gacagtgggtttctaggataggt

SEQ ID NO: 2090 - RNA, 23 nt, synthetic construct
  source 1..23: mol_type = other RNA
gtaactaagtatttttaaggaca

SEQ ID NO: 2091 - RNA, 23 nt, synthetic construct
  source 1..23: mol_type = other RNA
cccataatgtgattgttaaattt

SEQ ID NO: 2092 - RNA, 23 nt, synthetic construct
  source 1..23: mol_type = other RNA
ttgagaagaattaagaaaactct

SEQ ID NO: 2093 - RNA, 23 nt, synthetic construct
  source 1..23: mol_type = other RNA
gagaagagaaattgattgtttat

SEQ ID NO: 2094 - RNA, 23 nt, synthetic construct
  source 1..23: mol_type = other RNA
aaagtgtgaaacttgtgccatag

SEQ ID NO: 2095 - RNA, 23 nt, synthetic construct
  source 1..23: mol_type = other RNA
tcctgagacactgagaaatgtcc

SEQ ID NO: 2096 - RNA, 23 nt, synthetic construct
  source 1..23: mol_type = other RNA
attggcttatatgtgtttaaaga

SEQ ID NO: 2097 - RNA, 23 nt, synthetic construct
  source 1..23: mol_type = other RNA
attgcattttgacattgcaaaac

SEQ ID NO: 2098 - RNA, 23 nt, synthetic construct
  source 1..23: mol_type = other RNA
cattaggttagaagttccagaat

SEQ ID NO: 2099 - RNA, 23 nt, synthetic construct
  source 1..23: mol_type = other RNA
gctgcgacatgaaaacatccttg

SEQ ID NO: 2100 - RNA, 23 nt, synthetic construct
  source 1..23: mol_type = other RNA
aagagaggattttttaccatctc

SEQ ID NO: 2101 - RNA, 23 nt, synthetic construct
  source 1..23: mol_type = other RNA
tggaaggtgaagagaatttcaaa

SEQ ID NO: 2102 - RNA, 23 nt, synthetic construct
  source 1..23: mol_type = other RNA
gctggtatctgaatatcatgaac

SEQ ID NO: 2103 - RNA, 23 nt, synthetic construct
  source 1..23: mol_type = other RNA
catgttggtttaatttttcaacc

SEQ ID NO: 2104 - RNA, 23 nt, synthetic construct
  source 1..23: mol_type = other RNA
agtagttgtaatttaaatgtgga

SEQ ID NO: 2105 - RNA, 23 nt, synthetic construct
  source 1..23: mol_type = other RNA
atgtgaatgtttttgccattttt

SEQ ID NO: 2106 - RNA, 23 nt, synthetic construct
  source 1..23: mol_type = other RNA
ggcagagatgatttttcttttaa

SEQ ID NO: 2107 - RNA, 23 nt, synthetic construct
  source 1..23: mol_type = other RNA
acagaaaattagattcagatctc

SEQ ID NO: 2108 - RNA, 23 nt, synthetic construct
  source 1..23: mol_type = other RNA
ccactggaaaattaagaaagtag

SEQ ID NO: 2109 - RNA, 23 nt, synthetic construct
  source 1..23: mol_type = other RNA
tgtaaagtgggaaagataataaa

SEQ ID NO: 2110 - RNA, 23 nt, synthetic construct
  source 1..23: mol_type = other RNA
aactaggctaagaaagagttgta

SEQ ID NO: 2111 - RNA, 23 nt, synthetic construct
  source 1..23: mol_type = other RNA
gtgctgataaaattaatggataa

SEQ ID NO: 2112 - RNA, 23 nt, synthetic construct
  source 1..23: mol_type = other RNA
ttcctgtatttctttagttgtcg

SEQ ID NO: 2113 - RNA, 23 nt, synthetic construct
  source 1..23: mol_type = other RNA
gctttgttttgcttttgacaaac

SEQ ID NO: 2114 - RNA, 23 nt, synthetic construct
  source 1..23: mol_type = other RNA
tgtggctgtgaaaatattctcct

SEQ ID NO: 2115 - RNA, 23 nt, synthetic construct
  source 1..23: mol_type = other RNA
gcactattttaggcatagcactt

SEQ ID NO: 2116 - RNA, 23 nt, synthetic construct
  source 1..23: mol_type = other RNA
attttcagtactgtataaagtgg

SEQ ID NO: 2117 - RNA, 23 nt, synthetic construct
  source 1..23: mol_type = other RNA
aggtgatgcaatctatgtttccc

SEQ ID NO: 2118 - RNA, 23 nt, synthetic construct
  source 1..23: mol_type = other RNA
aatgtttggcagatctcatcaat

SEQ ID NO: 2119 - RNA, 23 nt, synthetic construct
  source 1..23: mol_type = other RNA
gaaaggttgtttgtgaccagaag

SEQ ID NO: 2120 - RNA, 23 nt, synthetic construct
  source 1..23: mol_type = other RNA
aaggaaggaaatattttgagaat

SEQ ID NO: 2121 - RNA, 23 nt, synthetic construct
  source 1..23: mol_type = other RNA
tcttttggtagcgtgactcttct

SEQ ID NO: 2122 - RNA, 23 nt, synthetic construct
  source 1..23: mol_type = other RNA
aatgaacaggaaaagatgtaaaa

SEQ ID NO: 2123 - RNA, 23 nt, synthetic construct
  source 1..23: mol_type = other RNA
gtgggaaccaagaggtatatggc

SEQ ID NO: 2124 - RNA, 23 nt, synthetic construct
  source 1..23: mol_type = other RNA
actggcactaggtccaaatcttg

SEQ ID NO: 2125 - RNA, 23 nt, synthetic construct
  source 1..23: mol_type = other RNA
ggcacaccttcatatggagattg

SEQ ID NO: 2126 - RNA, 23 nt, synthetic construct
  source 1..23: mol_type = other RNA
gtctggtttactgggaaatagcc

SEQ ID NO: 2127 - RNA, 23 nt, synthetic construct
  source 1..23: mol_type = other RNA
aggcccaaaggaatgtatataag

SEQ ID NO: 2128 - RNA, 23 nt, synthetic construct
  source 1..23: mol_type = other RNA
ttttaactgcaagagtttactgt

SEQ ID NO: 2129 - RNA, 23 nt, synthetic construct
  source 1..23: mol_type = other RNA
aggaaccactctctgagtgcaat

SEQ ID NO: 2130 - RNA, 23 nt, synthetic construct
  source 1..23: mol_type = other RNA
ctttatcttttcatcctggcatt

SEQ ID NO: 2131 - RNA, 23 nt, synthetic construct
  source 1..23: mol_type = other RNA
gcgtgagtgttggtatgccaacg

SEQ ID NO: 2132 - RNA, 23 nt, synthetic construct
  source 1..23: mol_type = other RNA
tgagaatgtatttggctaaataa

SEQ ID NO: 2133 - RNA, 23 nt, synthetic construct
  source 1..23: mol_type = other RNA
tggaacccttttattaagaggag

SEQ ID NO: 2134 - RNA, 23 nt, synthetic construct
  source 1..23: mol_type = other RNA
gcctcctgtccatagctgcgatg

SEQ ID NO: 2135 - RNA, 23 nt, synthetic construct
  source 1..23: mol_type = other RNA
ttactgagttgaaataaggaagg

SEQ ID NO: 2136 - RNA, 23 nt, synthetic construct
  source 1..23: mol_type = other RNA
acctgccaaacagaaggagcatg

SEQ ID NO: 2137 - RNA, 23 nt, synthetic construct
  source 1..23: mol_type = other RNA
gtggcaaagttgtgaagcactcc

SEQ ID NO: 2138 - RNA, 23 nt, synthetic construct
  source 1..23: mol_type = other RNA
aaataggatgatgaagtttagag

SEQ ID NO: 2139 - RNA, 23 nt, synthetic construct
  source 1..23: mol_type = other RNA
gtattcgtatcttaaaatggcac

SEQ ID NO: 2140 - RNA, 23 nt, synthetic construct
  source 1..23: mol_type = other RNA
agcacagcttgggtaatagcgtt

SEQ ID NO: 2141 - RNA, 23 nt, synthetic construct
  source 1..23: mol_type = other RNA
tttttgcaacaacataacactgc

SEQ ID NO: 2142 - RNA, 23 nt, synthetic construct
  source 1..23: mol_type = other RNA
tttgccaccatgtgacttattgg

SEQ ID NO: 2143 - RNA, 23 nt, synthetic construct
  source 1..23: mol_type = other RNA
cctcgatagaggaaatgagaaag

SEQ ID NO: 2144 - RNA, 23 nt, synthetic construct
  source 1..23: mol_type = other RNA
cctttttaagttagcaggacttt

SEQ ID NO: 2145 - RNA, 23 nt, synthetic construct
  source 1..23: mol_type = other RNA
gatgtaaataattatctgcctaa

SEQ ID NO: 2146 - RNA, 23 nt, synthetic construct
  source 1..23: mol_type = other RNA
tatggttgtacgtgcctcaaata

SEQ ID NO: 2147 - RNA, 21 nt, synthetic construct
  source 1..21: mol_type = other RNA
ccacactgactagagccaaca

SEQ ID NO: 2148 - RNA, 23 nt, synthetic construct
  source 1..23: mol_type = other RNA
tgttggctctagtcagtgtgggc

SEQ ID NO: 2149 - RNA, 21 nt, synthetic construct
  source 1..21: mol_type = other RNA
  modified_base 1: mod_base = OTHER; note = 2'-O-methyluridine-3'-phosphorothioate
  modified_base 2: mod_base = OTHER; note = 2'-O-methyluridine-3'-phosphorothioate
  modified_base 3: mod_base = OTHER; note = 2'-O-methyluridine-3'-phosphate
  modified_base 4: mod_base = OTHER; note = 2'-O-methyluridine-3'-phosphate
  modified_base 5: mod_base = OTHER; note = 2'-O-methyluridine-3'-phosphate
  modified_base 6: mod_base = OTHER; note = 2'-O-methyluridine-3'-phosphate
  modified_base 7: mod_base = OTHER; note = 2'-fluorocytidine-3'-phosphate
  modified_base 8: mod_base = OTHER; note = 2'-O-methyladenosine-3'-phosphate
  modified_base 9: mod_base = OTHER; note = 2'-fluoroadenosine-3'-phosphate
  modified_base 10: mod_base = OTHER; note = 2'-fluoroadenosine-3'-phosphate
  modified_base 11: mod_base = OTHER; note = 2'-fluorocytidine-3'-phosphate
  modified_base 12: mod_base = OTHER; note = 2'-O-methyluridine-3'-phosphate
  modified_base 13: mod_base = OTHER; note = 2'-O-methylcytidine-3'-phosphate
  modified_base 14: mod_base = OTHER; note = 2'-O-methylcytidine-3'-phosphate
  modified_base 15: mod_base = OTHER; note = 2'-O-methyladenosine-3'-phosphate
  modified_base 16: mod_base = OTHER; note = 2'-O-methyluridine-3'-phosphate
  modified_base 17: mod_base = OTHER; note = 2'-O-methyluridine-3'-phosphate
  modified_base 18: mod_base = OTHER; note = 2'-O-methylcytidine-3'-phosphate
  modified_base 19: mod_base = OTHER; note = 2'-O-methylcytidine-3'-phosphorothioate
  modified_base 20: mod_base = OTHER; note = 2'-O-methyluridine-3'-phosphorothioate
  modified_base 21: mod_base = OTHER; note = 2'-O-methyladenosine-3'-phosphate
ttttttcaaactccattccta

SEQ ID NO: 2150 - RNA, 21 nt, synthetic construct
  source 1..21: mol_type = other RNA
  modified_base 1: mod_base = OTHER; note = 2'-O-methyladenosine-3'-phosphorothioate
  modified_base 2: mod_base = OTHER; note = 2'-O-methylcytidine-3'-phosphorothioate
  modified_base 3: mod_base = OTHER; note = 2'-O-methyluridine-3'-phosphate
  modified_base 4: mod_base = OTHER; note = 2'-O-methyluridine-3'-phosphate
  modified_base 5: mod_base = OTHER; note = 2'-O-methyluridine-3'-phosphate
  modified_base 6: mod_base = OTHER; note = 2'-O-methylcytidine-3'-phosphate
  modified_base 7: mod_base = OTHER; note = 2'-fluoroadenosine-3'-phosphate
  modified_base 8: mod_base = OTHER; note = 2'-O-methyluridine-3'-phosphate
  modified_base 9: mod_base = OTHER; note = 2'-fluorocytidine-3'-phosphate
  modified_base 10: mod_base = OTHER; note = 2'-fluorouridine-3'-phosphate
  modified_base 11: mod_base = OTHER; note = 2'-fluoroguanosine-3'-phosphate
  modified_base 12: mod_base = OTHER; note = 2'-O-methyluridine-3'-phosphate
  modified_base 13: mod_base = OTHER; note = 2'-O-methylcytidine-3'-phosphate
  modified_base 14: mod_base = OTHER; note = 2'-O-methyluridine-3'-phosphate
  modified_base 15: mod_base = OTHER; note = 2'-O-methyluridine-3'-phosphate
  modified_base 16: mod_base = OTHER; note = 2'-O-methylcytidine-3'-phosphate
  modified_base 17: mod_base = OTHER; note = 2'-O-methyladenosine-3'-phosphate
  modified_base 18: mod_base = OTHER; note = 2'-O-methylguanosine-3'-phosphate
  modified_base 19: mod_base = OTHER; note = 2'-O-methyladenosine-3'-phosphorothioate
  modified_base 20: mod_base = OTHER; note = 2'-O-methyluridine-3'-phosphorothioate
  modified_base 21: mod_base = OTHER; note = 2'-O-methyladenosine-3'-phosphate
actttcatctgtcttcagata

SEQ ID NO: 2151 - RNA, 21 nt, synthetic construct
  source 1..21: mol_type = other RNA
  modified_base 1: mod_base = OTHER; note = 2'-O-methylcytidine-3'-phosphorothioate
  modified_base 2: mod_base = OTHER; note = 2'-O-methylcytidine-3'-phosphorothioate
  modified_base 3: mod_base = OTHER; note = 2'-O-methyluridine-3'-phosphate
  modified_base 4: mod_base = OTHER; note = 2'-O-methylcytidine-3'-phosphate
  modified_base 5: mod_base = OTHER; note = 2'-O-methyladenosine-3'-phosphate
  modified_base 6: mod_base = OTHER; note = 2'-O-methyluridine-3'-phosphate
  modified_base 7: mod_base = OTHER; note = 2'-fluoroadenosine-3'-phosphate
  modified_base 8: mod_base = OTHER; note = 2'-O-methyladenosine-3'-phosphate
  modified_base 9: mod_base = OTHER; note = 2'-fluorocytidine-3'-phosphate
  modified_base 10: mod_base = OTHER; note = 2'-fluorouridine-3'-phosphate
  modified_base 11: mod_base = OTHER; note = 2'-fluorouridine-3'-phosphate
  modified_base 12: mod_base = OTHER; note = 2'-O-methylcytidine-3'-phosphate
  modified_base 13: mod_base = OTHER; note = 2'-O-methyluridine-3'-phosphate
  modified_base 14: mod_base = OTHER; note = 2'-O-methylcytidine-3'-phosphate
  modified_base 15: mod_base = OTHER; note = 2'-O-methylcytidine-3'-phosphate
  modified_base 16: mod_base = OTHER; note = 2'-O-methyladenosine-3'-phosphate
  modified_base 17: mod_base = OTHER; note = 2'-O-methylguanosine-3'-phosphate
  modified_base 18: mod_base = OTHER; note = 2'-O-methyluridine-3'-phosphate
  modified_base 19: mod_base = OTHER; note = 2'-O-methyladenosine-3'-phosphorothioate
  modified_base 20: mod_base = OTHER; note = 2'-O-methyladenosine-3'-phosphorothioate
  modified_base 21: mod_base = OTHER; note = 2'-O-methyladenosine-3'-phosphate
cctcataacttctccagtaaa

SEQ ID NO: 2152 - RNA, 21 nt, synthetic construct
  source 1..21: mol_type = other RNA
  modified_base 1: mod_base = OTHER; note = 2'-O-methylcytidine-3'-phosphorothioate
  modified_base 2: mod_base = OTHER; note = 2'-O-methyluridine-3'-phosphorothioate
  modified_base 3: mod_base = OTHER; note = 2'-O-methylcytidine-3'-phosphate
  modified_base 4: mod_base = OTHER; note = 2'-O-methyladenosine-3'-phosphate
  modified_base 5: mod_base = OTHER; note = 2'-O-methylcytidine-3'-phosphate
  modified_base 6: mod_base = OTHER; note = 2'-O-methyluridine-3'-phosphate
  modified_base 7: mod_base = OTHER; note = 2'-fluoroadenosine-3'-phosphate
  modified_base 8: mod_base = OTHER; note = 2'-O-methyluridine-3'-phosphate
  modified_base 9: mod_base = OTHER; note = 2'-fluorocytidine-3'-phosphate
  modified_base 10: mod_base = OTHER; note = 2'-fluorouridine-3'-phosphate
  modified_base 11: mod_base = OTHER; note = 2'-fluorouridine-3'-phosphate
  modified_base 12: mod_base = OTHER; note = 2'-O-methyluridine-3'-phosphate
  modified_base 13: mod_base = OTHER; note = 2'-O-methylcytidine-3'-phosphate
  modified_base 14: mod_base = OTHER; note = 2'-O-methyladenosine-3'-phosphate
  modified_base 15: mod_base = OTHER; note = 2'-O-methyladenosine-3'-phosphate
  modified_base 16: mod_base = OTHER; note = 2'-O-methylcytidine-3'-phosphate
  modified_base 17: mod_base = OTHER; note = 2'-O-methyladenosine-3'-phosphate
  modified_base 18: mod_base = OTHER; note = 2'-O-methyluridine-3'-phosphate
  modified_base 19: mod_base = OTHER; note = 2'-O-methyluridine-3'-phosphorothioate
  modified_base 20: mod_base = OTHER; note = 2'-O-methyladenosine-3'-phosphorothioate
  modified_base 21: mod_base = OTHER; note = 2'-O-methyladenosine-3'-phosphate
ctcactatctttcaacattaa

SEQ ID NO: 2153 - RNA, 21 nt, synthetic construct
  source 1..21: mol_type = other RNA
  modified_base 1: mod_base = OTHER; note = 2'-O-methylcytidine-3'-phosphorothioate
  modified_base 2: mod_base = OTHER; note = 2'-O-methyluridine-3'-phosphorothioate
  modified_base 3: mod_base = OTHER; note = 2'-O-methylcytidine-3'-phosphate
  modified_base 4: mod_base = OTHER; note = 2'-O-methylguanosine-3'-phosphate
  modified_base 5: mod_base = OTHER; note = 2'-O-methyluridine-3'-phosphate
  modified_base 6: mod_base = OTHER; note = 2'-O-methyluridine-3'-phosphate
  modified_base 7: mod_base = OTHER; note = 2'-fluoroadenosine-3'-phosphate
  modified_base 8: mod_base = OTHER; note = 2'-O-methyladenosine-3'-phosphate
  modified_base 9: mod_base = OTHER; note = 2'-fluorouridine-3'-phosphate
  modified_base 10: mod_base = OTHER; note = 2'-fluoroguanosine-3'-phosphate
  modified_base 11: mod_base = OTHER; note = 2'-fluorocytidine-3'-phosphate
  modified_base 12: mod_base = OTHER; note = 2'-O-methyluridine-3'-phosphate
  modified_base 13: mod_base = OTHER; note = 2'-O-methylcytidine-3'-phosphate
  modified_base 14: mod_base = OTHER; note = 2'-O-methyluridine-3'-phosphate
  modified_base 15: mod_base = OTHER; note = 2'-O-methylcytidine-3'-phosphate
  modified_base 16: mod_base = OTHER; note = 2'-O-methyladenosine-3'-phosphate
  modified_base 17: mod_base = OTHER; note = 2'-O-methyluridine-3'-phosphate
  modified_base 18: mod_base = OTHER; note = 2'-O-methylcytidine-3'-phosphate
  modified_base 19: mod_base = OTHER; note = 2'-O-methylcytidine-3'-phosphorothioate
  modified_base 20: mod_base = OTHER; note = 2'-O-methyladenosine-3'-phosphorothioate
  modified_base 21: mod_base = OTHER; note = 2'-O-methyladenosine-3'-phosphate
ctcgttaatgctctcatccaa

SEQ ID NO: 2154 - RNA, 21 nt, synthetic construct
  source 1..21: mol_type = other RNA
  modified_base 1: mod_base = OTHER; note = 2'-O-methylguanosine-3'-phosphorothioate
  modified_base 2: mod_base = OTHER; note = 2'-O-methyluridine-3'-phosphorothioate
  modified_base 3: mod_base = OTHER; note = 2'-O-methyluridine-3'-phosphate
  modified_base 4: mod_base = OTHER; note = 2'-O-methylcytidine-3'-phosphate
  modified_base 5: mod_base = OTHER; note = 2'-O-methyluridine-3'-phosphate
  modified_base 6: mod_base = OTHER; note = 2'-O-methyluridine-3'-phosphate
  modified_base 7: mod_base = OTHER; note = 2'-fluorocytidine-3'-phosphate
  modified_base 8: mod_base = OTHER; note = 2'-O-methyladenosine-3'-phosphate
  modified_base 9: mod_base = OTHER; note = 2'-fluorouridine-3'-phosphate
  modified_base 10: mod_base = OTHER; note = 2'-fluoroadenosine-3'-phosphate
  modified_base 11: mod_base = OTHER; note = 2'-fluoroadenosine-3'-phosphate
  modified_base 12: mod_base = OTHER; note = 2'-O-methyluridine-3'-phosphate
  modified_base 13: mod_base = OTHER; note = 2'-O-methylcytidine-3'-phosphate
  modified_base 14: mod_base = OTHER; note = 2'-O-methylcytidine-3'-phosphate
  modified_base 15: mod_base = OTHER; note = 2'-O-methyladenosine-3'-phosphate
  modified_base 16: mod_base = OTHER; note = 2'-O-methylcytidine-3'-phosphate
  modified_base 17: mod_base = OTHER; note = 2'-O-methyluridine-3'-phosphate
  modified_base 18: mod_base = OTHER; note = 2'-O-methyladenosine-3'-phosphate
  modified_base 19: mod_base = OTHER; note = 2'-O-methylcytidine-3'-phosphorothioate
  modified_base 20: mod_base = OTHER; note = 2'-O-methyluridine-3'-phosphorothioate
  modified_base 21: mod_base = OTHER; note = 2'-O-methyladenosine-3'-phosphate
gttcttcataatccactacta

SEQ ID NO: 2155 - RNA, 21 nt, synthetic construct
  source 1..21: mol_type = other RNA
  modified_base 1: mod_base = OTHER; note = 2'-O-methylguanosine-3'-phosphorothioate
  modified_base 2: mod_base = OTHER; note = 2'-O-methyluridine-3'-phosphorothioate
  modified_base 3: mod_base = OTHER; note = 2'-O-methyluridine-3'-phosphate
  modified_base 4: mod_base = OTHER; note = 2'-O-methylguanosine-3'-phosphate
  modified_base 5: mod_base = OTHER; note = 2'-O-methyladenosine-3'-phosphate
  modified_base 6: mod_base = OTHER; note = 2'-O-methylcytidine-3'-phosphate
  modified_base 7: mod_base = OTHER; note = 2'-fluorouridine-3'-phosphate
  modified_base 8: mod_base = OTHER; note = 2'-O-methyluridine-3'-phosphate
  modified_base 9: mod_base = OTHER; note = 2'-fluorocytidine-3'-phosphate
  modified_base 10: mod_base = OTHER; note = 2'-fluoroadenosine-3'-phosphate
  modified_base 11: mod_base = OTHER; note = 2'-fluorouridine-3'-phosphate
  modified_base 12: mod_base = OTHER; note = 2'-O-methylcytidine-3'-phosphate
  modified_base 13: mod_base = OTHER; note = 2'-O-methylcytidine-3'-phosphate
  modified_base 14: mod_base = OTHER; note = 2'-O-methyladenosine-3'-phosphate
  modified_base 15: mod_base = OTHER; note = 2'-O-methyladenosine-3'-phosphate
  modified_base 16: mod_base = OTHER; note = 2'-O-methyluridine-3'-phosphate
  modified_base 17: mod_base = OTHER; note = 2'-O-methylcytidine-3'-phosphate
  modified_base 18: mod_base = OTHER; note = 2'-O-methyluridine-3'-phosphate
  modified_base 19: mod_base = OTHER; note = 2'-O-methylcytidine-3'-phosphorothioate
  modified_base 20: mod_base = OTHER; note = 2'-O-methyluridine-3'-phosphorothioate
  modified_base 21: mod_base = OTHER; note = 2'-O-methyladenosine-3'-phosphate
gttgacttcatccaatctcta

SEQ ID NO: 2156 - RNA, 21 nt, synthetic construct
  source 1..21: mol_type = other RNA
  modified_base 1: mod_base = OTHER; note = 2'-O-methylcytidine-3'-phosphorothioate
  modified_base 2: mod_base = OTHER; note = 2'-O-methyluridine-3'-phosphorothioate
  modified_base 3: mod_base = OTHER; note = 2'-O-methyladenosine-3'-phosphate
  modified_base 4: mod_base = OTHER; note = 2'-O-methylcytidine-3'-phosphate
  modified_base 5: mod_base = OTHER; note = 2'-O-methyladenosine-3'-phosphate
  modified_base 6: mod_base = OTHER; note = 2'-O-methylcytidine-3'-phosphate
  modified_base 7: mod_base = OTHER; note = 2'-fluoroadenosine-3'-phosphate
  modified_base 8: mod_base = OTHER; note = 2'-O-methyladenosine-3'-phosphate
  modified_base 9: mod_base = OTHER; note = 2'-fluorouridine-3'-phosphate
  modified_base 10: mod_base = OTHER; note = 2'-fluoroguanosine-3'-phosphate
  modified_base 11: mod_base = OTHER; note = 2'-fluoroadenosine-3'-phosphate
  modified_base 12: mod_base = OTHER; note = 2'-O-methyladenosine-3'-phosphate
  modified_base 13: mod_base = OTHER; note = 2'-O-methylcytidine-3'-phosphate
  modified_base 14: mod_base = OTHER; note = 2'-O-methyluridine-3'-phosphate
  modified_base 15: mod_base = OTHER; note = 2'-O-methyluridine-3'-phosphate
  modified_base 16: mod_base = OTHER; note = 2'-O-methylcytidine-3'-phosphate
  modified_base 17: mod_base = OTHER; note = 2'-O-methyluridine-3'-phosphate
  modified_base 18: mod_base = OTHER; note = 2'-O-methyluridine-3'-phosphate
  modified_base 19: mod_base = OTHER; note = 2'-O-methyladenosine-3'-phosphorothioate
  modified_base 20: mod_base = OTHER; note = 2'-O-methyladenosine-3'-phosphorothioate
  modified_base 21: mod_base = OTHER; note = 2'-O-methyladenosine-3'-phosphate
ctacacaatgaacttcttaaa

SEQ ID NO: 2157 - RNA, 21 nt, synthetic construct
  source 1..21: mol_type = other RNA
  modified_base 1: mod_base = OTHER; note = 2'-O-methylcytidine-3'-phosphorothioate
  modified_base 2: mod_base = OTHER; note = 2'-O-methyladenosine-3'-phosphorothioate
  modified_base 3: mod_base = OTHER; note = 2'-O-methylcytidine-3'-phosphate
  modified_base 4: mod_base = OTHER; note = 2'-O-methyladenosine-3'-phosphate
  modified_base 5: mod_base = OTHER; note = 2'-O-methyluridine-3'-phosphate
  modified_base 6: mod_base = OTHER; note = 2'-O-methylcytidine-3'-phosphate
  modified_base 7: mod_base = OTHER; note = 2'-fluorouridine-3'-phosphate
  modified_base 8: mod_base = OTHER; note = 2'-O-methyladenosine-3'-phosphate
  modified_base 9: mod_base = OTHER; note = 2'-fluoroguanosine-3'-phosphate
  modified_base 10: mod_base = OTHER; note = 2'-fluoroadenosine-3'-phosphate
  modified_base 11: mod_base = OTHER; note = 2'-fluoroadenosine-3'-phosphate
  modified_base 12: mod_base = OTHER; note = 2'-O-methyluridine-3'-phosphate
  modified_base 13: mod_base = OTHER; note = 2'-O-methyluridine-3'-phosphate
  modified_base 14: mod_base = OTHER; note = 2'-O-methylcytidine-3'-phosphate
  modified_base 15: mod_base = OTHER; note = 2'-O-methyluridine-3'-phosphate
  modified_base 16: mod_base = OTHER; note = 2'-O-methyluridine-3'-phosphate
  modified_base 17: mod_base = OTHER; note = 2'-O-methyladenosine-3'-phosphate
  modified_base 18: mod_base = OTHER; note = 2'-O-methyladenosine-3'-phosphate
  modified_base 19: mod_base = OTHER; note = 2'-O-methyluridine-3'-phosphorothioate
  modified_base 20: mod_base = OTHER; note = 2'-O-methyluridine-3'-phosphorothioate
  modified_base 21: mod_base = OTHER; note = 2'-O-methyladenosine-3'-phosphate
cacatctagaattcttaatta

SEQ ID NO: 2158 - RNA, 21 nt, synthetic construct
  source 1..21: mol_type = other RNA
  modified_base 1: mod_base = OTHER; note = 2'-O-methyladenosine-3'-phosphorothioate
  modified_base 2: mod_base = OTHER; note = 2'-O-methyladenosine-3'-phosphorothioate
  modified_base 3: mod_base = OTHER; note = 2'-O-methyladenosine-3'-phosphate
  modified_base 4: mod_base = OTHER; note = 2'-O-methyluridine-3'-phosphate
  modified_base 5: mod_base = OTHER; note = 2'-O-methylcytidine-3'-phosphate
  modified_base 6: mod_base = OTHER; note = 2'-O-methyluridine-3'-phosphate
  modified_base 7: mod_base = OTHER; note = 2'-fluorocytidine-3'-phosphate
  modified_base 8: mod_base = OTHER; note = 2'-O-methyluridine-3'-phosphate
  modified_base 9: mod_base = OTHER; note = 2'-fluorocytidine-3'-phosphate
  modified_base 10: mod_base = OTHER; note = 2'-fluoroadenosine-3'-phosphate
  modified_base 11: mod_base = OTHER; note = 2'-fluorouridine-3'-phosphate
  modified_base 12: mod_base = OTHER; note = 2'-O-methyladenosine-3'-phosphate
  modified_base 13: mod_base = OTHER; note = 2'-O-methylguanosine-3'-phosphate
  modified_base 14: mod_base = OTHER; note = 2'-O-methylcytidine-3'-phosphate
  modified_base 15: mod_base = OTHER; note = 2'-O-methyluridine-3'-phosphate
  modified_base 16: mod_base = OTHER; note = 2'-O-methyluridine-3'-phosphate
  modified_base 17: mod_base = OTHER; note = 2'-O-methyluridine-3'-phosphate
  modified_base 18: mod_base = OTHER; note = 2'-O-methylcytidine-3'-phosphate
  modified_base 19: mod_base = OTHER; note = 2'-O-methyluridine-3'-phosphorothioate
  modified_base 20: mod_base = OTHER; note = 2'-O-methyluridine-3'-phosphorothioate
  modified_base 21: mod_base = OTHER; note = 2'-O-methyladenosine-3'-phosphate
aaatctctcatagctttctta

SEQ ID NO: 2159 - RNA, 21 nt, synthetic construct
  source 1..21: mol_type = other RNA
  modified_base 1: mod_base = OTHER; note = 2'-O-methylcytidine-3'-phosphorothioate
  modified_base 2: mod_base = OTHER; note = 2'-O-methylcytidine-3'-phosphorothioate
  modified_base 3: mod_base = OTHER; note = 2'-O-methyluridine-3'-phosphate
  modified_base 4: mod_base = OTHER; note = 2'-O-methyladenosine-3'-phosphate
  modified_base 5: mod_base = OTHER; note = 2'-O-methylcytidine-3'-phosphate
  modified_base 6: mod_base = OTHER; note = 2'-O-methyluridine-3'-phosphate
  modified_base 7: mod_base = OTHER; note = 2'-fluoroadenosine-3'-phosphate
  modified_base 8: mod_base = OTHER; note = 2'-O-methyluridine-3'-phosphate
  modified_base 9: mod_base = OTHER; note = 2'-fluorouridine-3'-phosphate
  modified_base 10: mod_base = OTHER; note = 2'-fluoroguanosine-3'-phosphate
  modified_base 11: mod_base = OTHER; note = 2'-fluorouridine-3'-phosphate
  modified_base 12: mod_base = OTHER; note = 2'-O-methyladenosine-3'-phosphate
  modified_base 13: mod_base = OTHER; note = 2'-O-methylguanosine-3'-phosphate
  modified_base 14: mod_base = OTHER; note = 2'-O-methyladenosine-3'-phosphate
  modified_base 15: mod_base = OTHER; note = 2'-O-methyladenosine-3'-phosphate
  modified_base 16: mod_base = OTHER; note = 2'-O-methyluridine-3'-phosphate
  modified_base 17: mod_base = OTHER; note = 2'-O-methyluridine-3'-phosphate
  modified_base 18: mod_base = OTHER; note = 2'-O-methyladenosine-3'-phosphate
  modified_base 19: mod_base = OTHER; note = 2'-O-methylcytidine-3'-phosphorothioate
  modified_base 20: mod_base = OTHER; note = 2'-O-methyluridine-3'-phosphorothioate
  modified_base 21: mod_base = OTHER; note = 2'-O-methyladenosine-3'-phosphate
cctactattgtagaattacta

SEQ ID NO: 2160 - RNA, 21 nt, synthetic construct
  source 1..21: mol_type = other RNA
  modified_base 1: mod_base = OTHER; note = 2'-O-methyladenosine-3'-phosphorothioate
  modified_base 2: mod_base = OTHER; note = 2'-O-methyluridine-3'-phosphorothioate
  modified_base 3: mod_base = OTHER; note = 2'-O-methylcytidine-3'-phosphate
  modified_base 4: mod_base = OTHER; note = 2'-O-methyluridine-3'-phosphate
  modified_base 5: mod_base = OTHER; note = 2'-O-methyluridine-3'-phosphate
  modified_base 6: mod_base = OTHER; note = 2'-O-methylcytidine-3'-phosphate
  modified_base 7: mod_base = OTHER; note = 2'-fluorouridine-3'-phosphate
  modified_base 8: mod_base = OTHER; note = 2'-O-methyluridine-3'-phosphate
  modified_base 9: mod_base = OTHER; note = 2'-fluorouridine-3'-phosphate
  modified_base 10: mod_base = OTHER; note = 2'-fluorouridine-3'-phosphate
  modified_base 11: mod_base = OTHER; note = 2'-fluoroadenosine-3'-phosphate
  modified_base 12: mod_base = OTHER; note = 2'-O-methylguanosine-3'-phosphate
  modified_base 13: mod_base = OTHER; note = 2'-O-methyluridine-3'-phosphate
  modified_base 14: mod_base = OTHER; note = 2'-O-methylguanosine-3'-phosphate
  modified_base 15: mod_base = OTHER; note = 2'-O-methylcytidine-3'-phosphate
  modified_base 16: mod_base = OTHER; note = 2'-O-methyladenosine-3'-phosphate
  modified_base 17: mod_base = OTHER; note = 2'-O-methyluridine-3'-phosphate
  modified_base 18: mod_base = OTHER; note = 2'-O-methyluridine-3'-phosphate
  modified_base 19: mod_base = OTHER; note = 2'-O-methyladenosine-3'-phosphorothioate
  modified_base 20: mod_base = OTHER; note = 2'-O-methyladenosine-3'-phosphorothioate
  modified_base 21: mod_base = OTHER; note = 2'-O-methyladenosine-3'-phosphate
atcttcttttagtgcattaaa

SEQ ID NO: 2161 - RNA, 21 nt, synthetic construct
  source 1..21: mol_type = other RNA
  modified_base 1: mod_base = OTHER; note = 2'-O-methylcytidine-3'-phosphorothioate
  modified_base 2: mod_base = OTHER; note = 2'-O-methyluridine-3'-phosphorothioate
  modified_base 3: mod_base = OTHER; note = 2'-O-methylcytidine-3'-phosphate
  modified_base 4: mod_base = OTHER; note = 2'-O-methyladenosine-3'-phosphate
  modified_base 5: mod_base = OTHER; note = 2'-O-methyluridine-3'-phosphate
  modified_base 6: mod_base = OTHER; note = 2'-O-methylguanosine-3'-phosphate
  modified_base 7: mod_base = OTHER; note = 2'-fluorouridine-3'-phosphate
  modified_base 8: mod_base = OTHER; note = 2'-O-methyladenosine-3'-phosphate
  modified_base 9: mod_base = OTHER; note = 2'-fluorocytidine-3'-phosphate
  modified_base 10: mod_base = OTHER; note = 2'-fluorouridine-3'-phosphate
  modified_base 11: mod_base = OTHER; note = 2'-fluorocytidine-3'-phosphate
  modified_base 12: mod_base = OTHER; note = 2'-O-methyluridine-3'-phosphate
  modified_base 13: mod_base = OTHER; note = 2'-O-methyluridine-3'-phosphate
  modified_base 14: mod_base = OTHER; note = 2'-O-methylcytidine-3'-phosphate
  modified_base 15: mod_base = OTHER; note = 2'-O-methyluridine-3'-phosphate
  modified_base 16: mod_base = OTHER; note = 2'-O-methylguanosine-3'-phosphate
  modified_base 17: mod_base = OTHER; note = 2'-O-methyladenosine-3'-phosphate
  modified_base 18: mod_base = OTHER; note = 2'-O-methyluridine-3'-phosphate
  modified_base 19: mod_base = OTHER; note = 2'-O-methyluridine-3'-phosphorothioate
  modified_base 20: mod_base = OTHER; note = 2'-O-methylcytidine-3'-phosphorothioate
  modified_base 21: mod_base = OTHER; note = 2'-O-methyladenosine-3'-phosphate
ctcatgtactcttctgattca

SEQ ID NO: 2162 - RNA, 21 nt, synthetic construct
  source 1..21: mol_type = other RNA
  modified_base 1: mod_base = OTHER; note = 2'-O-methyluridine-3'-phosphorothioate
  modified_base 2: mod_base = OTHER; note = 2'-O-methyluridine-3'-phosphorothioate
  modified_base 3: mod_base = OTHER; note = 2'-O-methyluridine-3'-phosphate
  modified_base 4: mod_base = OTHER; note = 2'-O-methylcytidine-3'-phosphate
  modified_base 5: mod_base = OTHER; note = 2'-O-methyluridine-3'-phosphate
  modified_base 6: mod_base = OTHER; note = 2'-O-methylcytidine-3'-phosphate
  modified_base 7: mod_base = OTHER; note = 2'-fluorouridine-3'-phosphate
  modified_base 8: mod_base = OTHER; note = 2'-O-methyluridine-3'-phosphate
  modified_base 9: mod_base = OTHER; note = 2'-fluorouridine-3'-phosphate
  modified_base 10: mod_base = OTHER; note = 2'-fluoroguanosine-3'-phosphate
  modified_base 11: mod_base = OTHER; note = 2'-fluorouridine-3'-phosphate
  modified_base 12: mod_base = OTHER; note = 2'-O-methyladenosine-3'-phosphate
  modified_base 13: mod_base = OTHER; note = 2'-O-methylcytidine-3'-phosphate
  modified_base 14: mod_base = OTHER; note = 2'-O-methylcytidine-3'-phosphate
  modified_base 15: mod_base = OTHER; note = 2'-O-methyluridine-3'-phosphate
  modified_base 16: mod_base = OTHER; note = 2'-O-methyluridine-3'-phosphate
  modified_base 17: mod_base = OTHER; note = 2'-O-methylguanosine-3'-phosphate
  modified_base 18: mod_base = OTHER; note = 2'-O-methylguanosine-3'-phosphate
  modified_base 19: mod_base = OTHER; note = 2'-O-methyladenosine-3'-phosphorothioate
  modified_base 20: mod_base = OTHER; note = 2'-O-methyladenosine-3'-phosphorothioate
  modified_base 21: mod_base = OTHER; note = 2'-O-methyladenosine-3'-phosphate
tttctctttgtaccttggaaa

SEQ ID NO: 2163 - RNA, 21 nt, synthetic construct
  source 1..21: mol_type = other RNA
  modified_base 1: mod_base = OTHER; note = 2'-O-methyluridine-3'-phosphorothioate
  modified_base 2: mod_base = OTHER; note = 2'-O-methylguanosine-3'-phosphorothioate
  modified_base 3: mod_base = OTHER; note = 2'-O-methylguanosine-3'-phosphate
  modified_base 4: mod_base = OTHER; note = 2'-O-methylcytidine-3'-phosphate
  modified_base 5: mod_base = OTHER; note = 2'-O-methyluridine-3'-phosphate
  modified_base 6: mod_base = OTHER; note = 2'-O-methyluridine-3'-phosphate
  modified_base 7: mod_base = OTHER; note = 2'-fluoroadenosine-3'-phosphate
  modified_base 8: mod_base = OTHER; note = 2'-O-methyluridine-3'-phosphate
  modified_base 9: mod_base = OTHER; note = 2'-fluoroadenosine-3'-phosphate
  modified_base 10: mod_base = OTHER; note = 2'-fluorocytidine-3'-phosphate
  modified_base 11: mod_base = OTHER; note = 2'-fluoroadenosine-3'-phosphate
  modified_base 12: mod_base = OTHER; note = 2'-O-methyluridine-3'-phosphate
  modified_base 13: mod_base = OTHER; note = 2'-O-methylcytidine-3'-phosphate
  modified_base 14: mod_base = OTHER; note = 2'-O-methyluridine-3'-phosphate
  modified_base 15: mod_base = OTHER; note = 2'-O-methyluridine-3'-phosphate
  modified_base 16: mod_base = OTHER; note = 2'-O-methylcytidine-3'-phosphate
  modified_base 17: mod_base = OTHER; note = 2'-O-methyladenosine-3'-phosphate
  modified_base 18: mod_base = OTHER; note = 2'-O-methylguanosine-3'-phosphate
  modified_base 19: mod_base = OTHER; note = 2'-O-methyladenosine-3'-phosphorothioate
  modified_base 20: mod_base = OTHER; note = 2'-O-methyladenosine-3'-phosphorothioate
  modified_base 21: mod_base = OTHER; note = 2'-O-methyladenosine-3'-phosphate
tggcttatacatcttcagaaa

SEQ ID NO: 2164 - RNA, 21 nt, synthetic construct
  source 1..21: mol_type = other RNA
  modified_base 1: mod_base = OTHER; note = 2'-O-methylcytidine-3'-phosphorothioate
  modified_base 2: mod_base = OTHER; note = 2'-O-methyladenosine-3'-phosphorothioate
  modified_base 3: mod_base = OTHER; note = 2'-O-methyladenosine-3'-phosphate
  modified_base 4: mod_base = OTHER; note = 2'-O-methyladenosine-3'-phosphate
  modified_base 5: mod_base = OTHER; note = 2'-O-methyladenosine-3'-phosphate
  modified_base 6: mod_base = OTHER; note = 2'-O-methylcytidine-3'-phosphate
  modified_base 7: mod_base = OTHER; note = 2'-fluoroadenosine-3'-phosphate
  modified_base 8: mod_base = OTHER; note = 2'-O-methyladenosine-3'-phosphate
  modified_base 9: mod_base = OTHER; note = 2'-fluoroadenosine-3'-phosphate
  modified_base 10: mod_base = OTHER; note = 2'-fluoroadenosine-3'-phosphate
  modified_base 11: mod_base = OTHER; note = 2'-fluorocytidine-3'-phosphate
  modified_base 12: mod_base = OTHER; note = 2'-O-methyluridine-3'-phosphate
  modified_base 13: mod_base = OTHER; note = 2'-O-methyladenosine-3'-phosphate
  modified_base 14: mod_base = OTHER; note = 2'-O-methylcytidine-3'-phosphate
  modified_base 15: mod_base = OTHER; note = 2'-O-methyluridine-3'-phosphate
  modified_base 16: mod_base = OTHER; note = 2'-O-methylcytidine-3'-phosphate
  modified_base 17: mod_base = OTHER; note = 2'-O-methylcytidine-3'-phosphate
  modified_base 18: mod_base = OTHER; note = 2'-O-methyluridine-3'-phosphate
  modified_base 19: mod_base = OTHER; note = 2'-O-methyladenosine-3'-phosphorothioate
  modified_base 20: mod_base = OTHER; note = 2'-O-methyluridine-3'-phosphorothioate
  modified_base 21: mod_base = OTHER; note = 2'-O-methyladenosine-3'-phosphate
caaaacaaaactactcctata

SEQ ID NO: 2165 - RNA, 21 nt, synthetic construct
  source 1..21: mol_type = other RNA
  modified_base 1: mod_base = OTHER; note = 2'-O-methyladenosine-3'-phosphorothioate
  modified_base 2: mod_base = OTHER; note = 2'-O-methylcytidine-3'-phosphorothioate
  modified_base 3: mod_base = OTHER; note = 2'-O-methyluridine-3'-phosphate
  modified_base 4: mod_base = OTHER; note = 2'-O-methyladenosine-3'-phosphate
  modified_base 5: mod_base = OTHER; note = 2'-O-methylguanosine-3'-phosphate
  modified_base 6: mod_base = OTHER; note = 2'-O-methylcytidine-3'-phosphate
  modified_base 7: mod_base = OTHER; note = 2'-fluoroadenosine-3'-phosphate
  modified_base 8: mod_base = OTHER; note = 2'-O-methylguanosine-3'-phosphate
  modified_base 9: mod_base = OTHER; note = 2'-fluoroadenosine-3'-phosphate
  modified_base 10: mod_base = OTHER; note = 2'-fluoroadenosine-3'-phosphate
  modified_base 11: mod_base = OTHER; note = 2'-fluorocytidine-3'-phosphate
  modified_base 12: mod_base = OTHER; note = 2'-O-methyluridine-3'-phosphate
  modified_base 13: mod_base = OTHER; note = 2'-O-methylcytidine-3'-phosphate
  modified_base 14: mod_base = OTHER; note = 2'-O-methyluridine-3'-phosphate
  modified_base 15: mod_base = OTHER; note = 2'-O-methyluridine-3'-phosphate
  modified_base 16: mod_base = OTHER; note = 2'-O-methyladenosine-3'-phosphate
  modified_base 17: mod_base = OTHER; note = 2'-O-methyluridine-3'-phosphate
  modified_base 18: mod_base = OTHER; note = 2'-O-methylguanosine-3'-phosphate
  modified_base 19: mod_base = OTHER; note = 2'-O-methyladenosine-3'-phosphorothioate
  modified_base 20: mod_base = OTHER; note = 2'-O-methyladenosine-3'-phosphorothioate
  modified_base 21: mod_base = OTHER; note = 2'-O-methyladenosine-3'-phosphate
actagcagaactcttatgaaa

SEQ ID NO: 2166 - RNA, 21 nt, synthetic construct
  source 1..21: mol_type = other RNA
  modified_base 1: mod_base = OTHER; note = 2'-O-methylcytidine-3'-phosphorothioate
  modified_base 2: mod_base = OTHER; note = 2'-O-methylcytidine-3'-phosphorothioate
  modified_base 3: mod_base = OTHER; note = 2'-O-methyladenosine-3'-phosphate
  modified_base 4: mod_base = OTHER; note = 2'-O-methyladenosine-3'-phosphate
  modified_base 5: mod_base = OTHER; note = 2'-O-methylguanosine-3'-phosphate
  modified_base 6: mod_base = OTHER; note = 2'-O-methyluridine-3'-phosphate
  modified_base 7: mod_base = OTHER; note = 2'-fluorocytidine-3'-phosphate
  modified_base 8: mod_base = OTHER; note = 2'-O-methyladenosine-3'-phosphate
  modified_base 9: mod_base = OTHER; note = 2'-fluorocytidine-3'-phosphate
  modified_base 10: mod_base = OTHER; note = 2'-fluorouridine-3'-phosphate
  modified_base 11: mod_base = OTHER; note = 2'-fluorocytidine-3'-phosphate
  modified_base 12: mod_base = OTHER; note = 2'-O-methyluridine-3'-phosphate
  modified_base 13: mod_base = OTHER; note = 2'-O-methyladenosine-3'-phosphate
  modified_base 14: mod_base = OTHER; note = 2'-O-methyluridine-3'-phosphate
  modified_base 15: mod_base = OTHER; note = 2'-O-methyladenosine-3'-phosphate
  modified_base 16: mod_base = OTHER; note = 2'-O-methyladenosine-3'-phosphate
  modified_base 17: mod_base = OTHER; note = 2'-O-methyluridine-3'-phosphate
  modified_base 18: mod_base = OTHER; note = 2'-O-methyluridine-3'-phosphate
  modified_base 19: mod_base = OTHER; note = 2'-O-methylcytidine-3'-phosphorothioate
  modified_base 20: mod_base = OTHER; note = 2'-O-methylcytidine-3'-phosphorothioate
  modified_base 21: mod_base = OTHER; note = 2'-O-methyladenosine-3'-phosphate
ccaagtcactctataattcca

SEQ ID NO: 2167 - RNA, 21 nt, synthetic construct
  source 1..21: mol_type = other RNA
  modified_base 1: mod_base = OTHER; note = 2'-O-methyluridine-3'-phosphorothioate
  modified_base 2: mod_base = OTHER; note = 2'-O-methylcytidine-3'-phosphorothioate
  modified_base 3: mod_base = OTHER; note = 2'-O-methylcytidine-3'-phosphate
  modified_base 4: mod_base = OTHER; note = 2'-O-methyladenosine-3'-phosphate
  modified_base 5: mod_base = OTHER; note = 2'-O-methyluridine-3'-phosphate
  modified_base 6: mod_base = OTHER; note = 2'-O-methyluridine-3'-phosphate
  modified_base 7: mod_base = OTHER; note = 2'-fluorouridine-3'-phosphate
  modified_base 8: mod_base = OTHER; note = 2'-O-methyluridine-3'-phosphate
  modified_base 9: mod_base = OTHER; note = 2'-fluorouridine-3'-phosphate
  modified_base 10: mod_base = OTHER; note = 2'-fluorocytidine-3'-phosphate
  modified_base 11: mod_base = OTHER; note = 2'-fluorouridine-3'-phosphate
  modified_base 12: mod_base = OTHER; note = 2'-O-methyluridine-3'-phosphate
  modified_base 13: mod_base = OTHER; note = 2'-O-methylguanosine-3'-phosphate
  modified_base 14: mod_base = OTHER; note = 2'-O-methyluridine-3'-phosphate
  modified_base 15: mod_base = OTHER; note = 2'-O-methylcytidine-3'-phosphate
  modified_base 16: mod_base = OTHER; note = 2'-O-methyladenosine-3'-phosphate
  modified_base 17: mod_base = OTHER; note = 2'-O-methyluridine-3'-phosphate
  modified_base 18: mod_base = OTHER; note = 2'-O-methyluridine-3'-phosphate
  modified_base 19: mod_base = OTHER; note = 2'-O-methyladenosine-3'-phosphorothioate
  modified_base 20: mod_base = OTHER; note = 2'-O-methyluridine-3'-phosphorothioate
  modified_base 21: mod_base = OTHER; note = 2'-O-methyladenosine-3'-phosphate
tccatttttcttgtcattata

SEQ ID NO: 2168 - RNA, 21 nt, synthetic construct
  source 1..21: mol_type = other RNA
  modified_base 1: mod_base = OTHER; note = 2'-O-methylcytidine-3'-phosphorothioate
  modified_base 2: mod_base = OTHER; note = 2'-O-methyladenosine-3'-phosphorothioate
  modified_base 3: mod_base = OTHER; note = 2'-O-methyladenosine-3'-phosphate
  modified_base 4: mod_base = OTHER; note = 2'-O-methylcytidine-3'-phosphate
  modified_base 5: mod_base = OTHER; note = 2'-O-methyladenosine-3'-phosphate
  modified_base 6: mod_base = OTHER; note = 2'-O-methylcytidine-3'-phosphate
  modified_base 7: mod_base = OTHER; note = 2'-fluorocytidine-3'-phosphate
  modified_base 8: mod_base = OTHER; note = 2'-O-methyluridine-3'-phosphate
  modified_base 9: mod_base = OTHER; note = 2'-fluorocytidine-3'-phosphate
  modified_base 10: mod_base = OTHER; note = 2'-fluoroadenosine-3'-phosphate
  modified_base 11: mod_base = OTHER; note = 2'-fluoroadenosine-3'-phosphate
  modified_base 12: mod_base = OTHER; note = 2'-O-methylcytidine-3'-phosphate
  modified_base 13: mod_base = OTHER; note = 2'-O-methyluridine-3'-phosphate
  modified_base 14: mod_base = OTHER; note = 2'-O-methylcytidine-3'-phosphate
  modified_base 15: mod_base = OTHER; note = 2'-O-methyladenosine-3'-phosphate
  modified_base 16: mod_base = OTHER; note = 2'-O-methyluridine-3'-phosphate
  modified_base 17: mod_base = OTHER; note = 2'-O-methylcytidine-3'-phosphate
  modified_base 18: mod_base = OTHER; note = 2'-O-methyluridine-3'-phosphate
  modified_base 19: mod_base = OTHER; note = 2'-O-methyluridine-3'-phosphorothioate
  modified_base 20: mod_base = OTHER; note = 2'-O-methyluridine-3'-phosphorothioate
  modified_base 21: mod_base = OTHER; note = 2'-O-methyladenosine-3'-phosphate
caacacctcaactcatcttta

SEQ ID NO: 2169 - RNA, 21 nt, synthetic construct
  source 1..21: mol_type = other RNA
  modified_base 1: mod_base = OTHER; note = 2'-O-methyladenosine-3'-phosphorothioate
  modified_base 2: mod_base = OTHER; note = 2'-O-methylcytidine-3'-phosphorothioate
  modified_base 3: mod_base = OTHER; note = 2'-O-methyluridine-3'-phosphate
  modified_base 4: mod_base = OTHER; note = 2'-O-methylcytidine-3'-phosphate
  modified_base 5: mod_base = OTHER; note = 2'-O-methyluridine-3'-phosphate
  modified_base 6: mod_base = OTHER; note = 2'-O-methylguanosine-3'-phosphate
  modified_base 7: mod_base = OTHER; note = 2'-fluoroadenosine-3'-phosphate
  modified_base 8: mod_base = OTHER; note = 2'-O-methyladenosine-3'-phosphate
  modified_base 9: mod_base = OTHER; note = 2'-fluoroadenosine-3'-phosphate
  modified_base 10: mod_base = OTHER; note = 2'-fluoroguanosine-3'-phosphate
  modified_base 11: mod_base = OTHER; note = 2'-fluoroadenosine-3'-phosphate
  modified_base 12: mod_base = OTHER; note = 2'-O-methyluridine-3'-phosphate
  modified_base 13: mod_base = OTHER; note = 2'-O-methylcytidine-3'-phosphate
  modified_base 14: mod_base = OTHER; note = 2'-O-methyluridine-3'-phosphate
  modified_base 15: mod_base = OTHER; note = 2'-O-methylguanosine-3'-phosphate
  modified_base 16: mod_base = OTHER; note = 2'-O-methyladenosine-3'-phosphate
  modified_base 17: mod_base = OTHER; note = 2'-O-methyluridine-3'-phosphate
  modified_base 18: mod_base = OTHER; note = 2'-O-methyluridine-3'-phosphate
  modified_base 19: mod_base = OTHER; note = 2'-O-methyluridine-3'-phosphorothioate
  modified_base 20: mod_base = OTHER; note = 2'-O-methyladenosine-3'-phosphorothioate
  modified_base 21: mod_base = OTHER; note = 2'-O-methyladenosine-3'-phosphate
actctgaaagatctgatttaa

SEQ ID NO: 2170 - RNA, 21 nt, synthetic construct
  source 1..21: mol_type = other RNA
  modified_base 1: mod_base = OTHER; note = 2'-O-methylcytidine-3'-phosphorothioate
  modified_base 2: mod_base = OTHER; note = 2'-O-methyluridine-3'-phosphorothioate
  modified_base 3: mod_base = OTHER; note = 2'-O-methyladenosine-3'-phosphate
  modified_base 4: mod_base = OTHER; note = 2'-O-methylguanosine-3'-phosphate
  modified_base 5: mod_base = OTHER; note = 2'-O-methyluridine-3'-phosphate
  modified_base 6: mod_base = OTHER; note = 2'-O-methyluridine-3'-phosphate
  modified_base 7: mod_base = OTHER; note = 2'-fluorocytidine-3'-phosphate
  modified_base 8: mod_base = OTHER; note = 2'-O-methyluridine-3'-phosphate
  modified_base 9: mod_base = OTHER; note = 2'-fluorouridine-3'-phosphate
  modified_base 10: mod_base = OTHER; note = 2'-fluorouridine-3'-phosphate
  modified_base 11: mod_base = OTHER; note = 2'-fluorouridine-3'-phosphate
  modified_base 12: mod_base = OTHER; note = 2'-O-methylcytidine-3'-phosphate
  modified_base 13: mod_base = OTHER; note = 2'-O-methylcytidine-3'-phosphate
  modified_base 14: mod_base = OTHER; note = 2'-O-methylguanosine-3'-phosphate
  modified_base 15: mod_base = OTHER; note = 2'-O-methylcytidine-3'-phosphate
  modified_base 16: mod_base = OTHER; note = 2'-O-methyladenosine-3'-phosphate
  modified_base 17: mod_base = OTHER; note = 2'-O-methyladenosine-3'-phosphate
  modified_base 18: mod_base = OTHER; note = 2'-O-methyluridine-3'-phosphate
  modified_base 19: mod_base = OTHER; note = 2'-O-methylguanosine-3'-phosphorothioate
  modified_base 20: mod_base = OTHER; note = 2'-O-methyladenosine-3'-phosphorothioate
  modified_base 21: mod_base = OTHER; note = 2'-O-methyladenosine-3'-phosphate
ctagttcttttccgcaatgaa

SEQ ID NO: 2171 - RNA, 21 nt, synthetic construct
  source 1..21: mol_type = other RNA
  modified_base 1: mod_base = OTHER; note = 2'-O-methylcytidine-3'-phosphorothioate
  modified_base 2: mod_base = OTHER; note = 2'-O-methyluridine-3'-phosphorothioate
  modified_base 3: mod_base = OTHER; note = 2'-O-methyluridine-3'-phosphate
  modified_base 4: mod_base = OTHER; note = 2'-O-methyluridine-3'-phosphate
  modified_base 5: mod_base = OTHER; note = 2'-O-methylcytidine-3'-phosphate
  modified_base 6: mod_base = OTHER; note = 2'-O-methyladenosine-3'-phosphate
  modified_base 7: mod_base = OTHER; note = 2'-fluorocytidine-3'-phosphate
  modified_base 8: mod_base = OTHER; note = 2'-O-methyluridine-3'-phosphate
  modified_base 9: mod_base = OTHER; note = 2'-fluorocytidine-3'-phosphate
  modified_base 10: mod_base = OTHER; note = 2'-fluorouridine-3'-phosphate
  modified_base 11: mod_base = OTHER; note = 2'-fluoroguanosine-3'-phosphate
  modified_base 12: mod_base = OTHER; note = 2'-O-methyladenosine-3'-phosphate
  modified_base 13: mod_base = OTHER; note = 2'-O-methyladenosine-3'-phosphate
  modified_base 14: mod_base = OTHER; note = 2'-O-methylguanosine-3'-phosphate
  modified_base 15: mod_base = OTHER; note = 2'-O-methyladenosine-3'-phosphate
  modified_base 16: mod_base = OTHER; note = 2'-O-methyladenosine-3'-phosphate
  modified_base 17: mod_base = OTHER; note = 2'-O-methyladenosine-3'-phosphate
  modified_base 18: mod_base = OTHER; note = 2'-O-methyluridine-3'-phosphate
  modified_base 19: mod_base = OTHER; note = 2'-O-methylcytidine-3'-phosphorothioate
  modified_base 20: mod_base = OTHER; note = 2'-O-methylcytidine-3'-phosphorothioate
  modified_base 21: mod_base = OTHER; note = 2'-O-methyladenosine-3'-phosphate
ctttcactctgaagaaatcca

SEQ ID NO: 2172 - RNA, 21 nt, synthetic construct
  source 1..21: mol_type = other RNA
  modified_base 1: mod_base = OTHER; note = 2'-O-methyluridine-3'-phosphorothioate
  modified_base 2: mod_base = OTHER; note = 2'-O-methylcytidine-3'-phosphorothioate
  modified_base 3: mod_base = OTHER; note = 2'-O-methyluridine-3'-phosphate
  modified_base 4: mod_base = OTHER; note = 2'-O-methyladenosine-3'-phosphate
  modified_base 5: mod_base = OTHER; note = 2'-O-methyladenosine-3'-phosphate
  modified_base 6: mod_base = OTHER; note = 2'-O-methylcytidine-3'-phosphate
  modified_base 7: mod_base = OTHER; note = 2'-fluorouridine-3'-phosphate
  modified_base 8: mod_base = OTHER; note = 2'-O-methyluridine-3'-phosphate
  modified_base 9: mod_base = OTHER; note = 2'-fluorouridine-3'-phosphate
  modified_base 10: mod_base = OTHER; note = 2'-fluorouridine-3'-phosphate
  modified_base 11: mod_base = OTHER; note = 2'-fluorocytidine-3'-phosphate
  modified_base 12: mod_base = OTHER; note = 2'-O-methyluridine-3'-phosphate
  modified_base 13: mod_base = OTHER; note = 2'-O-methylcytidine-3'-phosphate
  modified_base 14: mod_base = OTHER; note = 2'-O-methyluridine-3'-phosphate
  modified_base 15: mod_base = OTHER; note = 2'-O-methylcytidine-3'-phosphate
  modified_base 16: mod_base = OTHER; note = 2'-O-methyluridine-3'-phosphate
  modified_base 17: mod_base = OTHER; note = 2'-O-methyluridine-3'-phosphate
  modified_base 18: mod_base = OTHER; note = 2'-O-methyluridine-3'-phosphate
  modified_base 19: mod_base = OTHER; note = 2'-O-methylcytidine-3'-phosphorothioate
  modified_base 20: mod_base = OTHER; note = 2'-O-methyluridine-3'-phosphorothioate
  modified_base 21: mod_base = OTHER; note = 2'-O-methyladenosine-3'-phosphate
tctaacttttctctctttcta

SEQ ID NO: 2173 - RNA, 21 nt, synthetic construct
  source 1..21: mol_type = other RNA
  modified_base 1: mod_base = OTHER; note = 2'-O-methyluridine-3'-phosphorothioate
  modified_base 2: mod_base = OTHER; note = 2'-O-methylcytidine-3'-phosphorothioate
  modified_base 3: mod_base = OTHER; note = 2'-O-methyluridine-3'-phosphate
  modified_base 4: mod_base = OTHER; note = 2'-O-methylcytidine-3'-phosphate
  modified_base 5: mod_base = OTHER; note = 2'-O-methyladenosine-3'-phosphate
  modified_base 6: mod_base = OTHER; note = 2'-O-methyladenosine-3'-phosphate
  modified_base 7: mod_base = OTHER; note = 2'-fluorocytidine-3'-phosphate
  modified_base 8: mod_base = OTHER; note = 2'-O-methyluridine-3'-phosphate
  modified_base 9: mod_base = OTHER; note = 2'-fluorouridine-3'-phosphate
  modified_base 10: mod_base = OTHER; note = 2'-fluorouridine-3'-phosphate
  modified_base 11: mod_base = OTHER; note = 2'-fluoroguanosine-3'-phosphate
  modified_base 12: mod_base = OTHER; note = 2'-O-methyluridine-3'-phosphate
  modified_base 13: mod_base = OTHER; note = 2'-O-methylguanosine-3'-phosphate
  modified_base 14: mod_base = OTHER; note = 2'-O-methyluridine-3'-phosphate
  modified_base 15: mod_base = OTHER; note = 2'-O-methylcytidine-3'-phosphate
  modified_base 16: mod_base = OTHER; note = 2'-O-methyladenosine-3'-phosphate
  modified_base 17: mod_base = OTHER; note = 2'-O-methyladenosine-3'-phosphate
  modified_base 18: mod_base = OTHER; note = 2'-O-methyladenosine-3'-phosphate
  modified_base 19: mod_base = OTHER; note = 2'-O-methylguanosine-3'-phosphorothioate
  modified_base 20: mod_base = OTHER; note = 2'-O-methyladenosine-3'-phosphorothioate
  modified_base 21: mod_base = OTHER; note = 2'-O-methyladenosine-3'-phosphate
tctcaactttgtgtcaaagaa

SEQ ID NO: 2174 - RNA, 21 nt, synthetic construct
  source 1..21: mol_type = other RNA
  modified_base 1: mod_base = OTHER; note = 2'-O-methylcytidine-3'-phosphorothioate
  modified_base 2: mod_base = OTHER; note = 2'-O-methyluridine-3'-phosphorothioate
  modified_base 3: mod_base = OTHER; note = 2'-O-methyluridine-3'-phosphate
  modified_base 4: mod_base = OTHER; note = 2'-O-methylcytidine-3'-phosphate
  modified_base 5: mod_base = OTHER; note = 2'-O-methyladenosine-3'-phosphate
  modified_base 6: mod_base = OTHER; note = 2'-O-methyladenosine-3'-phosphate
  modified_base 7: mod_base = OTHER; note = 2'-fluorouridine-3'-phosphate
  modified_base 8: mod_base = OTHER; note = 2'-O-methyladenosine-3'-phosphate
  modified_base 9: mod_base = OTHER; note = 2'-fluoroadenosine-3'-phosphate
  modified_base 10: mod_base = OTHER; note = 2'-fluorouridine-3'-phosphate
  modified_base 11: mod_base = OTHER; note = 2'-fluorocytidine-3'-phosphate
  modified_base 12: mod_base = OTHER; note = 2'-O-methyladenosine-3'-phosphate
  modified_base 13: mod_base = OTHER; note = 2'-O-methyluridine-3'-phosphate
  modified_base 14: mod_base = OTHER; note = 2'-O-methyluridine-3'-phosphate
  modified_base 15: mod_base = OTHER; note = 2'-O-methylcytidine-3'-phosphate
  modified_base 16: mod_base = OTHER; note = 2'-O-methylcytidine-3'-phosphate
  modified_base 17: mod_base = OTHER; note = 2'-O-methyluridine-3'-phosphate
  modified_base 18: mod_base = OTHER; note = 2'-O-methyluridine-3'-phosphate
  modified_base 19: mod_base = OTHER; note = 2'-O-methyluridine-3'-phosphorothioate
  modified_base 20: mod_base = OTHER; note = 2'-O-methyladenosine-3'-phosphorothioate
  modified_base 21: mod_base = OTHER; note = 2'-O-methyladenosine-3'-phosphate
cttcaataatcattcctttaa

SEQ ID NO: 2175 - RNA, 21 nt, synthetic construct
  source 1..21: mol_type = other RNA
  modified_base 1: mod_base = OTHER; note = 2'-O-methyluridine-3'-phosphorothioate
  modified_base 2: mod_base = OTHER; note = 2'-O-methyladenosine-3'-phosphorothioate
  modified_base 3: mod_base = OTHER; note = 2'-O-methyladenosine-3'-phosphate
  modified_base 4: mod_base = OTHER; note = 2'-O-methylcytidine-3'-phosphate
  modified_base 5: mod_base = OTHER; note = 2'-O-methyluridine-3'-phosphate
  modified_base 6: mod_base = OTHER; note = 2'-O-methylguanosine-3'-phosphate
  modified_base 7: mod_base = OTHER; note = 2'-fluorocytidine-3'-phosphate
  modified_base 8: mod_base = OTHER; note = 2'-O-methyluridine-3'-phosphate
  modified_base 9: mod_base = OTHER; note = 2'-fluorocytidine-3'-phosphate
  modified_base 10: mod_base = OTHER; note = 2'-fluorouridine-3'-phosphate
  modified_base 11: mod_base = OTHER; note = 2'-fluorouridine-3'-phosphate
  modified_base 12: mod_base = OTHER; note = 2'-O-methylcytidine-3'-phosphate
  modified_base 13: mod_base = OTHER; note = 2'-O-methylguanosine-3'-phosphate
  modified_base 14: mod_base = OTHER; note = 2'-O-methyluridine-3'-phosphate
  modified_base 15: mod_base = OTHER; note = 2'-O-methyladenosine-3'-phosphate
  modified_base 16: mod_base = OTHER; note = 2'-O-methyluridine-3'-phosphate
  modified_base 17: mod_base = OTHER; note = 2'-O-methyluridine-3'-phosphate
  modified_base 18: mod_base = OTHER; note = 2'-O-methyladenosine-3'-phosphate
  modified_base 19: mod_base = OTHER; note = 2'-O-methyladenosine-3'-phosphorothioate
  modified_base 20: mod_base = OTHER; note = 2'-O-methylguanosine-3'-phosphorothioate
  modified_base 21: mod_base = OTHER; note = 2'-O-methyladenosine-3'-phosphate
taactgctcttcgtattaaga

SEQ ID NO: 2176 - RNA, 21 nt, synthetic construct
  source 1..21: mol_type = other RNA
  modified_base 1: mod_base = OTHER; note = 2'-O-methyluridine-3'-phosphorothioate
  modified_base 2: mod_base = OTHER; note = 2'-O-methylcytidine-3'-phosphorothioate
  modified_base 3: mod_base = OTHER; note = 2'-O-methyluridine-3'-phosphate
  modified_base 4: mod_base = OTHER; note = 2'-O-methyluridine-3'-phosphate
  modified_base 5: mod_base = OTHER; note = 2'-O-methylcytidine-3'-phosphate
  modified_base 6: mod_base = OTHER; note = 2'-O-methyluridine-3'-phosphate
  modified_base 7: mod_base = OTHER; note = 2'-fluoroguanosine-3'-phosphate
  modified_base 8: mod_base = OTHER; note = 2'-O-methyluridine-3'-phosphate
  modified_base 9: mod_base = OTHER; note = 2'-fluorocytidine-3'-phosphate
  modified_base 10: mod_base = OTHER; note = 2'-fluoroadenosine-3'-phosphate
  modified_base 11: mod_base = OTHER; note = 2'-fluorouridine-3'-phosphate
  modified_base 12: mod_base = OTHER; note = 2'-O-methyladenosine-3'-phosphate
  modified_base 13: mod_base = OTHER; note = 2'-O-methylguanosine-3'-phosphate
  modified_base 14: mod_base = OTHER; note = 2'-O-methyluridine-3'-phosphate
  modified_base 15: mod_base = OTHER; note = 2'-O-methyluridine-3'-phosphate
  modified_base 16: mod_base = OTHER; note = 2'-O-methylcytidine-3'-phosphate
  modified_base 17: mod_base = OTHER; note = 2'-O-methylcytidine-3'-phosphate
  modified_base 18: mod_base = OTHER; note = 2'-O-methyladenosine-3'-phosphate
  modified_base 19: mod_base = OTHER; note = 2'-O-methyladenosine-3'-phosphorothioate
  modified_base 20: mod_base = OTHER; note = 2'-O-methylcytidine-3'-phosphorothioate
  modified_base 21: mod_base = OTHER; note = 2'-O-methyladenosine-3'-phosphate
tcttctgtcatagttccaaca

SEQ ID NO: 2177 - RNA, 21 nt, synthetic construct
  source 1..21: mol_type = other RNA
  modified_base 1: mod_base = OTHER; note = 2'-O-methyladenosine-3'-phosphorothioate
  modified_base 2: mod_base = OTHER; note = 2'-O-methyluridine-3'-phosphorothioate
  modified_base 3: mod_base = OTHER; note = 2'-O-methylcytidine-3'-phosphate
  modified_base 4: mod_base = OTHER; note = 2'-O-methyluridine-3'-phosphate
  modified_base 5: mod_base = OTHER; note = 2'-O-methylcytidine-3'-phosphate
  modified_base 6: mod_base = OTHER; note = 2'-O-methyladenosine-3'-phosphate
  modified_base 7: mod_base = OTHER; note = 2'-fluoroguanosine-3'-phosphate
  modified_base 8: mod_base = OTHER; note = 2'-O-methyladenosine-3'-phosphate
  modified_base 9: mod_base = OTHER; note = 2'-fluoroadenosine-3'-phosphate
  modified_base 10: mod_base = OTHER; note = 2'-fluorocytidine-3'-phosphate
  modified_base 11: mod_base = OTHER; note = 2'-fluorocytidine-3'-phosphate
  modified_base 12: mod_base = OTHER; note = 2'-O-methyladenosine-3'-phosphate
  modified_base 13: mod_base = OTHER; note = 2'-O-methyluridine-3'-phosphate
  modified_base 14: mod_base = OTHER; note = 2'-O-methyladenosine-3'-phosphate
  modified_base 15: mod_base = OTHER; note = 2'-O-methyluridine-3'-phosphate
  modified_base 16: mod_base = OTHER; note = 2'-O-methylcytidine-3'-phosphate
  modified_base 17: mod_base = OTHER; note = 2'-O-methyluridine-3'-phosphate
  modified_base 18: mod_base = OTHER; note = 2'-O-methylguanosine-3'-phosphate
  modified_base 19: mod_base = OTHER; note = 2'-O-methyluridine-3'-phosphorothioate
  modified_base 20: mod_base = OTHER; note = 2'-O-methyluridine-3'-phosphorothioate
  modified_base 21: mod_base = OTHER; note = 2'-O-methyladenosine-3'-phosphate
atctcagaaccatatctgtta

SEQ ID NO: 2178 - RNA, 21 nt, synthetic construct
  source 1..21: mol_type = other RNA
  modified_base 1: mod_base = OTHER; note = 2'-O-methyluridine-3'-phosphorothioate
  modified_base 2: mod_base = OTHER; note = 2'-O-methylguanosine-3'-phosphorothioate
  modified_base 3: mod_base = OTHER; note = 2'-O-methyladenosine-3'-phosphate
  modified_base 4: mod_base = OTHER; note = 2'-O-methyladenosine-3'-phosphate
  modified_base 5: mod_base = OTHER; note = 2'-O-methyluridine-3'-phosphate
  modified_base 6: mod_base = OTHER; note = 2'-O-methylcytidine-3'-phosphate
  modified_base 7: mod_base = OTHER; note = 2'-fluorouridine-3'-phosphate
  modified_base 8: mod_base = OTHER; note = 2'-O-methyladenosine-3'-phosphate
  modified_base 9: mod_base = OTHER; note = 2'-fluorouridine-3'-phosphate
  modified_base 10: mod_base = OTHER; note = 2'-fluorocytidine-3'-phosphate
  modified_base 11: mod_base = OTHER; note = 2'-fluorouridine-3'-phosphate
  modified_base 12: mod_base = OTHER; note = 2'-O-methyluridine-3'-phosphate
  modified_base 13: mod_base = OTHER; note = 2'-O-methylcytidine-3'-phosphate
  modified_base 14: mod_base = OTHER; note = 2'-O-methyladenosine-3'-phosphate
  modified_base 15: mod_base = OTHER; note = 2'-O-methyluridine-3'-phosphate
  modified_base 16: mod_base = OTHER; note = 2'-O-methyluridine-3'-phosphate
  modified_base 17: mod_base = OTHER; note = 2'-O-methyluridine-3'-phosphate
  modified_base 18: mod_base = OTHER; note = 2'-O-methyluridine-3'-phosphate
  modified_base 19: mod_base = OTHER; note = 2'-O-methyladenosine-3'-phosphorothioate
  modified_base 20: mod_base = OTHER; note = 2'-O-methylcytidine-3'-phosphorothioate
  modified_base 21: mod_base = OTHER; note = 2'-O-methyladenosine-3'-phosphate
tgaatctatcttcattttaca

SEQ ID NO: 2179 - RNA, 21 nt, synthetic construct
  source 1..21: mol_type = other RNA
  modified_base 1: mod_base = OTHER; note = 2'-O-methyladenosine-3'-phosphorothioate
  modified_base 2: mod_base = OTHER; note = 2'-O-methylcytidine-3'-phosphorothioate
  modified_base 3: mod_base = OTHER; note = 2'-O-methylcytidine-3'-phosphate
  modified_base 4: mod_base = OTHER; note = 2'-O-methyladenosine-3'-phosphate
  modified_base 5: mod_base = OTHER; note = 2'-O-methylcytidine-3'-phosphate
  modified_base 6: mod_base = OTHER; note = 2'-O-methyluridine-3'-phosphate
  modified_base 7: mod_base = OTHER; note = 2'-fluoroadenosine-3'-phosphate
  modified_base 8: mod_base = OTHER; note = 2'-O-methyladenosine-3'-phosphate
  modified_base 9: mod_base = OTHER; note = 2'-fluoroadenosine-3'-phosphate
  modified_base 10: mod_base = OTHER; note = 2'-fluorocytidine-3'-phosphate
  modified_base 11: mod_base = OTHER; note = 2'-fluorouridine-3'-phosphate
  modified_base 12: mod_base = OTHER; note = 2'-O-methyluridine-3'-phosphate
  modified_base 13: mod_base = OTHER; note = 2'-O-methylguanosine-3'-phosphate
  modified_base 14: mod_base = OTHER; note = 2'-O-methyluridine-3'-phosphate
  modified_base 15: mod_base = OTHER; note = 2'-O-methyluridine-3'-phosphate
  modified_base 16: mod_base = OTHER; note = 2'-O-methylcytidine-3'-phosphate
  modified_base 17: mod_base = OTHER; note = 2'-O-methylcytidine-3'-phosphate
  modified_base 18: mod_base = OTHER; note = 2'-O-methyluridine-3'-phosphate
  modified_base 19: mod_base = OTHER; note = 2'-O-methyluridine-3'-phosphorothioate
  modified_base 20: mod_base = OTHER; note = 2'-O-methyluridine-3'-phosphorothioate
  modified_base 21: mod_base = OTHER; note = 2'-O-methyladenosine-3'-phosphate
accactaaacttgttccttta

SEQ ID NO: 2180 - RNA, 21 nt, synthetic construct
  source 1..21: mol_type = other RNA
  modified_base 1: mod_base = OTHER; note = 2'-O-methyladenosine-3'-phosphorothioate
  modified_base 2: mod_base = OTHER; note = 2'-O-methylguanosine-3'-phosphorothioate
  modified_base 3: mod_base = OTHER; note = 2'-O-methyluridine-3'-phosphate
  modified_base 4: mod_base = OTHER; note = 2'-O-methylguanosine-3'-phosphate
  modified_base 5: mod_base = OTHER; note = 2'-O-methyluridine-3'-phosphate
  modified_base 6: mod_base = OTHER; note = 2'-O-methyluridine-3'-phosphate
  modified_base 7: mod_base = OTHER; note = 2'-fluorocytidine-3'-phosphate
  modified_base 8: mod_base = OTHER; note = 2'-O-methyluridine-3'-phosphate
  modified_base 9: mod_base = OTHER; note = 2'-fluorouridine-3'-phosphate
  modified_base 10: mod_base = OTHER; note = 2'-fluorouridine-3'-phosphate
  modified_base 11: mod_base = OTHER; note = 2'-fluoroadenosine-3'-phosphate
  modified_base 12: mod_base = OTHER; note = 2'-O-methylcytidine-3'-phosphate
  modified_base 13: mod_base = OTHER; note = 2'-O-methyluridine-3'-phosphate
  modified_base 14: mod_base = OTHER; note = 2'-O-methylcytidine-3'-phosphate
  modified_base 15: mod_base = OTHER; note = 2'-O-methylcytidine-3'-phosphate
  modified_base 16: mod_base = OTHER; note = 2'-O-methyluridine-3'-phosphate
  modified_base 17: mod_base = OTHER; note = 2'-O-methyluridine-3'-phosphate
  modified_base 18: mod_base = OTHER; note = 2'-O-methyladenosine-3'-phosphate
  modified_base 19: mod_base = OTHER; note = 2'-O-methylcytidine-3'-phosphorothioate
  modified_base 20: mod_base = OTHER; note = 2'-O-methyladenosine-3'-phosphorothioate
  modified_base 21: mod_base = OTHER; note = 2'-O-methyladenosine-3'-phosphate
agtgttctttactccttacaa

SEQ ID NO: 2181 - RNA, 21 nt, synthetic construct
  source 1..21: mol_type = other RNA
  modified_base 1: mod_base = OTHER; note = 2'-O-methylcytidine-3'-phosphorothioate
  modified_base 2: mod_base = OTHER; note = 2'-O-methyluridine-3'-phosphorothioate
  modified_base 3: mod_base = OTHER; note = 2'-O-methyluridine-3'-phosphate
  modified_base 4: mod_base = OTHER; note = 2'-O-methyluridine-3'-phosphate
  modified_base 5: mod_base = OTHER; note = 2'-O-methyladenosine-3'-phosphate
  modified_base 6: mod_base = OTHER; note = 2'-O-methylcytidine-3'-phosphate
  modified_base 7: mod_base = OTHER; note = 2'-fluorouridine-3'-phosphate
  modified_base 8: mod_base = OTHER; note = 2'-O-methylcytidine-3'-phosphate
  modified_base 9: mod_base = OTHER; note = 2'-fluorouridine-3'-phosphate
  modified_base 10: mod_base = OTHER; note = 2'-fluorouridine-3'-phosphate
  modified_base 11: mod_base = OTHER; note = 2'-fluoroadenosine-3'-phosphate
  modified_base 12: mod_base = OTHER; note = 2'-O-methyladenosine-3'-phosphate
  modified_base 13: mod_base = OTHER; note = 2'-O-methylcytidine-3'-phosphate
  modified_base 14: mod_base = OTHER; note = 2'-O-methyladenosine-3'-phosphate
  modified_base 15: mod_base = OTHER; note = 2'-O-methylguanosine-3'-phosphate
  modified_base 16: mod_base = OTHER; note = 2'-O-methylguanosine-3'-phosphate
  modified_base 17: mod_base = OTHER; note = 2'-O-methyladenosine-3'-phosphate
  modified_base 18: mod_base = OTHER; note = 2'-O-methyluridine-3'-phosphate
  modified_base 19: mod_base = OTHER; note = 2'-O-methyluridine-3'-phosphorothioate
  modified_base 20: mod_base = OTHER; note = 2'-O-methyladenosine-3'-phosphorothioate
  modified_base 21: mod_base = OTHER; note = 2'-O-methyladenosine-3'-phosphate
ctttactcttaacaggattaa

SEQ ID NO: 2182 - RNA, 21 nt, synthetic construct
  source 1..21: mol_type = other RNA
  modified_base 1: mod_base = OTHER; note = 2'-O-methyluridine-3'-phosphorothioate
  modified_base 2: mod_base = OTHER; note = 2'-O-methyladenosine-3'-phosphorothioate
  modified_base 3: mod_base = OTHER; note = 2'-O-methyluridine-3'-phosphate
  modified_base 4: mod_base = OTHER; note = 2'-O-methyladenosine-3'-phosphate
  modified_base 5: mod_base = OTHER; note = 2'-O-methylcytidine-3'-phosphate
  modified_base 6: mod_base = OTHER; note = 2'-O-methylcytidine-3'-phosphate
  modified_base 7: mod_base = OTHER; note = 2'-fluorouridine-3'-phosphate
  modified_base 8: mod_base = OTHER; note = 2'-O-methyladenosine-3'-phosphate
  modified_base 9: mod_base = OTHER; note = 2'-fluoroadenosine-3'-phosphate
  modified_base 10: mod_base = OTHER; note = 2'-fluoroguanosine-3'-phosphate
  modified_base 11: mod_base = OTHER; note = 2'-fluoroadenosine-3'-phosphate
  modified_base 12: mod_base = OTHER; note = 2'-O-methyladenosine-3'-phosphate
  modified_base 13: mod_base = OTHER; note = 2'-O-methylcytidine-3'-phosphate
  modified_base 14: mod_base = OTHER; note = 2'-O-methyladenosine-3'-phosphate
  modified_base 15: mod_base = OTHER; note = 2'-O-methyluridine-3'-phosphate
  modified_base 16: mod_base = OTHER; note = 2'-O-methyladenosine-3'-phosphate
  modified_base 17: mod_base = OTHER; note = 2'-O-methyluridine-3'-phosphate
  modified_base 18: mod_base = OTHER; note = 2'-O-methyluridine-3'-phosphate
  modified_base 19: mod_base = OTHER; note = 2'-O-methyladenosine-3'-phosphorothioate
  modified_base 20: mod_base = OTHER; note = 2'-O-methylcytidine-3'-phosphorothioate
  modified_base 21: mod_base = OTHER; note = 2'-O-methyladenosine-3'-phosphate
tatacctaagaacatattaca

SEQ ID NO: 2183 - RNA, 21 nt, synthetic construct
  source 1..21: mol_type = other RNA
  modified_base 1: mod_base = OTHER; note = 2'-O-methylcytidine-3'-phosphorothioate
  modified_base 2: mod_base = OTHER; note = 2'-O-methyluridine-3'-phosphorothioate
  modified_base 3: mod_base = OTHER; note = 2'-O-methyluridine-3'-phosphate
  modified_base 4: mod_base = OTHER; note = 2'-O-methylcytidine-3'-phosphate
  modified_base 5: mod_base = OTHER; note = 2'-O-methyluridine-3'-phosphate
  modified_base 6: mod_base = OTHER; note = 2'-O-methyladenosine-3'-phosphate
  modified_base 7: mod_base = OTHER; note = 2'-fluorocytidine-3'-phosphate
  modified_base 8: mod_base = OTHER; note = 2'-O-methyluridine-3'-phosphate
  modified_base 9: mod_base = OTHER; note = 2'-fluoroguanosine-3'-phosphate
  modified_base 10: mod_base = OTHER; note = 2'-fluoroadenosine-3'-phosphate
  modified_base 11: mod_base = OTHER; note = 2'-fluoroguanosine-3'-phosphate
  modified_base 12: mod_base = OTHER; note = 2'-O-methyladenosine-3'-phosphate
  modified_base 13: mod_base = OTHER; note = 2'-O-methyluridine-3'-phosphate
  modified_base 14: mod_base = OTHER; note = 2'-O-methylguanosine-3'-phosphate
  modified_base 15: mod_base = OTHER; note = 2'-O-methyladenosine-3'-phosphate
  modified_base 16: mod_base = OTHER; note = 2'-O-methyluridine-3'-phosphate
  modified_base 17: mod_base = OTHER; note = 2'-O-methylcytidine-3'-phosphate
  modified_base 18: mod_base = OTHER; note = 2'-O-methylcytidine-3'-phosphate
  modified_base 19: mod_base = OTHER; note = 2'-O-methyladenosine-3'-phosphorothioate
  modified_base 20: mod_base = OTHER; note = 2'-O-methyladenosine-3'-phosphorothioate
  modified_base 21: mod_base = OTHER; note = 2'-O-methyladenosine-3'-phosphate
cttctactgagatgatccaaa

SEQ ID NO: 2184 - RNA, 21 nt, synthetic construct
  source 1..21: mol_type = other RNA
  modified_base 1: mod_base = OTHER; note = 2'-O-methylcytidine-3'-phosphorothioate
  modified_base 2: mod_base = OTHER; note = 2'-O-methyluridine-3'-phosphorothioate
  modified_base 3: mod_base = OTHER; note = 2'-O-methylguanosine-3'-phosphate
  modified_base 4: mod_base = OTHER; note = 2'-O-methyluridine-3'-phosphate
  modified_base 5: mod_base = OTHER; note = 2'-O-methyladenosine-3'-phosphate
  modified_base 6: mod_base = OTHER; note = 2'-O-methyluridine-3'-phosphate
  modified_base 7: mod_base = OTHER; note = 2'-fluorouridine-3'-phosphate
  modified_base 8: mod_base = OTHER; note = 2'-O-methyluridine-3'-phosphate
  modified_base 9: mod_base = OTHER; note = 2'-fluorouridine-3'-phosphate
  modified_base 10: mod_base = OTHER; note = 2'-fluorocytidine-3'-phosphate
  modified_base 11: mod_base = OTHER; note = 2'-fluorouridine-3'-phosphate
  modified_base 12: mod_base = OTHER; note = 2'-O-methylcytidine-3'-phosphate
  modified_base 13: mod_base = OTHER; note = 2'-O-methyladenosine-3'-phosphate
  modified_base 14: mod_base = OTHER; note = 2'-O-methyluridine-3'-phosphate
  modified_base 15: mod_base = OTHER; note = 2'-O-methyladenosine-3'-phosphate
  modified_base 16: mod_base = OTHER; note = 2'-O-methylguanosine-3'-phosphate
  modified_base 17: mod_base = OTHER; note = 2'-O-methyladenosine-3'-phosphate
  modified_base 18: mod_base = OTHER; note = 2'-O-methylguanosine-3'-phosphate
  modified_base 19: mod_base = OTHER; note = 2'-O-methyluridine-3'-phosphorothioate
  modified_base 20: mod_base = OTHER; note = 2'-O-methyladenosine-3'-phosphorothioate
  modified_base 21: mod_base = OTHER; note = 2'-O-methyladenosine-3'-phosphate
ctgtattttctcatagagtaa

SEQ ID NO: 2185 - RNA, 21 nt, synthetic construct
  source 1..21: mol_type = other RNA
  modified_base 1: mod_base = OTHER; note = 2'-O-methyladenosine-3'-phosphorothioate
  modified_base 2: mod_base = OTHER; note = 2'-O-methylcytidine-3'-phosphorothioate
  modified_base 3: mod_base = OTHER; note = 2'-O-methyluridine-3'-phosphate
  modified_base 4: mod_base = OTHER; note = 2'-O-methyluridine-3'-phosphate
  modified_base 5: mod_base = OTHER; note = 2'-O-methyluridine-3'-phosphate
  modified_base 6: mod_base = OTHER; note = 2'-O-methyluridine-3'-phosphate
  modified_base 7: mod_base = OTHER; note = 2'-fluorocytidine-3'-phosphate
  modified_base 8: mod_base = OTHER; note = 2'-O-methyluridine-3'-phosphate
  modified_base 9: mod_base = OTHER; note = 2'-fluorocytidine-3'-phosphate
  modified_base 10: mod_base = OTHER; note = 2'-fluorouridine-3'-phosphate
  modified_base 11: mod_base = OTHER; note = 2'-fluorouridine-3'-phosphate
  modified_base 12: mod_base = OTHER; note = 2'-O-methyluridine-3'-phosphate
  modified_base 13: mod_base = OTHER; note = 2'-O-methylcytidine-3'-phosphate
  modified_base 14: mod_base = OTHER; note = 2'-O-methyladenosine-3'-phosphate
  modified_base 15: mod_base = OTHER; note = 2'-O-methylguanosine-3'-phosphate
  modified_base 16: mod_base = OTHER; note = 2'-O-methyluridine-3'-phosphate
  modified_base 17: mod_base = OTHER; note = 2'-O-methyluridine-3'-phosphate
  modified_base 18: mod_base = OTHER; note = 2'-O-methylguanosine-3'-phosphate
  modified_base 19: mod_base = OTHER; note = 2'-O-methyluridine-3'-phosphorothioate
  modified_base 20: mod_base = OTHER; note = 2'-O-methyladenosine-3'-phosphorothioate
  modified_base 21: mod_base = OTHER; note = 2'-O-methyladenosine-3'-phosphate
acttttctctttcagttgtaa

SEQ ID NO: 2186 - RNA, 21 nt, synthetic construct
  source 1..21: mol_type = other RNA
  modified_base 1: mod_base = OTHER; note = 2'-O-methyladenosine-3'-phosphorothioate
  modified_base 2: mod_base = OTHER; note = 2'-O-methyluridine-3'-phosphorothioate
  modified_base 3: mod_base = OTHER; note = 2'-O-methyluridine-3'-phosphate
  modified_base 4: mod_base = OTHER; note = 2'-O-methyladenosine-3'-phosphate
  modified_base 5: mod_base = OTHER; note = 2'-O-methyladenosine-3'-phosphate
  modified_base 6: mod_base = OTHER; note = 2'-O-methyluridine-3'-phosphate
  modified_base 7: mod_base = OTHER; note = 2'-fluorouridine-3'-phosphate
  modified_base 8: mod_base = OTHER; note = 2'-O-methyluridine-3'-phosphate
  modified_base 9: mod_base = OTHER; note = 2'-fluorocytidine-3'-phosphate
  modified_base 10: mod_base = OTHER; note = 2'-fluorouridine-3'-phosphate
  modified_base 11: mod_base = OTHER; note = 2'-fluoroadenosine-3'-phosphate
  modified_base 12: mod_base = OTHER; note = 2'-O-methylguanosine-3'-phosphate
  modified_base 13: mod_base = OTHER; note = 2'-O-methyluridine-3'-phosphate
  modified_base 14: mod_base = OTHER; note = 2'-O-methylcytidine-3'-phosphate
  modified_base 15: mod_base = OTHER; note = 2'-O-methyluridine-3'-phosphate
  modified_base 16: mod_base = OTHER; note = 2'-O-methylguanosine-3'-phosphate
  modified_base 17: mod_base = OTHER; note = 2'-O-methyluridine-3'-phosphate
  modified_base 18: mod_base = OTHER; note = 2'-O-methylguanosine-3'-phosphate
  modified_base 19: mod_base = OTHER; note = 2'-O-methyladenosine-3'-phosphorothioate
  modified_base 20: mod_base = OTHER; note = 2'-O-methyladenosine-3'-phosphorothioate
  modified_base 21: mod_base = OTHER; note = 2'-O-methyladenosine-3'-phosphate
attaatttctagtctgtgaaa

SEQ ID NO: 2187 - RNA, 21 nt, synthetic construct
  source 1..21: mol_type = other RNA
  modified_base 1: mod_base = OTHER; note = 2'-O-methylcytidine-3'-phosphorothioate
  modified_base 2: mod_base = OTHER; note = 2'-O-methyluridine-3'-phosphorothioate
  modified_base 3: mod_base = OTHER; note = 2'-O-methylcytidine-3'-phosphate
  modified_base 4: mod_base = OTHER; note = 2'-O-methyluridine-3'-phosphate
  modified_base 5: mod_base = OTHER; note = 2'-O-methylguanosine-3'-phosphate
  modified_base 6: mod_base = OTHER; note = 2'-O-methyluridine-3'-phosphate
  modified_base 7: mod_base = OTHER; note = 2'-fluoroadenosine-3'-phosphate
  modified_base 8: mod_base = OTHER; note = 2'-O-methyluridine-3'-phosphate
  modified_base 9: mod_base = OTHER; note = 2'-fluoroadenosine-3'-phosphate
  modified_base 10: mod_base = OTHER; note = 2'-fluoroadenosine-3'-phosphate
  modified_base 11: mod_base = OTHER; note = 2'-fluoroguanosine-3'-phosphate
  modified_base 12: mod_base = OTHER; note = 2'-O-methyladenosine-3'-phosphate
  modified_base 13: mod_base = OTHER; note = 2'-O-methylguanosine-3'-phosphate
  modified_base 14: mod_base = OTHER; note = 2'-O-methylguanosine-3'-phosphate
  modified_base 15: mod_base = OTHER; note = 2'-O-methyluridine-3'-phosphate
  modified_base 16: mod_base = OTHER; note = 2'-O-methyluridine-3'-phosphate
  modified_base 17: mod_base = OTHER; note = 2'-O-methyluridine-3'-phosphate
  modified_base 18: mod_base = OTHER; note = 2'-O-methylcytidine-3'-phosphate
  modified_base 19: mod_base = OTHER; note = 2'-O-methyladenosine-3'-phosphorothioate
  modified_base 20: mod_base = OTHER; note = 2'-O-methylcytidine-3'-phosphorothioate
  modified_base 21: mod_base = OTHER; note = 2'-O-methyladenosine-3'-phosphate
ctctgtataagaggtttcaca

SEQ ID NO: 2188 - RNA, 21 nt, synthetic construct
  source 1..21: mol_type = other RNA
  modified_base 1: mod_base = OTHER; note = 2'-O-methylguanosine-3'-phosphorothioate
  modified_base 2: mod_base = OTHER; note = 2'-O-methyladenosine-3'-phosphorothioate
  modified_base 3: mod_base = OTHER; note = 2'-O-methylcytidine-3'-phosphate
  modified_base 4: mod_base = OTHER; note = 2'-O-methyluridine-3'-phosphate
  modified_base 5: mod_base = OTHER; note = 2'-O-methyluridine-3'-phosphate
  modified_base 6: mod_base = OTHER; note = 2'-O-methyluridine-3'-phosphate
  modified_base 7: mod_base = OTHER; note = 2'-fluorocytidine-3'-phosphate
  modified_base 8: mod_base = OTHER; note = 2'-O-methyladenosine-3'-phosphate
  modified_base 9: mod_base = OTHER; note = 2'-fluoroadenosine-3'-phosphate
  modified_base 10: mod_base = OTHER; note = 2'-fluoroadenosine-3'-phosphate
  modified_base 11: mod_base = OTHER; note = 2'-fluoroguanosine-3'-phosphate
  modified_base 12: mod_base = OTHER; note = 2'-O-methyluridine-3'-phosphate
  modified_base 13: mod_base = OTHER; note = 2'-O-methyladenosine-3'-phosphate
  modified_base 14: mod_base = OTHER; note = 2'-O-methylcytidine-3'-phosphate
  modified_base 15: mod_base = OTHER; note = 2'-O-methyluridine-3'-phosphate
  modified_base 16: mod_base = OTHER; note = 2'-O-methyladenosine-3'-phosphate
  modified_base 17: mod_base = OTHER; note = 2'-O-methyladenosine-3'-phosphate
  modified_base 18: mod_base = OTHER; note = 2'-O-methyluridine-3'-phosphate
  modified_base 19: mod_base = OTHER; note = 2'-O-methyladenosine-3'-phosphorothioate
  modified_base 20: mod_base = OTHER; note = 2'-O-methylcytidine-3'-phosphorothioate
  modified_base 21: mod_base = OTHER; note = 2'-O-methyladenosine-3'-phosphate
gactttcaaagtactaataca

SEQ ID NO: 2189 - RNA, 21 nt, synthetic construct
  source 1..21: mol_type = other RNA
  modified_base 1: mod_base = OTHER; note = 2'-O-methyluridine-3'-phosphorothioate
  modified_base 2: mod_base = OTHER; note = 2'-O-methyluridine-3'-phosphorothioate
  modified_base 3: mod_base = OTHER; note = 2'-O-methyluridine-3'-phosphate
  modified_base 4: mod_base = OTHER; note = 2'-O-methylguanosine-3'-phosphate
  modified_base 5: mod_base = OTHER; note = 2'-O-methylcytidine-3'-phosphate
  modified_base 6: mod_base = OTHER; note = 2'-O-methylcytidine-3'-phosphate
  modified_base 7: mod_base = OTHER; note = 2'-fluoroadenosine-3'-phosphate
  modified_base 8: mod_base = OTHER; note = 2'-O-methyluridine-3'-phosphate
  modified_base 9: mod_base = OTHER; note = 2'-fluorouridine-3'-phosphate
  modified_base 10: mod_base = OTHER; note = 2'-fluoroadenosine-3'-phosphate
  modified_base 11: mod_base = OTHER; note = 2'-fluorouridine-3'-phosphate
  modified_base 12: mod_base = OTHER; note = 2'-O-methyladenosine-3'-phosphate
  modified_base 13: mod_base = OTHER; note = 2'-O-methylcytidine-3'-phosphate
  modified_base 14: mod_base = OTHER; note = 2'-O-methyladenosine-3'-phosphate
  modified_base 15: mod_base = OTHER; note = 2'-O-methyladenosine-3'-phosphate
  modified_base 16: mod_base = OTHER; note = 2'-O-methyladenosine-3'-phosphate
  modified_base 17: mod_base = OTHER; note = 2'-O-methylguanosine-3'-phosphate
  modified_base 18: mod_base = OTHER; note = 2'-O-methyluridine-3'-phosphate
  modified_base 19: mod_base = OTHER; note = 2'-O-methyluridine-3'-phosphorothioate
  modified_base 20: mod_base = OTHER; note = 2'-O-methyluridine-3'-phosphorothioate
  modified_base 21: mod_base = OTHER; note = 2'-O-methyladenosine-3'-phosphate
tttgccattatacaaagttta

SEQ ID NO: 2190 - RNA, 21 nt, synthetic construct
  source 1..21: mol_type = other RNA
  modified_base 1: mod_base = OTHER; note = 2'-O-methylguanosine-3'-phosphorothioate
  modified_base 2: mod_base = OTHER; note = 2'-O-methyladenosine-3'-phosphorothioate
  modified_base 3: mod_base = OTHER; note = 2'-O-methyladenosine-3'-phosphate
  modified_base 4: mod_base = OTHER; note = 2'-O-methylcytidine-3'-phosphate
  modified_base 5: mod_base = OTHER; note = 2'-O-methyladenosine-3'-phosphate
  modified_base 6: mod_base = OTHER; note = 2'-O-methylcytidine-3'-phosphate
  modified_base 7: mod_base = OTHER; note = 2'-fluorouridine-3'-phosphate
  modified_base 8: mod_base = OTHER; note = 2'-O-methyladenosine-3'-phosphate
  modified_base 9: mod_base = OTHER; note = 2'-fluorouridine-3'-phosphate
  modified_base 10: mod_base = OTHER; note = 2'-fluorocytidine-3'-phosphate
  modified_base 11: mod_base = OTHER; note = 2'-fluoroguanosine-3'-phosphate
  modified_base 12: mod_base = OTHER; note = 2'-O-methyladenosine-3'-phosphate
  modified_base 13: mod_base = OTHER; note = 2'-O-methylcytidine-3'-phosphate
  modified_base 14: mod_base = OTHER; note = 2'-O-methyladenosine-3'-phosphate
  modified_base 15: mod_base = OTHER; note = 2'-O-methyluridine-3'-phosphate
  modified_base 16: mod_base = OTHER; note = 2'-O-methyladenosine-3'-phosphate
  modified_base 17: mod_base = OTHER; note = 2'-O-methylcytidine-3'-phosphate
  modified_base 18: mod_base = OTHER; note = 2'-O-methylcytidine-3'-phosphate
  modified_base 19: mod_base = OTHER; note = 2'-O-methyluridine-3'-phosphorothioate
  modified_base 20: mod_base = OTHER; note = 2'-O-methylcytidine-3'-phosphorothioate
  modified_base 21: mod_base = OTHER; note = 2'-O-methyladenosine-3'-phosphate
gaacactatcgacatacctca

SEQ ID NO: 2191 - RNA, 21 nt, synthetic construct
  source 1..21: mol_type = other RNA
  modified_base 1: mod_base = OTHER; note = 2'-O-methyluridine-3'-phosphorothioate
  modified_base 2: mod_base = OTHER; note = 2'-O-methyladenosine-3'-phosphorothioate
  modified_base 3: mod_base = OTHER; note = 2'-O-methylguanosine-3'-phosphate
  modified_base 4: mod_base = OTHER; note = 2'-O-methyladenosine-3'-phosphate
  modified_base 5: mod_base = OTHER; note = 2'-O-methyladenosine-3'-phosphate
  modified_base 6: mod_base = OTHER; note = 2'-O-methyluridine-3'-phosphate
  modified_base 7: mod_base = OTHER; note = 2'-fluoroguanosine-3'-phosphate
  modified_base 8: mod_base = OTHER; note = 2'-O-methyladenosine-3'-phosphate
  modified_base 9: mod_base = OTHER; note = 2'-fluorocytidine-3'-phosphate
  modified_base 10: mod_base = OTHER; note = 2'-fluoroadenosine-3'-phosphate
  modified_base 11: mod_base = OTHER; note = 2'-fluorouridine-3'-phosphate
  modified_base 12: mod_base = OTHER; note = 2'-O-methyluridine-3'-phosphate
  modified_base 13: mod_base = OTHER; note = 2'-O-methyluridine-3'-phosphate
  modified_base 14: mod_base = OTHER; note = 2'-O-methyladenosine-3'-phosphate
  modified_base 15: mod_base = OTHER; note = 2'-O-methylcytidine-3'-phosphate
  modified_base 16: mod_base = OTHER; note = 2'-O-methyluridine-3'-phosphate
  modified_base 17: mod_base = OTHER; note = 2'-O-methyladenosine-3'-phosphate
  modified_base 18: mod_base = OTHER; note = 2'-O-methyladenosine-3'-phosphate
  modified_base 19: mod_base = OTHER; note = 2'-O-methyluridine-3'-phosphorothioate
  modified_base 20: mod_base = OTHER; note = 2'-O-methyladenosine-3'-phosphorothioate
  modified_base 21: mod_base = OTHER; note = 2'-O-methyladenosine-3'-phosphate
tagaatgacatttactaataa

SEQ ID NO: 2192 - RNA, 21 nt, synthetic construct
  source 1..21: mol_type = other RNA
  modified_base 1: mod_base = OTHER; note = 2'-O-methyladenosine-3'-phosphorothioate
  modified_base 2: mod_base = OTHER; note = 2'-O-methyladenosine-3'-phosphorothioate
  modified_base 3: mod_base = OTHER; note = 2'-O-methylguanosine-3'-phosphate
  modified_base 4: mod_base = OTHER; note = 2'-O-methylcytidine-3'-phosphate
  modified_base 5: mod_base = OTHER; note = 2'-O-methyluridine-3'-phosphate
  modified_base 6: mod_base = OTHER; note = 2'-O-methyladenosine-3'-phosphate
  modified_base 7: mod_base = OTHER; note = 2'-fluorocytidine-3'-phosphate
  modified_base 8: mod_base = OTHER; note = 2'-O-methyluridine-3'-phosphate
  modified_base 9: mod_base = OTHER; note = 2'-fluorouridine-3'-phosphate
  modified_base 10: mod_base = OTHER; note = 2'-fluoroadenosine-3'-phosphate
  modified_base 11: mod_base = OTHER; note = 2'-fluoroguanosine-3'-phosphate
  modified_base 12: mod_base = OTHER; note = 2'-O-methyladenosine-3'-phosphate
  modified_base 13: mod_base = OTHER; note = 2'-O-methyladenosine-3'-phosphate
  modified_base 14: mod_base = OTHER; note = 2'-O-methyladenosine-3'-phosphate
  modified_base 15: mod_base = OTHER; note = 2'-O-methyluridine-3'-phosphate
  modified_base 16: mod_base = OTHER; note = 2'-O-methylguanosine-3'-phosphate
  modified_base 17: mod_base = OTHER; note = 2'-O-methyluridine-3'-phosphate
  modified_base 18: mod_base = OTHER; note = 2'-O-methyluridine-3'-phosphate
  modified_base 19: mod_base = OTHER; note = 2'-O-methyluridine-3'-phosphorothioate
  modified_base 20: mod_base = OTHER; note = 2'-O-methyladenosine-3'-phosphorothioate
  modified_base 21: mod_base = OTHER; note = 2'-O-methyladenosine-3'-phosphate
aagctacttagaaatgtttaa

SEQ ID NO: 2193 - RNA, 21 nt, synthetic construct
  source 1..21: mol_type = other RNA
  modified_base 1: mod_base = OTHER; note = 2'-O-methylcytidine-3'-phosphorothioate
  modified_base 2: mod_base = OTHER; note = 2'-O-methylcytidine-3'-phosphorothioate
  modified_base 3: mod_base = OTHER; note = 2'-O-methyluridine-3'-phosphate
  modified_base 4: mod_base = OTHER; note = 2'-O-methyluridine-3'-phosphate
  modified_base 5: mod_base = OTHER; note = 2'-O-methyladenosine-3'-phosphate
  modified_base 6: mod_base = OTHER; note = 2'-O-methylguanosine-3'-phosphate
  modified_base 7: mod_base = OTHER; note = 2'-fluorouridine-3'-phosphate
  modified_base 8: mod_base = OTHER; note = 2'-O-methyladenosine-3'-phosphate
  modified_base 9: mod_base = OTHER; note = 2'-fluorocytidine-3'-phosphate
  modified_base 10: mod_base = OTHER; note = 2'-fluorouridine-3'-phosphate
  modified_base 11: mod_base = OTHER; note = 2'-fluorocytidine-3'-phosphate
  modified_base 12: mod_base = OTHER; note = 2'-O-methyluridine-3'-phosphate
  modified_base 13: mod_base = OTHER; note = 2'-O-methylcytidine-3'-phosphate
  modified_base 14: mod_base = OTHER; note = 2'-O-methyladenosine-3'-phosphate
  modified_base 15: mod_base = OTHER; note = 2'-O-methylguanosine-3'-phosphate
  modified_base 16: mod_base = OTHER; note = 2'-O-methyladenosine-3'-phosphate
  modified_base 17: mod_base = OTHER; note = 2'-O-methylguanosine-3'-phosphate
  modified_base 18: mod_base = OTHER; note = 2'-O-methyladenosine-3'-phosphate
  modified_base 19: mod_base = OTHER; note = 2'-O-methyluridine-3'-phosphorothioate
  modified_base 20: mod_base = OTHER; note = 2'-O-methyluridine-3'-phosphorothioate
  modified_base 21: mod_base = OTHER; note = 2'-O-methyladenosine-3'-phosphate
ccttagtactctcagagatta

SEQ ID NO: 2194 - RNA, 21 nt, synthetic construct
  source 1..21: mol_type = other RNA
  modified_base 1: mod_base = OTHER; note = 2'-O-methyluridine-3'-phosphorothioate
  modified_base 2: mod_base = OTHER; note = 2'-O-methylguanosine-3'-phosphorothioate
  modified_base 3: mod_base = OTHER; note = 2'-O-methyladenosine-3'-phosphate
  modified_base 4: mod_base = OTHER; note = 2'-O-methyladenosine-3'-phosphate
  modified_base 5: mod_base = OTHER; note = 2'-O-methyluridine-3'-phosphate
  modified_base 6: mod_base = OTHER; note = 2'-O-methylguanosine-3'-phosphate
  modified_base 7: mod_base = OTHER; note = 2'-fluorocytidine-3'-phosphate
  modified_base 8: mod_base = OTHER; note = 2'-O-methyladenosine-3'-phosphate
  modified_base 9: mod_base = OTHER; note = 2'-fluorocytidine-3'-phosphate
  modified_base 10: mod_base = OTHER; note = 2'-fluoroadenosine-3'-phosphate
  modified_base 11: mod_base = OTHER; note = 2'-fluorocytidine-3'-phosphate
  modified_base 12: mod_base = OTHER; note = 2'-O-methyluridine-3'-phosphate
  modified_base 13: mod_base = OTHER; note = 2'-O-methyladenosine-3'-phosphate
  modified_base 14: mod_base = OTHER; note = 2'-O-methyladenosine-3'-phosphate
  modified_base 15: mod_base = OTHER; note = 2'-O-methylcytidine-3'-phosphate
  modified_base 16: mod_base = OTHER; note = 2'-O-methylguanosine-3'-phosphate
  modified_base 17: mod_base = OTHER; note = 2'-O-methyluridine-3'-phosphate
  modified_base 18: mod_base = OTHER; note = 2'-O-methyladenosine-3'-phosphate
  modified_base 19: mod_base = OTHER; note = 2'-O-methyladenosine-3'-phosphorothioate
  modified_base 20: mod_base = OTHER; note = 2'-O-methyluridine-3'-phosphorothioate
  modified_base 21: mod_base = OTHER; note = 2'-O-methyladenosine-3'-phosphate
tgaatgcacactaacgtaata

SEQ ID NO: 2195 - RNA, 21 nt, synthetic construct
  source 1..21: mol_type = other RNA
  modified_base 1: mod_base = OTHER; note = 2'-O-methyladenosine-3'-phosphorothioate
  modified_base 2: mod_base = OTHER; note = 2'-O-methyladenosine-3'-phosphorothioate
  modified_base 3: mod_base = OTHER; note = 2'-O-methylguanosine-3'-phosphate
  modified_base 4: mod_base = OTHER; note = 2'-O-methylcytidine-3'-phosphate
  modified_base 5: mod_base = OTHER; note = 2'-O-methylcytidine-3'-phosphate
  modified_base 6: mod_base = OTHER; note = 2'-O-methyluridine-3'-phosphate
  modified_base 7: mod_base = OTHER; note = 2'-fluoroadenosine-3'-phosphate
  modified_base 8: mod_base = OTHER; note = 2'-O-methyladenosine-3'-phosphate
  modified_base 9: mod_base = OTHER; note = 2'-fluorouridine-3'-phosphate
  modified_base 10: mod_base = OTHER; note = 2'-fluoroguanosine-3'-phosphate
  modified_base 11: mod_base = OTHER; note = 2'-fluoroadenosine-3'-phosphate
  modified_base 12: mod_base = OTHER; note = 2'-O-methyluridine-3'-phosphate
  modified_base 13: mod_base = OTHER; note = 2'-O-methylguanosine-3'-phosphate
  modified_base 14: mod_base = OTHER; note = 2'-O-methyladenosine-3'-phosphate
  modified_base 15: mod_base = OTHER; note = 2'-O-methyluridine-3'-phosphate
  modified_base 16: mod_base = OTHER; note = 2'-O-methyladenosine-3'-phosphate
  modified_base 17: mod_base = OTHER; note = 2'-O-methyladenosine-3'-phosphate
  modified_base 18: mod_base = OTHER; note = 2'-O-methyluridine-3'-phosphate
  modified_base 19: mod_base = OTHER; note = 2'-O-methyluridine-3'-phosphorothioate
  modified_base 20: mod_base = OTHER; note = 2'-O-methyladenosine-3'-phosphorothioate
  modified_base 21: mod_base = OTHER; note = 2'-O-methyladenosine-3'-phosphate
aagcctaatgatgataattaa

SEQ ID NO: 2196 - RNA, 21 nt, synthetic construct
  source 1..21: mol_type = other RNA
  modified_base 1: mod_base = OTHER; note = 2'-O-methyladenosine-3'-phosphorothioate
  modified_base 2: mod_base = OTHER; note = 2'-O-methyladenosine-3'-phosphorothioate
  modified_base 3: mod_base = OTHER; note = 2'-O-methyladenosine-3'-phosphate
  modified_base 4: mod_base = OTHER; note = 2'-O-methylcytidine-3'-phosphate
  modified_base 5: mod_base = OTHER; note = 2'-O-methyluridine-3'-phosphate
  modified_base 6: mod_base = OTHER; note = 2'-O-methyluridine-3'-phosphate
  modified_base 7: mod_base = OTHER; note = 2'-fluorouridine-3'-phosphate
  modified_base 8: mod_base = OTHER; note = 2'-O-methyluridine-3'-phosphate
  modified_base 9: mod_base = OTHER; note = 2'-fluorouridine-3'-phosphate
  modified_base 10: mod_base = OTHER; note = 2'-fluoroadenosine-3'-phosphate
  modified_base 11: mod_base = OTHER; note = 2'-fluorocytidine-3'-phosphate
  modified_base 12: mod_base = OTHER; note = 2'-O-methyluridine-3'-phosphate
  modified_base 13: mod_base = OTHER; note = 2'-O-methyladenosine-3'-phosphate
  modified_base 14: mod_base = OTHER; note = 2'-O-methyluridine-3'-phosphate
  modified_base 15: mod_base = OTHER; note = 2'-O-methylcytidine-3'-phosphate
  modified_base 16: mod_base = OTHER; note = 2'-O-methylcytidine-3'-phosphate
  modified_base 17: mod_base = OTHER; note = 2'-O-methylcytidine-3'-phosphate
  modified_base 18: mod_base = OTHER; note = 2'-O-methyladenosine-3'-phosphate
  modified_base 19: mod_base = OTHER; note = 2'-O-methyluridine-3'-phosphorothioate
  modified_base 20: mod_base = OTHER; note = 2'-O-methyladenosine-3'-phosphorothioate
  modified_base 21: mod_base = OTHER; note = 2'-O-methyladenosine-3'-phosphate
aaactttttactatcccataa

SEQ ID NO: 2197 - RNA, 21 nt, synthetic construct
  source 1..21: mol_type = other RNA
  modified_base 1: mod_base = OTHER; note = 2'-O-methylcytidine-3'-phosphorothioate
  modified_base 2: mod_base = OTHER; note = 2'-O-methyluridine-3'-phosphorothioate
  modified_base 3: mod_base = OTHER; note = 2'-O-methyladenosine-3'-phosphate
  modified_base 4: mod_base = OTHER; note = 2'-O-methylguanosine-3'-phosphate
  modified_base 5: mod_base = OTHER; note = 2'-O-methylcytidine-3'-phosphate
  modified_base 6: mod_base = OTHER; note = 2'-O-methyluridine-3'-phosphate
  modified_base 7: mod_base = OTHER; note = 2'-fluoroguanosine-3'-phosphate
  modified_base 8: mod_base = OTHER; note = 2'-O-methyladenosine-3'-phosphate
  modified_base 9: mod_base = OTHER; note = 2'-fluorouridine-3'-phosphate
  modified_base 10: mod_base = OTHER; note = 2'-fluoroadenosine-3'-phosphate
  modified_base 11: mod_base = OTHER; note = 2'-fluorocytidine-3'-phosphate
  modified_base 12: mod_base = OTHER; note = 2'-O-methyluridine-3'-phosphate
  modified_base 13: mod_base = OTHER; note = 2'-O-methylcytidine-3'-phosphate
  modified_base 14: mod_base = OTHER; note = 2'-O-methyluridine-3'-phosphate
  modified_base 15: mod_base = OTHER; note = 2'-O-methyluridine-3'-phosphate
  modified_base 16: mod_base = OTHER; note = 2'-O-methyladenosine-3'-phosphate
  modified_base 17: mod_base = OTHER; note = 2'-O-methyladenosine-3'-phosphate
  modified_base 18: mod_base = OTHER; note = 2'-O-methylguanosine-3'-phosphate
  modified_base 19: mod_base = OTHER; note = 2'-O-methyluridine-3'-phosphorothioate
  modified_base 20: mod_base = OTHER; note = 2'-O-methyladenosine-3'-phosphorothioate
  modified_base 21: mod_base = OTHER; note = 2'-O-methyladenosine-3'-phosphate
ctagctgatactcttaagtaa

SEQ ID NO: 2198 - RNA, 21 nt, synthetic construct
  source 1..21: mol_type = other RNA
  modified_base 1: mod_base = OTHER; note = 2'-O-methyladenosine-3'-phosphorothioate
  modified_base 2: mod_base = OTHER; note = 2'-O-methylguanosine-3'-phosphorothioate
  modified_base 3: mod_base = OTHER; note = 2'-O-methylcytidine-3'-phosphate
  modified_base 4: mod_base = OTHER; note = 2'-O-methyladenosine-3'-phosphate
  modified_base 5: mod_base = OTHER; note = 2'-O-methyluridine-3'-phosphate
  modified_base 6: mod_base = OTHER; note = 2'-O-methylguanosine-3'-phosphate
  modified_base 7: mod_base = OTHER; note = 2'-fluoroadenosine-3'-phosphate
  modified_base 8: mod_base = OTHER; note = 2'-O-methyladenosine-3'-phosphate
  modified_base 9: mod_base = OTHER; note = 2'-fluoroadenosine-3'-phosphate
  modified_base 10: mod_base = OTHER; note = 2'-fluoroadenosine-3'-phosphate
  modified_base 11: mod_base = OTHER; note = 2'-fluoroguanosine-3'-phosphate
  modified_base 12: mod_base = OTHER; note = 2'-O-methyladenosine-3'-phosphate
  modified_base 13: mod_base = OTHER; note = 2'-O-methyluridine-3'-phosphate
  modified_base 14: mod_base = OTHER; note = 2'-O-methyladenosine-3'-phosphate
  modified_base 15: mod_base = OTHER; note = 2'-O-methyladenosine-3'-phosphate
  modified_base 16: mod_base = OTHER; note = 2'-O-methylcytidine-3'-phosphate
  modified_base 17: mod_base = OTHER; note = 2'-O-methyluridine-3'-phosphate
  modified_base 18: mod_base = OTHER; note = 2'-O-methylcytidine-3'-phosphate
  modified_base 19: mod_base = OTHER; note = 2'-O-methyluridine-3'-phosphorothioate
  modified_base 20: mod_base = OTHER; note = 2'-O-methyladenosine-3'-phosphorothioate
  modified_base 21: mod_base = OTHER; note = 2'-O-methyladenosine-3'-phosphate
agcatgaaaagataactctaa

SEQ ID NO: 2199 - RNA, 21 nt, synthetic construct
  source 1..21: mol_type = other RNA
  modified_base 1: mod_base = OTHER; note = 2'-O-methyluridine-3'-phosphorothioate
  modified_base 2: mod_base = OTHER; note = 2'-O-methyladenosine-3'-phosphorothioate
  modified_base 3: mod_base = OTHER; note = 2'-O-methyladenosine-3'-phosphate
  modified_base 4: mod_base = OTHER; note = 2'-O-methylguanosine-3'-phosphate
  modified_base 5: mod_base = OTHER; note = 2'-O-methylcytidine-3'-phosphate
  modified_base 6: mod_base = OTHER; note = 2'-O-methylcytidine-3'-phosphate
  modified_base 7: mod_base = OTHER; note = 2'-fluoroadenosine-3'-phosphate
  modified_base 8: mod_base = OTHER; note = 2'-O-methyluridine-3'-phosphate
  modified_base 9: mod_base = OTHER; note = 2'-fluorouridine-3'-phosphate
  modified_base 10: mod_base = OTHER; note = 2'-fluoroadenosine-3'-phosphate
  modified_base 11: mod_base = OTHER; note = 2'-fluorouridine-3'-phosphate
  modified_base 12: mod_base = OTHER; note = 2'-O-methylguanosine-3'-phosphate
  modified_base 13: mod_base = OTHER; note = 2'-O-methylcytidine-3'-phosphate
  modified_base 14: mod_base = OTHER; note = 2'-O-methyluridine-3'-phosphate
  modified_base 15: mod_base = OTHER; note = 2'-O-methyladenosine-3'-phosphate
  modified_base 16: mod_base = OTHER; note = 2'-O-methyluridine-3'-phosphate
  modified_base 17: mod_base = OTHER; note = 2'-O-methyluridine-3'-phosphate
  modified_base 18: mod_base = OTHER; note = 2'-O-methyladenosine-3'-phosphate
  modified_base 19: mod_base = OTHER; note = 2'-O-methylguanosine-3'-phosphorothioate
  modified_base 20: mod_base = OTHER; note = 2'-O-methyluridine-3'-phosphorothioate
  modified_base 21: mod_base = OTHER; note = 2'-O-methyladenosine-3'-phosphate
taagccattatgctattagta

SEQ ID NO: 2200 - RNA, 21 nt, synthetic construct
  source 1..21: mol_type = other RNA
  modified_base 1: mod_base = OTHER; note = 2'-O-methyluridine-3'-phosphorothioate
  modified_base 2: mod_base = OTHER; note = 2'-O-methylcytidine-3'-phosphorothioate
  modified_base 3: mod_base = OTHER; note = 2'-O-methyluridine-3'-phosphate
  modified_base 4: mod_base = OTHER; note = 2'-O-methyladenosine-3'-phosphate
  modified_base 5: mod_base = OTHER; note = 2'-O-methylguanosine-3'-phosphate
  modified_base 6: mod_base = OTHER; note = 2'-O-methylcytidine-3'-phosphate
  modified_base 7: mod_base = OTHER; note = 2'-fluorouridine-3'-phosphate
  modified_base 8: mod_base = OTHER; note = 2'-O-methyluridine-3'-phosphate
  modified_base 9: mod_base = OTHER; note = 2'-fluorouridine-3'-phosphate
  modified_base 10: mod_base = OTHER; note = 2'-fluorouridine-3'-phosphate
  modified_base 11: mod_base = OTHER; note = 2'-fluoroadenosine-3'-phosphate
  modified_base 12: mod_base = OTHER; note = 2'-O-methylguanosine-3'-phosphate
  modified_base 13: mod_base = OTHER; note = 2'-O-methylcytidine-3'-phosphate
  modified_base 14: mod_base = OTHER; note = 2'-O-methyluridine-3'-phosphate
  modified_base 15: mod_base = OTHER; note = 2'-O-methyladenosine-3'-phosphate
  modified_base 16: mod_base = OTHER; note = 2'-O-methyladenosine-3'-phosphate
  modified_base 17: mod_base = OTHER; note = 2'-O-methylcytidine-3'-phosphate
  modified_base 18: mod_base = OTHER; note = 2'-O-methyladenosine-3'-phosphate
  modified_base 19: mod_base = OTHER; note = 2'-O-methyluridine-3'-phosphorothioate
  modified_base 20: mod_base = OTHER; note = 2'-O-methyladenosine-3'-phosphorothioate
  modified_base 21: mod_base = OTHER; note = 2'-O-methyladenosine-3'-phosphate
tctagcttttagctaacataa

SEQ ID NO: 2201 - RNA, 21 nt, synthetic construct
  source 1..21: mol_type = other RNA
  modified_base 1: mod_base = OTHER; note = 2'-O-methylguanosine-3'-phosphorothioate
  modified_base 2: mod_base = OTHER; note = 2'-O-methyluridine-3'-phosphorothioate
  modified_base 3: mod_base = OTHER; note = 2'-O-methylguanosine-3'-phosphate
  modified_base 4: mod_base = OTHER; note = 2'-O-methyluridine-3'-phosphate
  modified_base 5: mod_base = OTHER; note = 2'-O-methylguanosine-3'-phosphate
  modified_base 6: mod_base = OTHER; note = 2'-O-methyladenosine-3'-phosphate
  modified_base 7: mod_base = OTHER; note = 2'-fluorouridine-3'-phosphate
  modified_base 8: mod_base = OTHER; note = 2'-O-methyluridine-3'-phosphate
  modified_base 9: mod_base = OTHER; note = 2'-fluorocytidine-3'-phosphate
  modified_base 10: mod_base = OTHER; note = 2'-fluorouridine-3'-phosphate
  modified_base 11: mod_base = OTHER; note = 2'-fluorouridine-3'-phosphate
  modified_base 12: mod_base = OTHER; note = 2'-O-methylcytidine-3'-phosphate
  modified_base 13: mod_base = OTHER; note = 2'-O-methyladenosine-3'-phosphate
  modified_base 14: mod_base = OTHER; note = 2'-O-methyladenosine-3'-phosphate
  modified_base 15: mod_base = OTHER; note = 2'-O-methyladenosine-3'-phosphate
  modified_base 16: mod_base = OTHER; note = 2'-O-methylcytidine-3'-phosphate
  modified_base 17: mod_base = OTHER; note = 2'-O-methyluridine-3'-phosphate
  modified_base 18: mod_base = OTHER; note = 2'-O-methyluridine-3'-phosphate
  modified_base 19: mod_base = OTHER; note = 2'-O-methylcytidine-3'-phosphorothioate
  modified_base 20: mod_base = OTHER; note = 2'-O-methyladenosine-3'-phosphorothioate
  modified_base 21: mod_base = OTHER; note = 2'-O-methyladenosine-3'-phosphate
gtgtgattcttcaaacttcaa

SEQ ID NO: 2202 - RNA, 21 nt, synthetic construct
  source 1..21: mol_type = other RNA
  modified_base 1: mod_base = OTHER; note = 2'-O-methyluridine-3'-phosphorothioate
  modified_base 2: mod_base = OTHER; note = 2'-O-methylcytidine-3'-phosphorothioate
  modified_base 3: mod_base = OTHER; note = 2'-O-methyluridine-3'-phosphate
  modified_base 4: mod_base = OTHER; note = 2'-O-methylcytidine-3'-phosphate
  modified_base 5: mod_base = OTHER; note = 2'-O-methylcytidine-3'-phosphate
  modified_base 6: mod_base = OTHER; note = 2'-O-methyladenosine-3'-phosphate
  modified_base 7: mod_base = OTHER; note = 2'-fluoroguanosine-3'-phosphate
  modified_base 8: mod_base = OTHER; note = 2'-O-methyladenosine-3'-phosphate
  modified_base 9: mod_base = OTHER; note = 2'-fluorocytidine-3'-phosphate
  modified_base 10: mod_base = OTHER; note = 2'-fluorocytidine-3'-phosphate
  modified_base 11: mod_base = OTHER; note = 2'-fluorouridine-3'-phosphate
  modified_base 12: mod_base = OTHER; note = 2'-O-methyladenosine-3'-phosphate
  modified_base 13: mod_base = OTHER; note = 2'-O-methyladenosine-3'-phosphate
  modified_base 14: mod_base = OTHER; note = 2'-O-methylcytidine-3'-phosphate
  modified_base 15: mod_base = OTHER; note = 2'-O-methyladenosine-3'-phosphate
  modified_base 16: mod_base = OTHER; note = 2'-O-methylguanosine-3'-phosphate
  modified_base 17: mod_base = OTHER; note = 2'-O-methyluridine-3'-phosphate
  modified_base 18: mod_base = OTHER; note = 2'-O-methyluridine-3'-phosphate
  modified_base 19: mod_base = OTHER; note = 2'-O-methyluridine-3'-phosphorothioate
  modified_base 20: mod_base = OTHER; note = 2'-O-methyluridine-3'-phosphorothioate
  modified_base 21: mod_base = OTHER; note = 2'-O-methyladenosine-3'-phosphate
tctccagacctaacagtttta

SEQ ID NO: 2203 - RNA, 21 nt, synthetic construct
  source 1..21: mol_type = other RNA
  modified_base 1: mod_base = OTHER; note = 2'-O-methylcytidine-3'-phosphorothioate
  modified_base 2: mod_base = OTHER; note = 2'-O-methyluridine-3'-phosphorothioate
  modified_base 3: mod_base = OTHER; note = 2'-O-methyluridine-3'-phosphate
  modified_base 4: mod_base = OTHER; note = 2'-O-methyluridine-3'-phosphate
  modified_base 5: mod_base = OTHER; note = 2'-O-methyluridine-3'-phosphate
  modified_base 6: mod_base = OTHER; note = 2'-O-methyluridine-3'-phosphate
  modified_base 7: mod_base = OTHER; note = 2'-fluorouridine-3'-phosphate
  modified_base 8: mod_base = OTHER; note = 2'-O-methyluridine-3'-phosphate
  modified_base 9: mod_base = OTHER; note = 2'-fluorocytidine-3'-phosphate
  modified_base 10: mod_base = OTHER; note = 2'-fluoroadenosine-3'-phosphate
  modified_base 11: mod_base = OTHER; note = 2'-fluorouridine-3'-phosphate
  modified_base 12: mod_base = OTHER; note = 2'-O-methylcytidine-3'-phosphate
  modified_base 13: mod_base = OTHER; note = 2'-O-methyluridine-3'-phosphate
  modified_base 14: mod_base = OTHER; note = 2'-O-methyladenosine-3'-phosphate
  modified_base 15: mod_base = OTHER; note = 2'-O-methylguanosine-3'-phosphate
  modified_base 16: mod_base = OTHER; note = 2'-O-methylcytidine-3'-phosphate
  modified_base 17: mod_base = OTHER; note = 2'-O-methylcytidine-3'-phosphate
  modified_base 18: mod_base = OTHER; note = 2'-O-methyluridine-3'-phosphate
  modified_base 19: mod_base = OTHER; note = 2'-O-methyluridine-3'-phosphorothioate
  modified_base 20: mod_base = OTHER; note = 2'-O-methylguanosine-3'-phosphorothioate
  modified_base 21: mod_base = OTHER; note = 2'-O-methyladenosine-3'-phosphate
ctttttttcatctagccttga

SEQ ID NO: 2204 - RNA, 21 nt, synthetic construct
  source 1..21: mol_type = other RNA
  modified_base 1: mod_base = OTHER; note = 2'-O-methylcytidine-3'-phosphorothioate
  modified_base 2: mod_base = OTHER; note = 2'-O-methyladenosine-3'-phosphorothioate
  modified_base 3: mod_base = OTHER; note = 2'-O-methyladenosine-3'-phosphate
  modified_base 4: mod_base = OTHER; note = 2'-O-methyladenosine-3'-phosphate
  modified_base 5: mod_base = OTHER; note = 2'-O-methyladenosine-3'-phosphate
  modified_base 6: mod_base = OTHER; note = 2'-O-methyluridine-3'-phosphate
  modified_base 7: mod_base = OTHER; note = 2'-fluoroadenosine-3'-phosphate
  modified_base 8: mod_base = OTHER; note = 2'-O-methyladenosine-3'-phosphate
  modified_base 9: mod_base = OTHER; note = 2'-fluorouridine-3'-phosphate
  modified_base 10: mod_base = OTHER; note = 2'-fluorouridine-3'-phosphate
  modified_base 11: mod_base = OTHER; note = 2'-fluorocytidine-3'-phosphate
  modified_base 12: mod_base = OTHER; note = 2'-O-methyluridine-3'-phosphate
  modified_base 13: mod_base = OTHER; note = 2'-O-methyluridine-3'-phosphate
  modified_base 14: mod_base = OTHER; note = 2'-O-methylguanosine-3'-phosphate
  modified_base 15: mod_base = OTHER; note = 2'-O-methyladenosine-3'-phosphate
  modified_base 16: mod_base = OTHER; note = 2'-O-methylcytidine-3'-phosphate
  modified_base 17: mod_base = OTHER; note = 2'-O-methyladenosine-3'-phosphate
  modified_base 18: mod_base = OTHER; note = 2'-O-methyluridine-3'-phosphate
  modified_base 19: mod_base = OTHER; note = 2'-O-methylcytidine-3'-phosphorothioate
  modified_base 20: mod_base = OTHER; note = 2'-O-methyluridine-3'-phosphorothioate
  modified_base 21: mod_base = OTHER; note = 2'-O-methyladenosine-3'-phosphate
caaaataattcttgacatcta

SEQ ID NO: 2205 - RNA, 21 nt, synthetic construct
  source 1..21: mol_type = other RNA
  modified_base 1: mod_base = OTHER; note = 2'-O-methylguanosine-3'-phosphorothioate
  modified_base 2: mod_base = OTHER; note = 2'-O-methylcytidine-3'-phosphorothioate
  modified_base 3: mod_base = OTHER; note = 2'-O-methyladenosine-3'-phosphate
  modified_base 4: mod_base = OTHER; note = 2'-O-methyluridine-3'-phosphate
  modified_base 5: mod_base = OTHER; note = 2'-O-methylcytidine-3'-phosphate
  modified_base 6: mod_base = OTHER; note = 2'-O-methyladenosine-3'-phosphate
  modified_base 7: mod_base = OTHER; note = 2'-fluorocytidine-3'-phosphate
  modified_base 8: mod_base = OTHER; note = 2'-O-methyluridine-3'-phosphate
  modified_base 9: mod_base = OTHER; note = 2'-fluorouridine-3'-phosphate
  modified_base 10: mod_base = OTHER; note = 2'-fluorouridine-3'-phosphate
  modified_base 11: mod_base = OTHER; note = 2'-fluorocytidine-3'-phosphate
  modified_base 12: mod_base = OTHER; note = 2'-O-methyluridine-3'-phosphate
  modified_base 13: mod_base = OTHER; note = 2'-O-methylguanosine-3'-phosphate
  modified_base 14: mod_base = OTHER; note = 2'-O-methyladenosine-3'-phosphate
  modified_base 15: mod_base = OTHER; note = 2'-O-methyladenosine-3'-phosphate
  modified_base 16: mod_base = OTHER; note = 2'-O-methyladenosine-3'-phosphate
  modified_base 17: mod_base = OTHER; note = 2'-O-methyladenosine-3'-phosphate
  modified_base 18: mod_base = OTHER; note = 2'-O-methyluridine-3'-phosphate
  modified_base 19: mod_base = OTHER; note = 2'-O-methyladenosine-3'-phosphorothioate
  modified_base 20: mod_base = OTHER; note = 2'-O-methyladenosine-3'-phosphorothioate
  modified_base 21: mod_base = OTHER; note = 2'-O-methyladenosine-3'-phosphate
gcatcactttctgaaaataaa

SEQ ID NO: 2206 - RNA, 21 nt, synthetic construct
  source 1..21: mol_type = other RNA
  modified_base 1: mod_base = OTHER; note = 2'-O-methyluridine-3'-phosphorothioate
  modified_base 2: mod_base = OTHER; note = 2'-O-methylcytidine-3'-phosphorothioate
  modified_base 3: mod_base = OTHER; note = 2'-O-methyluridine-3'-phosphate
  modified_base 4: mod_base = OTHER; note = 2'-O-methyluridine-3'-phosphate
  modified_base 5: mod_base = OTHER; note = 2'-O-methyluridine-3'-phosphate
  modified_base 6: mod_base = OTHER; note = 2'-O-methyluridine-3'-phosphate
  modified_base 7: mod_base = OTHER; note = 2'-fluoroguanosine-3'-phosphate
  modified_base 8: mod_base = OTHER; note = 2'-O-methyluridine-3'-phosphate
  modified_base 9: mod_base = OTHER; note = 2'-fluoroguanosine-3'-phosphate
  modified_base 10: mod_base = OTHER; note = 2'-fluoroadenosine-3'-phosphate
  modified_base 11: mod_base = OTHER; note = 2'-fluoroadenosine-3'-phosphate
  modified_base 12: mod_base = OTHER; note = 2'-O-methyladenosine-3'-phosphate
  modified_base 13: mod_base = OTHER; note = 2'-O-methylcytidine-3'-phosphate
  modified_base 14: mod_base = OTHER; note = 2'-O-methyladenosine-3'-phosphate
  modified_base 15: mod_base = OTHER; note = 2'-O-methyluridine-3'-phosphate
  modified_base 16: mod_base = OTHER; note = 2'-O-methyladenosine-3'-phosphate
  modified_base 17: mod_base = OTHER; note = 2'-O-methylcytidine-3'-phosphate
  modified_base 18: mod_base = OTHER; note = 2'-O-methyluridine-3'-phosphate
  modified_base 19: mod_base = OTHER; note = 2'-O-methyladenosine-3'-phosphorothioate
  modified_base 20: mod_base = OTHER; note = 2'-O-methyluridine-3'-phosphorothioate
  modified_base 21: mod_base = OTHER; note = 2'-O-methyladenosine-3'-phosphate
tcttttgtgaaacatactata

SEQ ID NO: 2207 - RNA, 21 nt, synthetic construct
  source 1..21: mol_type = other RNA
  modified_base 1: mod_base = OTHER; note = 2'-O-methylcytidine-3'-phosphorothioate
  modified_base 2: mod_base = OTHER; note = 2'-O-methyluridine-3'-phosphorothioate
  modified_base 3: mod_base = OTHER; note = 2'-O-methyladenosine-3'-phosphate
  modified_base 4: mod_base = OTHER; note = 2'-O-methyluridine-3'-phosphate
  modified_base 5: mod_base = OTHER; note = 2'-O-methyluridine-3'-phosphate
  modified_base 6: mod_base = OTHER; note = 2'-O-methyluridine-3'-phosphate
  modified_base 7: mod_base = OTHER; note = 2'-fluorocytidine-3'-phosphate
  modified_base 8: mod_base = OTHER; note = 2'-O-methyluridine-3'-phosphate
  modified_base 9: mod_base = OTHER; note = 2'-fluorouridine-3'-phosphate
  modified_base 10: mod_base = OTHER; note = 2'-fluorocytidine-3'-phosphate
  modified_base 11: mod_base = OTHER; note = 2'-fluorocytidine-3'-phosphate
  modified_base 12: mod_base = OTHER; note = 2'-O-methyladenosine-3'-phosphate
  modified_base 13: mod_base = OTHER; note = 2'-O-methyluridine-3'-phosphate
  modified_base 14: mod_base = OTHER; note = 2'-O-methyladenosine-3'-phosphate
  modified_base 15: mod_base = OTHER; note = 2'-O-methylguanosine-3'-phosphate
  modified_base 16: mod_base = OTHER; note = 2'-O-methylguanosine-3'-phosphate
  modified_base 17: mod_base = OTHER; note = 2'-O-methylcytidine-3'-phosphate
  modified_base 18: mod_base = OTHER; note = 2'-O-methyluridine-3'-phosphate
  modified_base 19: mod_base = OTHER; note = 2'-O-methyladenosine-3'-phosphorothioate
  modified_base 20: mod_base = OTHER; note = 2'-O-methyladenosine-3'-phosphorothioate
  modified_base 21: mod_base = OTHER; note = 2'-O-methyladenosine-3'-phosphate
ctatttcttccataggctaaa

SEQ ID NO: 2208 - RNA, 21 nt, synthetic construct
  source 1..21: mol_type = other RNA
  modified_base 1: mod_base = OTHER; note = 2'-O-methylcytidine-3'-phosphorothioate
  modified_base 2: mod_base = OTHER; note = 2'-O-methyluridine-3'-phosphorothioate
  modified_base 3: mod_base = OTHER; note = 2'-O-methyluridine-3'-phosphate
  modified_base 4: mod_base = OTHER; note = 2'-O-methylcytidine-3'-phosphate
  modified_base 5: mod_base = OTHER; note = 2'-O-methyladenosine-3'-phosphate
  modified_base 6: mod_base = OTHER; note = 2'-O-methyladenosine-3'-phosphate
  modified_base 7: mod_base = OTHER; note = 2'-fluorouridine-3'-phosphate
  modified_base 8: mod_base = OTHER; note = 2'-O-methylguanosine-3'-phosphate
  modified_base 9: mod_base = OTHER; note = 2'-fluoroadenosine-3'-phosphate
  modified_base 10: mod_base = OTHER; note = 2'-fluoroadenosine-3'-phosphate
  modified_base 11: mod_base = OTHER; note = 2'-fluoroguanosine-3'-phosphate
  modified_base 12: mod_base = OTHER; note = 2'-O-methyluridine-3'-phosphate
  modified_base 13: mod_base = OTHER; note = 2'-O-methylguanosine-3'-phosphate
  modified_base 14: mod_base = OTHER; note = 2'-O-methyluridine-3'-phosphate
  modified_base 15: mod_base = OTHER; note = 2'-O-methyluridine-3'-phosphate
  modified_base 16: mod_base = OTHER; note = 2'-O-methyladenosine-3'-phosphate
  modified_base 17: mod_base = OTHER; note = 2'-O-methyladenosine-3'-phosphate
  modified_base 18: mod_base = OTHER; note = 2'-O-methylcytidine-3'-phosphate
  modified_base 19: mod_base = OTHER; note = 2'-O-methyladenosine-3'-phosphorothioate
  modified_base 20: mod_base = OTHER; note = 2'-O-methyladenosine-3'-phosphorothioate
  modified_base 21: mod_base = OTHER; note = 2'-O-methyladenosine-3'-phosphate
cttcaatgaagtgttaacaaa

SEQ ID NO: 2209 - RNA, 21 nt, synthetic construct
  source 1..21: mol_type = other RNA
  modified_base 1: mod_base = OTHER; note = 2'-O-methyluridine-3'-phosphorothioate
  modified_base 2: mod_base = OTHER; note = 2'-O-methyluridine-3'-phosphorothioate
  modified_base 3: mod_base = OTHER; note = 2'-O-methyluridine-3'-phosphate
  modified_base 4: mod_base = OTHER; note = 2'-O-methylguanosine-3'-phosphate
  modified_base 5: mod_base = OTHER; note = 2'-O-methylcytidine-3'-phosphate
  modified_base 6: mod_base = OTHER; note = 2'-O-methylcytidine-3'-phosphate
  modified_base 7: mod_base = OTHER; note = 2'-fluorouridine-3'-phosphate
  modified_base 8: mod_base = OTHER; note = 2'-O-methyluridine-3'-phosphate
  modified_base 9: mod_base = OTHER; note = 2'-fluorocytidine-3'-phosphate
  modified_base 10: mod_base = OTHER; note = 2'-fluoroadenosine-3'-phosphate
  modified_base 11: mod_base = OTHER; note = 2'-fluorouridine-3'-phosphate
  modified_base 12: mod_base = OTHER; note = 2'-O-methyluridine-3'-phosphate
  modified_base 13: mod_base = OTHER; note = 2'-O-methylcytidine-3'-phosphate
  modified_base 14: mod_base = OTHER; note = 2'-O-methyluridine-3'-phosphate
  modified_base 15: mod_base = OTHER; note = 2'-O-methyladenosine-3'-phosphate
  modified_base 16: mod_base = OTHER; note = 2'-O-methylcytidine-3'-phosphate
  modified_base 17: mod_base = OTHER; note = 2'-O-methyluridine-3'-phosphate
  modified_base 18: mod_base = OTHER; note = 2'-O-methyluridine-3'-phosphate
  modified_base 19: mod_base = OTHER; note = 2'-O-methyluridine-3'-phosphorothioate
  modified_base 20: mod_base = OTHER; note = 2'-O-methylcytidine-3'-phosphorothioate
  modified_base 21: mod_base = OTHER; note = 2'-O-methyladenosine-3'-phosphate
tttgccttcattctactttca

SEQ ID NO: 2210 - RNA, 21 nt, synthetic construct
  source 1..21: mol_type = other RNA
  modified_base 1: mod_base = OTHER; note = 2'-O-methyladenosine-3'-phosphorothioate
  modified_base 2: mod_base = OTHER; note = 2'-O-methylguanosine-3'-phosphorothioate
  modified_base 3: mod_base = OTHER; note = 2'-O-methylguanosine-3'-phosphate
  modified_base 4: mod_base = OTHER; note = 2'-O-methyluridine-3'-phosphate
  modified_base 5: mod_base = OTHER; note = 2'-O-methyluridine-3'-phosphate
  modified_base 6: mod_base = OTHER; note = 2'-O-methyluridine-3'-phosphate
  modified_base 7: mod_base = OTHER; note = 2'-fluorouridine-3'-phosphate
  modified_base 8: mod_base = OTHER; note = 2'-O-methyluridine-3'-phosphate
  modified_base 9: mod_base = OTHER; note = 2'-fluoroadenosine-3'-phosphate
  modified_base 10: mod_base = OTHER; note = 2'-fluoroadenosine-3'-phosphate
  modified_base 11: mod_base = OTHER; note = 2'-fluoroadenosine-3'-phosphate
  modified_base 12: mod_base = OTHER; note = 2'-O-methyluridine-3'-phosphate
  modified_base 13: mod_base = OTHER; note = 2'-O-methylguanosine-3'-phosphate
  modified_base 14: mod_base = OTHER; note = 2'-O-methyluridine-3'-phosphate
  modified_base 15: mod_base = OTHER; note = 2'-O-methylcytidine-3'-phosphate
  modified_base 16: mod_base = OTHER; note = 2'-O-methylcytidine-3'-phosphate
  modified_base 17: mod_base = OTHER; note = 2'-O-methyluridine-3'-phosphate
  modified_base 18: mod_base = OTHER; note = 2'-O-methyladenosine-3'-phosphate
  modified_base 19: mod_base = OTHER; note = 2'-O-methyladenosine-3'-phosphorothioate
  modified_base 20: mod_base = OTHER; note = 2'-O-methyladenosine-3'-phosphorothioate
  modified_base 21: mod_base = OTHER; note = 2'-O-methyladenosine-3'-phosphate
aggtttttaaatgtcctaaaa

SEQ ID NO: 2211 - RNA, 21 nt, synthetic construct
  source 1..21: mol_type = other RNA
  modified_base 1: mod_base = OTHER; note = 2'-O-methylguanosine-3'-phosphorothioate
  modified_base 2: mod_base = OTHER; note = 2'-O-methyladenosine-3'-phosphorothioate
  modified_base 3: mod_base = OTHER; note = 2'-O-methyladenosine-3'-phosphate
  modified_base 4: mod_base = OTHER; note = 2'-O-methyluridine-3'-phosphate
  modified_base 5: mod_base = OTHER; note = 2'-O-methyladenosine-3'-phosphate
  modified_base 6: mod_base = OTHER; note = 2'-O-methyluridine-3'-phosphate
  modified_base 7: mod_base = OTHER; note = 2'-fluorocytidine-3'-phosphate
  modified_base 8: mod_base = OTHER; note = 2'-O-methyluridine-3'-phosphate
  modified_base 9: mod_base = OTHER; note = 2'-fluorouridine-3'-phosphate
  modified_base 10: mod_base = OTHER; note = 2'-fluorouridine-3'-phosphate
  modified_base 11: mod_base = OTHER; note = 2'-fluoroguanosine-3'-phosphate
  modified_base 12: mod_base = OTHER; note = 2'-O-methyladenosine-3'-phosphate
  modified_base 13: mod_base = OTHER; note = 2'-O-methylguanosine-3'-phosphate
  modified_base 14: mod_base = OTHER; note = 2'-O-methyluridine-3'-phosphate
  modified_base 15: mod_base = OTHER; note = 2'-O-methylcytidine-3'-phosphate
  modified_base 16: mod_base = OTHER; note = 2'-O-methylcytidine-3'-phosphate
  modified_base 17: mod_base = OTHER; note = 2'-O-methyluridine-3'-phosphate
  modified_base 18: mod_base = OTHER; note = 2'-O-methyluridine-3'-phosphate
  modified_base 19: mod_base = OTHER; note = 2'-O-methylcytidine-3'-phosphorothioate
  modified_base 20: mod_base = OTHER; note = 2'-O-methyladenosine-3'-phosphorothioate
  modified_base 21: mod_base = OTHER; note = 2'-O-methyladenosine-3'-phosphate
gaatatctttgagtccttcaa

SEQ ID NO: 2212 - RNA, 21 nt, synthetic construct
  source 1..21: mol_type = other RNA
  modified_base 1: mod_base = OTHER; note = 2'-O-methylguanosine-3'-phosphorothioate
  modified_base 2: mod_base = OTHER; note = 2'-O-methyladenosine-3'-phosphorothioate
  modified_base 3: mod_base = OTHER; note = 2'-O-methyladenosine-3'-phosphate
  modified_base 4: mod_base = OTHER; note = 2'-O-methylcytidine-3'-phosphate
  modified_base 5: mod_base = OTHER; note = 2'-O-methyladenosine-3'-phosphate
  modified_base 6: mod_base = OTHER; note = 2'-O-methylcytidine-3'-phosphate
  modified_base 7: mod_base = OTHER; note = 2'-fluorouridine-3'-phosphate
  modified_base 8: mod_base = OTHER; note = 2'-O-methyluridine-3'-phosphate
  modified_base 9: mod_base = OTHER; note = 2'-fluorocytidine-3'-phosphate
  modified_base 10: mod_base = OTHER; note = 2'-fluorocytidine-3'-phosphate
  modified_base 11: mod_base = OTHER; note = 2'-fluoroadenosine-3'-phosphate
  modified_base 12: mod_base = OTHER; note = 2'-O-methyladenosine-3'-phosphate
  modified_base 13: mod_base = OTHER; note = 2'-O-methyladenosine-3'-phosphate
  modified_base 14: mod_base = OTHER; note = 2'-O-methylguanosine-3'-phosphate
  modified_base 15: mod_base = OTHER; note = 2'-O-methyladenosine-3'-phosphate
  modified_base 16: mod_base = OTHER; note = 2'-O-methyluridine-3'-phosphate
  modified_base 17: mod_base = OTHER; note = 2'-O-methyluridine-3'-phosphate
  modified_base 18: mod_base = OTHER; note = 2'-O-methyladenosine-3'-phosphate
  modified_base 19: mod_base = OTHER; note = 2'-O-methyladenosine-3'-phosphorothioate
  modified_base 20: mod_base = OTHER; note = 2'-O-methyluridine-3'-phosphorothioate
  modified_base 21: mod_base = OTHER; note = 2'-O-methyladenosine-3'-phosphate
gaacacttccaaagattaata

SEQ ID NO: 2213 - RNA, 21 nt, synthetic construct
  source 1..21: mol_type = other RNA
  modified_base 1: mod_base = OTHER; note = 2'-O-methylcytidine-3'-phosphorothioate
  modified_base 2: mod_base = OTHER; note = 2'-O-methyluridine-3'-phosphorothioate
  modified_base 3: mod_base = OTHER; note = 2'-O-methyladenosine-3'-phosphate
  modified_base 4: mod_base = OTHER; note = 2'-O-methyladenosine-3'-phosphate
  modified_base 5: mod_base = OTHER; note = 2'-O-methyladenosine-3'-phosphate
  modified_base 6: mod_base = OTHER; note = 2'-O-methyluridine-3'-phosphate
  modified_base 7: mod_base = OTHER; note = 2'-fluorouridine-3'-phosphate
  modified_base 8: mod_base = OTHER; note = 2'-O-methyluridine-3'-phosphate
  modified_base 9: mod_base = OTHER; note = 2'-fluorouridine-3'-phosphate
  modified_base 10: mod_base = OTHER; note = 2'-fluoroguanosine-3'-phosphate
  modified_base 11: mod_base = OTHER; note = 2'-fluorouridine-3'-phosphate
  modified_base 12: mod_base = OTHER; note = 2'-O-methylcytidine-3'-phosphate
  modified_base 13: mod_base = OTHER; note = 2'-O-methyluridine-3'-phosphate
  modified_base 14: mod_base = OTHER; note = 2'-O-methyladenosine-3'-phosphate
  modified_base 15: mod_base = OTHER; note = 2'-O-methyladenosine-3'-phosphate
  modified_base 16: mod_base = OTHER; note = 2'-O-methylcytidine-3'-phosphate
  modified_base 17: mod_base = OTHER; note = 2'-O-methyladenosine-3'-phosphate
  modified_base 18: mod_base = OTHER; note = 2'-O-methyladenosine-3'-phosphate
  modified_base 19: mod_base = OTHER; note = 2'-O-methyladenosine-3'-phosphorothioate
  modified_base 20: mod_base = OTHER; note = 2'-O-methyluridine-3'-phosphorothioate
  modified_base 21: mod_base = OTHER; note = 2'-O-methyladenosine-3'-phosphate
ctaaattttgtctaacaaata

SEQ ID NO: 2214 - RNA, 21 nt, synthetic construct
  source 1..21: mol_type = other RNA
  modified_base 1: mod_base = OTHER; note = 2'-O-methylguanosine-3'-phosphorothioate
  modified_base 2: mod_base = OTHER; note = 2'-O-methyluridine-3'-phosphorothioate
  modified_base 3: mod_base = OTHER; note = 2'-O-methyladenosine-3'-phosphate
  modified_base 4: mod_base = OTHER; note = 2'-O-methyladenosine-3'-phosphate
  modified_base 5: mod_base = OTHER; note = 2'-O-methyladenosine-3'-phosphate
  modified_base 6: mod_base = OTHER; note = 2'-O-methylcytidine-3'-phosphate
  modified_base 7: mod_base = OTHER; note = 2'-fluoroadenosine-3'-phosphate
  modified_base 8: mod_base = OTHER; note = 2'-O-methyladenosine-3'-phosphate
  modified_base 9: mod_base = OTHER; note = 2'-fluorocytidine-3'-phosphate
  modified_base 10: mod_base = OTHER; note = 2'-fluorouridine-3'-phosphate
  modified_base 11: mod_base = OTHER; note = 2'-fluorouridine-3'-phosphate
  modified_base 12: mod_base = OTHER; note = 2'-O-methyladenosine-3'-phosphate
  modified_base 13: mod_base = OTHER; note = 2'-O-methyladenosine-3'-phosphate
  modified_base 14: mod_base = OTHER; note = 2'-O-methyladenosine-3'-phosphate
  modified_base 15: mod_base = OTHER; note = 2'-O-methyladenosine-3'-phosphate
  modified_base 16: mod_base = OTHER; note = 2'-O-methyluridine-3'-phosphate
  modified_base 17: mod_base = OTHER; note = 2'-O-methyluridine-3'-phosphate
  modified_base 18: mod_base = OTHER; note = 2'-O-methylguanosine-3'-phosphate
  modified_base 19: mod_base = OTHER; note = 2'-O-methylcytidine-3'-phosphorothioate
  modified_base 20: mod_base = OTHER; note = 2'-O-methyluridine-3'-phosphorothioate
  modified_base 21: mod_base = OTHER; note = 2'-O-methyladenosine-3'-phosphate
gtaaacaacttaaaattgcta

SEQ ID NO: 2215 - RNA, 21 nt, synthetic construct
  source 1..21: mol_type = other RNA
  modified_base 1: mod_base = OTHER; note = 2'-O-methyladenosine-3'-phosphorothioate
  modified_base 2: mod_base = OTHER; note = 2'-O-methyladenosine-3'-phosphorothioate
  modified_base 3: mod_base = OTHER; note = 2'-O-methyladenosine-3'-phosphate
  modified_base 4: mod_base = OTHER; note = 2'-O-methyladenosine-3'-phosphate
  modified_base 5: mod_base = OTHER; note = 2'-O-methyluridine-3'-phosphate
  modified_base 6: mod_base = OTHER; note = 2'-O-methyladenosine-3'-phosphate
  modified_base 7: mod_base = OTHER; note = 2'-fluoroadenosine-3'-phosphate
  modified_base 8: mod_base = OTHER; note = 2'-O-methyluridine-3'-phosphate
  modified_base 9: mod_base = OTHER; note = 2'-fluorouridine-3'-phosphate
  modified_base 10: mod_base = OTHER; note = 2'-fluorouridine-3'-phosphate
  modified_base 11: mod_base = OTHER; note = 2'-fluoroadenosine-3'-phosphate
  modified_base 12: mod_base = OTHER; note = 2'-O-methylcytidine-3'-phosphate
  modified_base 13: mod_base = OTHER; note = 2'-O-methyluridine-3'-phosphate
  modified_base 14: mod_base = OTHER; note = 2'-O-methylcytidine-3'-phosphate
  modified_base 15: mod_base = OTHER; note = 2'-O-methyladenosine-3'-phosphate
  modified_base 16: mod_base = OTHER; note = 2'-O-methylcytidine-3'-phosphate
  modified_base 17: mod_base = OTHER; note = 2'-O-methyluridine-3'-phosphate
  modified_base 18: mod_base = OTHER; note = 2'-O-methylcytidine-3'-phosphate
  modified_base 19: mod_base = OTHER; note = 2'-O-methyladenosine-3'-phosphorothioate
  modified_base 20: mod_base = OTHER; note = 2'-O-methylguanosine-3'-phosphorothioate
  modified_base 21: mod_base = OTHER; note = 2'-O-methyladenosine-3'-phosphate
aaaataatttactcactcaga

SEQ ID NO: 2216 - RNA, 21 nt, synthetic construct
  source 1..21: mol_type = other RNA
  modified_base 1: mod_base = OTHER; note = 2'-O-methylguanosine-3'-phosphorothioate
  modified_base 2: mod_base = OTHER; note = 2'-O-methyladenosine-3'-phosphorothioate
  modified_base 3: mod_base = OTHER; note = 2'-O-methylcytidine-3'-phosphate
  modified_base 4: mod_base = OTHER; note = 2'-O-methyladenosine-3'-phosphate
  modified_base 5: mod_base = OTHER; note = 2'-O-methyluridine-3'-phosphate
  modified_base 6: mod_base = OTHER; note = 2'-O-methylcytidine-3'-phosphate
  modified_base 7: mod_base = OTHER; note = 2'-fluorouridine-3'-phosphate
  modified_base 8: mod_base = OTHER; note = 2'-O-methyladenosine-3'-phosphate
  modified_base 9: mod_base = OTHER; note = 2'-fluorouridine-3'-phosphate
  modified_base 10: mod_base = OTHER; note = 2'-fluorouridine-3'-phosphate
  modified_base 11: mod_base = OTHER; note = 2'-fluorocytidine-3'-phosphate
  modified_base 12: mod_base = OTHER; note = 2'-O-methyluridine-3'-phosphate
  modified_base 13: mod_base = OTHER; note = 2'-O-methylguanosine-3'-phosphate
  modified_base 14: mod_base = OTHER; note = 2'-O-methyluridine-3'-phosphate
  modified_base 15: mod_base = OTHER; note = 2'-O-methyluridine-3'-phosphate
  modified_base 16: mod_base = OTHER; note = 2'-O-methylguanosine-3'-phosphate
  modified_base 17: mod_base = OTHER; note = 2'-O-methylguanosine-3'-phosphate
  modified_base 18: mod_base = OTHER; note = 2'-O-methyluridine-3'-phosphate
  modified_base 19: mod_base = OTHER; note = 2'-O-methylcytidine-3'-phosphorothioate
  modified_base 20: mod_base = OTHER; note = 2'-O-methyluridine-3'-phosphorothioate
  modified_base 21: mod_base = OTHER; note = 2'-O-methyladenosine-3'-phosphate
gacatctattctgttggtcta

SEQ ID NO: 2217 - RNA, 21 nt, synthetic construct
  source 1..21: mol_type = other RNA
  modified_base 1: mod_base = OTHER; note = 2'-O-methyluridine-3'-phosphorothioate
  modified_base 2: mod_base = OTHER; note = 2'-O-methyladenosine-3'-phosphorothioate
  modified_base 3: mod_base = OTHER; note = 2'-O-methyladenosine-3'-phosphate
  modified_base 4: mod_base = OTHER; note = 2'-O-methylcytidine-3'-phosphate
  modified_base 5: mod_base = OTHER; note = 2'-O-methyluridine-3'-phosphate
  modified_base 6: mod_base = OTHER; note = 2'-O-methylguanosine-3'-phosphate
  modified_base 7: mod_base = OTHER; note = 2'-fluoroadenosine-3'-phosphate
  modified_base 8: mod_base = OTHER; note = 2'-O-methylguanosine-3'-phosphate
  modified_base 9: mod_base = OTHER; note = 2'-fluorouridine-3'-phosphate
  modified_base 10: mod_base = OTHER; note = 2'-fluoroadenosine-3'-phosphate
  modified_base 11: mod_base = OTHER; note = 2'-fluoroguanosine-3'-phosphate
  modified_base 12: mod_base = OTHER; note = 2'-O-methyluridine-3'-phosphate
  modified_base 13: mod_base = OTHER; note = 2'-O-methylcytidine-3'-phosphate
  modified_base 14: mod_base = OTHER; note = 2'-O-methyluridine-3'-phosphate
  modified_base 15: mod_base = OTHER; note = 2'-O-methyluridine-3'-phosphate
  modified_base 16: mod_base = OTHER; note = 2'-O-methyladenosine-3'-phosphate
  modified_base 17: mod_base = OTHER; note = 2'-O-methyluridine-3'-phosphate
  modified_base 18: mod_base = OTHER; note = 2'-O-methyladenosine-3'-phosphate
  modified_base 19: mod_base = OTHER; note = 2'-O-methyluridine-3'-phosphorothioate
  modified_base 20: mod_base = OTHER; note = 2'-O-methyluridine-3'-phosphorothioate
  modified_base 21: mod_base = OTHER; note = 2'-O-methyladenosine-3'-phosphate
taactgagtagtcttatatta

SEQ ID NO: 2218 - RNA, 21 nt, synthetic construct
  source 1..21: mol_type = other RNA
  modified_base 1: mod_base = OTHER; note = 2'-O-methyluridine-3'-phosphorothioate
  modified_base 2: mod_base = OTHER; note = 2'-O-methylcytidine-3'-phosphorothioate
  modified_base 3: mod_base = OTHER; note = 2'-O-methyluridine-3'-phosphate
  modified_base 4: mod_base = OTHER; note = 2'-O-methylguanosine-3'-phosphate
  modified_base 5: mod_base = OTHER; note = 2'-O-methylguanosine-3'-phosphate
  modified_base 6: mod_base = OTHER; note = 2'-O-methyladenosine-3'-phosphate
  modified_base 7: mod_base = OTHER; note = 2'-fluoroadenosine-3'-phosphate
  modified_base 8: mod_base = OTHER; note = 2'-O-methyluridine-3'-phosphate
  modified_base 9: mod_base = OTHER; note = 2'-fluorouridine-3'-phosphate
  modified_base 10: mod_base = OTHER; note = 2'-fluorouridine-3'-phosphate
  modified_base 11: mod_base = OTHER; note = 2'-fluoroadenosine-3'-phosphate
  modified_base 12: mod_base = OTHER; note = 2'-O-methylguanosine-3'-phosphate
  modified_base 13: mod_base = OTHER; note = 2'-O-methylcytidine-3'-phosphate
  modified_base 14: mod_base = OTHER; note = 2'-O-methylcytidine-3'-phosphate
  modified_base 15: mod_base = OTHER; note = 2'-O-methyluridine-3'-phosphate
  modified_base 16: mod_base = OTHER; note = 2'-O-methyluridine-3'-phosphate
  modified_base 17: mod_base = OTHER; note = 2'-O-methylcytidine-3'-phosphate
  modified_base 18: mod_base = OTHER; note = 2'-O-methyluridine-3'-phosphate
  modified_base 19: mod_base = OTHER; note = 2'-O-methyladenosine-3'-phosphorothioate
  modified_base 20: mod_base = OTHER; note = 2'-O-methyladenosine-3'-phosphorothioate
  modified_base 21: mod_base = OTHER; note = 2'-O-methyladenosine-3'-phosphate
tctggaatttagccttctaaa

SEQ ID NO: 2219 - RNA, 21 nt, synthetic construct
  source 1..21: mol_type = other RNA
  modified_base 1: mod_base = OTHER; note = 2'-O-methyladenosine-3'-phosphorothioate
  modified_base 2: mod_base = OTHER; note = 2'-O-methylcytidine-3'-phosphorothioate
  modified_base 3: mod_base = OTHER; note = 2'-O-methyladenosine-3'-phosphate
  modified_base 4: mod_base = OTHER; note = 2'-O-methyluridine-3'-phosphate
  modified_base 5: mod_base = OTHER; note = 2'-O-methylguanosine-3'-phosphate
  modified_base 6: mod_base = OTHER; note = 2'-O-methylcytidine-3'-phosphate
  modified_base 7: mod_base = OTHER; note = 2'-fluorocytidine-3'-phosphate
  modified_base 8: mod_base = OTHER; note = 2'-O-methyluridine-3'-phosphate
  modified_base 9: mod_base = OTHER; note = 2'-fluorouridine-3'-phosphate
  modified_base 10: mod_base = OTHER; note = 2'-fluoroguanosine-3'-phosphate
  modified_base 11: mod_base = OTHER; note = 2'-fluoroadenosine-3'-phosphate
  modified_base 12: mod_base = OTHER; note = 2'-O-methyladenosine-3'-phosphate
  modified_base 13: mod_base = OTHER; note = 2'-O-methylcytidine-3'-phosphate
  modified_base 14: mod_base = OTHER; note = 2'-O-methyluridine-3'-phosphate
  modified_base 15: mod_base = OTHER; note = 2'-O-methylcytidine-3'-phosphate
  modified_base 16: mod_base = OTHER; note = 2'-O-methyluridine-3'-phosphate
  modified_base 17: mod_base = OTHER; note = 2'-O-methyluridine-3'-phosphate
  modified_base 18: mod_base = OTHER; note = 2'-O-methylguanosine-3'-phosphate
  modified_base 19: mod_base = OTHER; note = 2'-O-methyladenosine-3'-phosphorothioate
  modified_base 20: mod_base = OTHER; note = 2'-O-methyladenosine-3'-phosphorothioate
  modified_base 21: mod_base = OTHER; note = 2'-O-methyladenosine-3'-phosphate
acatgccttgaactcttgaaa

SEQ ID NO: 2220 - RNA, 21 nt, synthetic construct
  source 1..21: mol_type = other RNA
  modified_base 1: mod_base = OTHER; note = 2'-O-methyladenosine-3'-phosphorothioate
  modified_base 2: mod_base = OTHER; note = 2'-O-methyluridine-3'-phosphorothioate
  modified_base 3: mod_base = OTHER; note = 2'-O-methylcytidine-3'-phosphate
  modified_base 4: mod_base = OTHER; note = 2'-O-methyladenosine-3'-phosphate
  modified_base 5: mod_base = OTHER; note = 2'-O-methyladenosine-3'-phosphate
  modified_base 6: mod_base = OTHER; note = 2'-O-methylguanosine-3'-phosphate
  modified_base 7: mod_base = OTHER; note = 2'-fluorocytidine-3'-phosphate
  modified_base 8: mod_base = OTHER; note = 2'-O-methyladenosine-3'-phosphate
  modified_base 9: mod_base = OTHER; note = 2'-fluorocytidine-3'-phosphate
  modified_base 10: mod_base = OTHER; note = 2'-fluorouridine-3'-phosphate
  modified_base 11: mod_base = OTHER; note = 2'-fluorouridine-3'-phosphate
  modified_base 12: mod_base = OTHER; note = 2'-O-methylcytidine-3'-phosphate
  modified_base 13: mod_base = OTHER; note = 2'-O-methyluridine-3'-phosphate
  modified_base 14: mod_base = OTHER; note = 2'-O-methyluridine-3'-phosphate
  modified_base 15: mod_base = OTHER; note = 2'-O-methylguanosine-3'-phosphate
  modified_base 16: mod_base = OTHER; note = 2'-O-methylcytidine-3'-phosphate
  modified_base 17: mod_base = OTHER; note = 2'-O-methyladenosine-3'-phosphate
  modified_base 18: mod_base = OTHER; note = 2'-O-methylcytidine-3'-phosphate
  modified_base 19: mod_base = OTHER; note = 2'-O-methyluridine-3'-phosphorothioate
  modified_base 20: mod_base = OTHER; note = 2'-O-methyluridine-3'-phosphorothioate
  modified_base 21: mod_base = OTHER; note = 2'-O-methyladenosine-3'-phosphate
atcaagcacttcttgcactta

SEQ ID NO: 2221 - RNA, 21 nt, synthetic construct
  source 1..21: mol_type = other RNA
  modified_base 1: mod_base = OTHER; note = 2'-O-methylcytidine-3'-phosphorothioate
  modified_base 2: mod_base = OTHER; note = 2'-O-methyluridine-3'-phosphorothioate
  modified_base 3: mod_base = OTHER; note = 2'-O-methyluridine-3'-phosphate
  modified_base 4: mod_base = OTHER; note = 2'-O-methylguanosine-3'-phosphate
  modified_base 5: mod_base = OTHER; note = 2'-O-methylcytidine-3'-phosphate
  modified_base 6: mod_base = OTHER; note = 2'-O-methyluridine-3'-phosphate
  modified_base 7: mod_base = OTHER; note = 2'-fluorouridine-3'-phosphate
  modified_base 8: mod_base = OTHER; note = 2'-O-methyluridine-3'-phosphate
  modified_base 9: mod_base = OTHER; note = 2'-fluorouridine-3'-phosphate
  modified_base 10: mod_base = OTHER; note = 2'-fluorocytidine-3'-phosphate
  modified_base 11: mod_base = OTHER; note = 2'-fluoroadenosine-3'-phosphate
  modified_base 12: mod_base = OTHER; note = 2'-O-methyluridine-3'-phosphate
  modified_base 13: mod_base = OTHER; note = 2'-O-methylcytidine-3'-phosphate
  modified_base 14: mod_base = OTHER; note = 2'-O-methyluridine-3'-phosphate
  modified_base 15: mod_base = OTHER; note = 2'-O-methyluridine-3'-phosphate
  modified_base 16: mod_base = OTHER; note = 2'-O-methyluridine-3'-phosphate
  modified_base 17: mod_base = OTHER; note = 2'-O-methyladenosine-3'-phosphate
  modified_base 18: mod_base = OTHER; note = 2'-O-methyluridine-3'-phosphate
  modified_base 19: mod_base = OTHER; note = 2'-O-methyladenosine-3'-phosphorothioate
  modified_base 20: mod_base = OTHER; note = 2'-O-methylcytidine-3'-phosphorothioate
  modified_base 21: mod_base = OTHER; note = 2'-O-methyladenosine-3'-phosphate
cttgcttttcatctttataca

SEQ ID NO: 2222 - RNA, 21 nt, synthetic construct
  source 1..21: mol_type = other RNA
  modified_base 1: mod_base = OTHER; note = 2'-O-methyluridine-3'-phosphorothioate
  modified_base 2: mod_base = OTHER; note = 2'-O-methyluridine-3'-phosphorothioate
  modified_base 3: mod_base = OTHER; note = 2'-O-methyluridine-3'-phosphate
  modified_base 4: mod_base = OTHER; note = 2'-O-methyluridine-3'-phosphate
  modified_base 5: mod_base = OTHER; note = 2'-O-methylcytidine-3'-phosphate
  modified_base 6: mod_base = OTHER; note = 2'-O-methyluridine-3'-phosphate
  modified_base 7: mod_base = OTHER; note = 2'-fluorocytidine-3'-phosphate
  modified_base 8: mod_base = OTHER; note = 2'-O-methylcytidine-3'-phosphate
  modified_base 9: mod_base = OTHER; note = 2'-fluorocytidine-3'-phosphate
  modified_base 10: mod_base = OTHER; note = 2'-fluorouridine-3'-phosphate
  modified_base 11: mod_base = OTHER; note = 2'-fluoroadenosine-3'-phosphate
  modified_base 12: mod_base = OTHER; note = 2'-O-methyluridine-3'-phosphate
  modified_base 13: mod_base = OTHER; note = 2'-O-methylguanosine-3'-phosphate
  modified_base 14: mod_base = OTHER; note = 2'-O-methyluridine-3'-phosphate
  modified_base 15: mod_base = OTHER; note = 2'-O-methyladenosine-3'-phosphate
  modified_base 16: mod_base = OTHER; note = 2'-O-methyladenosine-3'-phosphate
  modified_base 17: mod_base = OTHER; note = 2'-O-methyluridine-3'-phosphate
  modified_base 18: mod_base = OTHER; note = 2'-O-methyladenosine-3'-phosphate
  modified_base 19: mod_base = OTHER; note = 2'-O-methyluridine-3'-phosphorothioate
  modified_base 20: mod_base = OTHER; note = 2'-O-methylcytidine-3'-phosphorothioate
  modified_base 21: mod_base = OTHER; note = 2'-O-methyladenosine-3'-phosphate
ttttctccctatgtaatatca

SEQ ID NO: 2223 - RNA, 21 nt, synthetic construct
  source 1..21: mol_type = other RNA
  modified_base 1: mod_base = OTHER; note = 2'-O-methyluridine-3'-phosphorothioate
  modified_base 2: mod_base = OTHER; note = 2'-O-methylguanosine-3'-phosphorothioate
  modified_base 3: mod_base = OTHER; note = 2'-O-methylcytidine-3'-phosphate
  modified_base 4: mod_base = OTHER; note = 2'-O-methyluridine-3'-phosphate
  modified_base 5: mod_base = OTHER; note = 2'-O-methyluridine-3'-phosphate
  modified_base 6: mod_base = OTHER; note = 2'-O-methyluridine-3'-phosphate
  modified_base 7: mod_base = OTHER; note = 2'-fluorocytidine-3'-phosphate
  modified_base 8: mod_base = OTHER; note = 2'-O-methyluridine-3'-phosphate
  modified_base 9: mod_base = OTHER; note = 2'-fluorouridine-3'-phosphate
  modified_base 10: mod_base = OTHER; note = 2'-fluorocytidine-3'-phosphate
  modified_base 11: mod_base = OTHER; note = 2'-fluorouridine-3'-phosphate
  modified_base 12: mod_base = OTHER; note = 2'-O-methyladenosine-3'-phosphate
  modified_base 13: mod_base = OTHER; note = 2'-O-methyluridine-3'-phosphate
  modified_base 14: mod_base = OTHER; note = 2'-O-methylguanosine-3'-phosphate
  modified_base 15: mod_base = OTHER; note = 2'-O-methyluridine-3'-phosphate
  modified_base 16: mod_base = OTHER; note = 2'-O-methylcytidine-3'-phosphate
  modified_base 17: mod_base = OTHER; note = 2'-O-methyluridine-3'-phosphate
  modified_base 18: mod_base = OTHER; note = 2'-O-methyladenosine-3'-phosphate
  modified_base 19: mod_base = OTHER; note = 2'-O-methyladenosine-3'-phosphorothioate
  modified_base 20: mod_base = OTHER; note = 2'-O-methyladenosine-3'-phosphorothioate
  modified_base 21: mod_base = OTHER; note = 2'-O-methyladenosine-3'-phosphate
tgctttcttctatgtctaaaa

SEQ ID NO: 2224 - RNA, 21 nt, synthetic construct
  source 1..21: mol_type = other RNA
  modified_base 1: mod_base = OTHER; note = 2'-O-methyladenosine-3'-phosphorothioate
  modified_base 2: mod_base = OTHER; note = 2'-O-methylcytidine-3'-phosphorothioate
  modified_base 3: mod_base = OTHER; note = 2'-O-methylcytidine-3'-phosphate
  modified_base 4: mod_base = OTHER; note = 2'-O-methyluridine-3'-phosphate
  modified_base 5: mod_base = OTHER; note = 2'-O-methylguanosine-3'-phosphate
  modified_base 6: mod_base = OTHER; note = 2'-O-methylcytidine-3'-phosphate
  modified_base 7: mod_base = OTHER; note = 2'-fluorouridine-3'-phosphate
  modified_base 8: mod_base = OTHER; note = 2'-O-methyluridine-3'-phosphate
  modified_base 9: mod_base = OTHER; note = 2'-fluoroadenosine-3'-phosphate
  modified_base 10: mod_base = OTHER; note = 2'-fluoroguanosine-3'-phosphate
  modified_base 11: mod_base = OTHER; note = 2'-fluorocytidine-3'-phosphate
  modified_base 12: mod_base = OTHER; note = 2'-O-methyladenosine-3'-phosphate
  modified_base 13: mod_base = OTHER; note = 2'-O-methyladenosine-3'-phosphate
  modified_base 14: mod_base = OTHER; note = 2'-O-methyladenosine-3'-phosphate
  modified_base 15: mod_base = OTHER; note = 2'-O-methyluridine-3'-phosphate
  modified_base 16: mod_base = OTHER; note = 2'-O-methylcytidine-3'-phosphate
  modified_base 17: mod_base = OTHER; note = 2'-O-methylguanosine-3'-phosphate
  modified_base 18: mod_base = OTHER; note = 2'-O-methyluridine-3'-phosphate
  modified_base 19: mod_base = OTHER; note = 2'-O-methylcytidine-3'-phosphorothioate
  modified_base 20: mod_base = OTHER; note = 2'-O-methyluridine-3'-phosphorothioate
  modified_base 21: mod_base = OTHER; note = 2'-O-methyladenosine-3'-phosphate
acctgcttagcaaatcgtcta

SEQ ID NO: 2225 - RNA, 21 nt, synthetic construct
  source 1..21: mol_type = other RNA
  modified_base 1: mod_base = OTHER; note = 2'-O-methyladenosine-3'-phosphorothioate
  modified_base 2: mod_base = OTHER; note = 2'-O-methyluridine-3'-phosphorothioate
  modified_base 3: mod_base = OTHER; note = 2'-O-methyladenosine-3'-phosphate
  modified_base 4: mod_base = OTHER; note = 2'-O-methyluridine-3'-phosphate
  modified_base 5: mod_base = OTHER; note = 2'-O-methyluridine-3'-phosphate
  modified_base 6: mod_base = OTHER; note = 2'-O-methylcytidine-3'-phosphate
  modified_base 7: mod_base = OTHER; note = 2'-fluorocytidine-3'-phosphate
  modified_base 8: mod_base = OTHER; note = 2'-O-methyluridine-3'-phosphate
  modified_base 9: mod_base = OTHER; note = 2'-fluorocytidine-3'-phosphate
  modified_base 10: mod_base = OTHER; note = 2'-fluorouridine-3'-phosphate
  modified_base 11: mod_base = OTHER; note = 2'-fluoroadenosine-3'-phosphate
  modified_base 12: mod_base = OTHER; note = 2'-O-methylcytidine-3'-phosphate
  modified_base 13: mod_base = OTHER; note = 2'-O-methylcytidine-3'-phosphate
  modified_base 14: mod_base = OTHER; note = 2'-O-methylcytidine-3'-phosphate
  modified_base 15: mod_base = OTHER; note = 2'-O-methyluridine-3'-phosphate
  modified_base 16: mod_base = OTHER; note = 2'-O-methyluridine-3'-phosphate
  modified_base 17: mod_base = OTHER; note = 2'-O-methyluridine-3'-phosphate
  modified_base 18: mod_base = OTHER; note = 2'-O-methylcytidine-3'-phosphate
  modified_base 19: mod_base = OTHER; note = 2'-O-methyladenosine-3'-phosphorothioate
  modified_base 20: mod_base = OTHER; note = 2'-O-methylcytidine-3'-phosphorothioate
  modified_base 21: mod_base = OTHER; note = 2'-O-methyladenosine-3'-phosphate
atattcctctaccctttcaca

SEQ ID NO: 2226 - RNA, 21 nt, synthetic construct
  source 1..21: mol_type = other RNA
  modified_base 1: mod_base = OTHER; note = 2'-O-methyluridine-3'-phosphorothioate
  modified_base 2: mod_base = OTHER; note = 2'-O-methylcytidine-3'-phosphorothioate
  modified_base 3: mod_base = OTHER; note = 2'-O-methylcytidine-3'-phosphate
  modified_base 4: mod_base = OTHER; note = 2'-O-methylcytidine-3'-phosphate
  modified_base 5: mod_base = OTHER; note = 2'-O-methyladenosine-3'-phosphate
  modified_base 6: mod_base = OTHER; note = 2'-O-methylcytidine-3'-phosphate
  modified_base 7: mod_base = OTHER; note = 2'-fluorouridine-3'-phosphate
  modified_base 8: mod_base = OTHER; note = 2'-O-methyluridine-3'-phosphate
  modified_base 9: mod_base = OTHER; note = 2'-fluorouridine-3'-phosphate
  modified_base 10: mod_base = OTHER; note = 2'-fluorouridine-3'-phosphate
  modified_base 11: mod_base = OTHER; note = 2'-fluorocytidine-3'-phosphate
  modified_base 12: mod_base = OTHER; note = 2'-O-methyluridine-3'-phosphate
  modified_base 13: mod_base = OTHER; note = 2'-O-methyluridine-3'-phosphate
  modified_base 14: mod_base = OTHER; note = 2'-O-methyluridine-3'-phosphate
  modified_base 15: mod_base = OTHER; note = 2'-O-methylguanosine-3'-phosphate
  modified_base 16: mod_base = OTHER; note = 2'-O-methylguanosine-3'-phosphate
  modified_base 17: mod_base = OTHER; note = 2'-O-methylguanosine-3'-phosphate
  modified_base 18: mod_base = OTHER; note = 2'-O-methyluridine-3'-phosphate
  modified_base 19: mod_base = OTHER; note = 2'-O-methyluridine-3'-phosphorothioate
  modified_base 20: mod_base = OTHER; note = 2'-O-methyluridine-3'-phosphorothioate
  modified_base 21: mod_base = OTHER; note = 2'-O-methyladenosine-3'-phosphate
tcccacttttctttgggttta

SEQ ID NO: 2227 - RNA, 21 nt, synthetic construct
  source 1..21: mol_type = other RNA
  modified_base 1: mod_base = OTHER; note = 2'-O-methyladenosine-3'-phosphorothioate
  modified_base 2: mod_base = OTHER; note = 2'-O-methylguanosine-3'-phosphorothioate
  modified_base 3: mod_base = OTHER; note = 2'-O-methylguanosine-3'-phosphate
  modified_base 4: mod_base = OTHER; note = 2'-O-methylcytidine-3'-phosphate
  modified_base 5: mod_base = OTHER; note = 2'-O-methyluridine-3'-phosphate
  modified_base 6: mod_base = OTHER; note = 2'-O-methyluridine-3'-phosphate
  modified_base 7: mod_base = OTHER; note = 2'-fluorocytidine-3'-phosphate
  modified_base 8: mod_base = OTHER; note = 2'-O-methyluridine-3'-phosphate
  modified_base 9: mod_base = OTHER; note = 2'-fluorouridine-3'-phosphate
  modified_base 10: mod_base = OTHER; note = 2'-fluoroguanosine-3'-phosphate
  modified_base 11: mod_base = OTHER; note = 2'-fluorouridine-3'-phosphate
  modified_base 12: mod_base = OTHER; note = 2'-O-methyladenosine-3'-phosphate
  modified_base 13: mod_base = OTHER; note = 2'-O-methyluridine-3'-phosphate
  modified_base 14: mod_base = OTHER; note = 2'-O-methyladenosine-3'-phosphate
  modified_base 15: mod_base = OTHER; note = 2'-O-methyluridine-3'-phosphate
  modified_base 16: mod_base = OTHER; note = 2'-O-methyladenosine-3'-phosphate
  modified_base 17: mod_base = OTHER; note = 2'-O-methylcytidine-3'-phosphate
  modified_base 18: mod_base = OTHER; note = 2'-O-methyluridine-3'-phosphate
  modified_base 19: mod_base = OTHER; note = 2'-O-methyluridine-3'-phosphorothioate
  modified_base 20: mod_base = OTHER; note = 2'-O-methyladenosine-3'-phosphorothioate
  modified_base 21: mod_base = OTHER; note = 2'-O-methyladenosine-3'-phosphate
aggcttcttgtatatacttaa

SEQ ID NO: 2228 - RNA, 21 nt, synthetic construct
  source 1..21: mol_type = other RNA
  modified_base 1: mod_base = OTHER; note = 2'-O-methyladenosine-3'-phosphorothioate
  modified_base 2: mod_base = OTHER; note = 2'-O-methyladenosine-3'-phosphorothioate
  modified_base 3: mod_base = OTHER; note = 2'-O-methyladenosine-3'-phosphate
  modified_base 4: mod_base = OTHER; note = 2'-O-methylcytidine-3'-phosphate
  modified_base 5: mod_base = OTHER; note = 2'-O-methyluridine-3'-phosphate
  modified_base 6: mod_base = OTHER; note = 2'-O-methyluridine-3'-phosphate
  modified_base 7: mod_base = OTHER; note = 2'-fluoroguanosine-3'-phosphate
  modified_base 8: mod_base = OTHER; note = 2'-O-methyladenosine-3'-phosphate
  modified_base 9: mod_base = OTHER; note = 2'-fluorouridine-3'-phosphate
  modified_base 10: mod_base = OTHER; note = 2'-fluorocytidine-3'-phosphate
  modified_base 11: mod_base = OTHER; note = 2'-fluorouridine-3'-phosphate
  modified_base 12: mod_base = OTHER; note = 2'-O-methylguanosine-3'-phosphate
  modified_base 13: mod_base = OTHER; note = 2'-O-methyluridine-3'-phosphate
  modified_base 14: mod_base = OTHER; note = 2'-O-methylguanosine-3'-phosphate
  modified_base 15: mod_base = OTHER; note = 2'-O-methyluridine-3'-phosphate
  modified_base 16: mod_base = OTHER; note = 2'-O-methyluridine-3'-phosphate
  modified_base 17: mod_base = OTHER; note = 2'-O-methyluridine-3'-phosphate
  modified_base 18: mod_base = OTHER; note = 2'-O-methylcytidine-3'-phosphate
  modified_base 19: mod_base = OTHER; note = 2'-O-methyladenosine-3'-phosphorothioate
  modified_base 20: mod_base = OTHER; note = 2'-O-methylguanosine-3'-phosphorothioate
  modified_base 21: mod_base = OTHER; note = 2'-O-methyladenosine-3'-phosphate
aaacttgatctgtgtttcaga

SEQ ID NO: 2229 - RNA, 21 nt, synthetic construct
  source 1..21: mol_type = other RNA
  modified_base 1: mod_base = OTHER; note = 2'-O-methyluridine-3'-phosphorothioate
  modified_base 2: mod_base = OTHER; note = 2'-O-methyluridine-3'-phosphorothioate
  modified_base 3: mod_base = OTHER; note = 2'-O-methyluridine-3'-phosphate
  modified_base 4: mod_base = OTHER; note = 2'-O-methylguanosine-3'-phosphate
  modified_base 5: mod_base = OTHER; note = 2'-O-methylcytidine-3'-phosphate
  modified_base 6: mod_base = OTHER; note = 2'-O-methyluridine-3'-phosphate
  modified_base 7: mod_base = OTHER; note = 2'-fluorouridine-3'-phosphate
  modified_base 8: mod_base = OTHER; note = 2'-O-methyluridine-3'-phosphate
  modified_base 9: mod_base = OTHER; note = 2'-fluoroadenosine-3'-phosphate
  modified_base 10: mod_base = OTHER; note = 2'-fluoroadenosine-3'-phosphate
  modified_base 11: mod_base = OTHER; note = 2'-fluorouridine-3'-phosphate
  modified_base 12: mod_base = OTHER; note = 2'-O-methylguanosine-3'-phosphate
  modified_base 13: mod_base = OTHER; note = 2'-O-methylcytidine-3'-phosphate
  modified_base 14: mod_base = OTHER; note = 2'-O-methyluridine-3'-phosphate
  modified_base 15: mod_base = OTHER; note = 2'-O-methyladenosine-3'-phosphate
  modified_base 16: mod_base = OTHER; note = 2'-O-methyladenosine-3'-phosphate
  modified_base 17: mod_base = OTHER; note = 2'-O-methyladenosine-3'-phosphate
  modified_base 18: mod_base = OTHER; note = 2'-O-methyluridine-3'-phosphate
  modified_base 19: mod_base = OTHER; note = 2'-O-methyluridine-3'-phosphorothioate
  modified_base 20: mod_base = OTHER; note = 2'-O-methylcytidine-3'-phosphorothioate
  modified_base 21: mod_base = OTHER; note = 2'-O-methyladenosine-3'-phosphate
tttgctttaatgctaaattca

SEQ ID NO: 2230 - RNA, 21 nt, synthetic construct
  source 1..21: mol_type = other RNA
  modified_base 1: mod_base = OTHER; note = 2'-O-methyladenosine-3'-phosphorothioate
  modified_base 2: mod_base = OTHER; note = 2'-O-methylguanosine-3'-phosphorothioate
  modified_base 3: mod_base = OTHER; note = 2'-O-methyladenosine-3'-phosphate
  modified_base 4: mod_base = OTHER; note = 2'-O-methylcytidine-3'-phosphate
  modified_base 5: mod_base = OTHER; note = 2'-O-methyluridine-3'-phosphate
  modified_base 6: mod_base = OTHER; note = 2'-O-methyladenosine-3'-phosphate
  modified_base 7: mod_base = OTHER; note = 2'-fluoroguanosine-3'-phosphate
  modified_base 8: mod_base = OTHER; note = 2'-O-methylcytidine-3'-phosphate
  modified_base 9: mod_base = OTHER; note = 2'-fluorouridine-3'-phosphate
  modified_base 10: mod_base = OTHER; note = 2'-fluoroguanosine-3'-phosphate
  modified_base 11: mod_base = OTHER; note = 2'-fluorouridine-3'-phosphate
  modified_base 12: mod_base = OTHER; note = 2'-O-methyluridine-3'-phosphate
  modified_base 13: mod_base = OTHER; note = 2'-O-methyladenosine-3'-phosphate
  modified_base 14: mod_base = OTHER; note = 2'-O-methyluridine-3'-phosphate
  modified_base 15: mod_base = OTHER; note = 2'-O-methyluridine-3'-phosphate
  modified_base 16: mod_base = OTHER; note = 2'-O-methyluridine-3'-phosphate
  modified_base 17: mod_base = OTHER; note = 2'-O-methylguanosine-3'-phosphate
  modified_base 18: mod_base = OTHER; note = 2'-O-methyluridine-3'-phosphate
  modified_base 19: mod_base = OTHER; note = 2'-O-methyladenosine-3'-phosphorothioate
  modified_base 20: mod_base = OTHER; note = 2'-O-methyluridine-3'-phosphorothioate
  modified_base 21: mod_base = OTHER; note = 2'-O-methyladenosine-3'-phosphate
agactagctgttatttgtata

SEQ ID NO: 2231 - RNA, 21 nt, synthetic construct
  source 1..21: mol_type = other RNA
  modified_base 1: mod_base = OTHER; note = 2'-O-methyluridine-3'-phosphorothioate
  modified_base 2: mod_base = OTHER; note = 2'-O-methyluridine-3'-phosphorothioate
  modified_base 3: mod_base = OTHER; note = 2'-O-methylcytidine-3'-phosphate
  modified_base 4: mod_base = OTHER; note = 2'-O-methylcytidine-3'-phosphate
  modified_base 5: mod_base = OTHER; note = 2'-O-methyluridine-3'-phosphate
  modified_base 6: mod_base = OTHER; note = 2'-O-methyladenosine-3'-phosphate
  modified_base 7: mod_base = OTHER; note = 2'-fluorocytidine-3'-phosphate
  modified_base 8: mod_base = OTHER; note = 2'-O-methyluridine-3'-phosphate
  modified_base 9: mod_base = OTHER; note = 2'-fluorouridine-3'-phosphate
  modified_base 10: mod_base = OTHER; note = 2'-fluorouridine-3'-phosphate
  modified_base 11: mod_base = OTHER; note = 2'-fluorocytidine-3'-phosphate
  modified_base 12: mod_base = OTHER; note = 2'-O-methylcytidine-3'-phosphate
  modified_base 13: mod_base = OTHER; note = 2'-O-methylcytidine-3'-phosphate
  modified_base 14: mod_base = OTHER; note = 2'-O-methyluridine-3'-phosphate
  modified_base 15: mod_base = OTHER; note = 2'-O-methyluridine-3'-phosphate
  modified_base 16: mod_base = OTHER; note = 2'-O-methylguanosine-3'-phosphate
  modified_base 17: mod_base = OTHER; note = 2'-O-methyladenosine-3'-phosphate
  modified_base 18: mod_base = OTHER; note = 2'-O-methyladenosine-3'-phosphate
  modified_base 19: mod_base = OTHER; note = 2'-O-methyluridine-3'-phosphorothioate
  modified_base 20: mod_base = OTHER; note = 2'-O-methyladenosine-3'-phosphorothioate
  modified_base 21: mod_base = OTHER; note = 2'-O-methyladenosine-3'-phosphate
ttcctactttcccttgaataa

SEQ ID NO: 2232 - RNA, 21 nt, synthetic construct
  source 1..21: mol_type = other RNA
  modified_base 1: mod_base = OTHER; note = 2'-O-methylcytidine-3'-phosphorothioate
  modified_base 2: mod_base = OTHER; note = 2'-O-methyladenosine-3'-phosphorothioate
  modified_base 3: mod_base = OTHER; note = 2'-O-methylguanosine-3'-phosphate
  modified_base 4: mod_base = OTHER; note = 2'-O-methyladenosine-3'-phosphate
  modified_base 5: mod_base = OTHER; note = 2'-O-methyladenosine-3'-phosphate
  modified_base 6: mod_base = OTHER; note = 2'-O-methylcytidine-3'-phosphate
  modified_base 7: mod_base = OTHER; note = 2'-fluorouridine-3'-phosphate
  modified_base 8: mod_base = OTHER; note = 2'-O-methylguanosine-3'-phosphate
  modified_base 9: mod_base = OTHER; note = 2'-fluoroadenosine-3'-phosphate
  modified_base 10: mod_base = OTHER; note = 2'-fluoroadenosine-3'-phosphate
  modified_base 11: mod_base = OTHER; note = 2'-fluorouridine-3'-phosphate
  modified_base 12: mod_base = OTHER; note = 2'-O-methylguanosine-3'-phosphate
  modified_base 13: mod_base = OTHER; note = 2'-O-methylcytidine-3'-phosphate
  modified_base 14: mod_base = OTHER; note = 2'-O-methyluridine-3'-phosphate
  modified_base 15: mod_base = OTHER; note = 2'-O-methylcytidine-3'-phosphate
  modified_base 16: mod_base = OTHER; note = 2'-O-methyladenosine-3'-phosphate
  modified_base 17: mod_base = OTHER; note = 2'-O-methyladenosine-3'-phosphate
  modified_base 18: mod_base = OTHER; note = 2'-O-methylguanosine-3'-phosphate
  modified_base 19: mod_base = OTHER; note = 2'-O-methyluridine-3'-phosphorothioate
  modified_base 20: mod_base = OTHER; note = 2'-O-methylcytidine-3'-phosphorothioate
  modified_base 21: mod_base = OTHER; note = 2'-O-methyladenosine-3'-phosphate
cagaactgaatgctcaagtca

SEQ ID NO: 2233 - RNA, 21 nt, synthetic construct
  source 1..21: mol_type = other RNA
  modified_base 1: mod_base = OTHER; note = 2'-O-methyluridine-3'-phosphorothioate
  modified_base 2: mod_base = OTHER; note = 2'-O-methylcytidine-3'-phosphorothioate
  modified_base 3: mod_base = OTHER; note = 2'-O-methyluridine-3'-phosphate
  modified_base 4: mod_base = OTHER; note = 2'-O-methyluridine-3'-phosphate
  modified_base 5: mod_base = OTHER; note = 2'-O-methylguanosine-3'-phosphate
  modified_base 6: mod_base = OTHER; note = 2'-O-methyluridine-3'-phosphate
  modified_base 7: mod_base = OTHER; note = 2'-fluorouridine-3'-phosphate
  modified_base 8: mod_base = OTHER; note = 2'-O-methyladenosine-3'-phosphate
  modified_base 9: mod_base = OTHER; note = 2'-fluorocytidine-3'-phosphate
  modified_base 10: mod_base = OTHER; note = 2'-fluorouridine-3'-phosphate
  modified_base 11: mod_base = OTHER; note = 2'-fluoroadenosine-3'-phosphate
  modified_base 12: mod_base = OTHER; note = 2'-O-methyladenosine-3'-phosphate
  modified_base 13: mod_base = OTHER; note = 2'-O-methyluridine-3'-phosphate
  modified_base 14: mod_base = OTHER; note = 2'-O-methyluridine-3'-phosphate
  modified_base 15: mod_base = OTHER; note = 2'-O-methyluridine-3'-phosphate
  modified_base 16: mod_base = OTHER; note = 2'-O-methylcytidine-3'-phosphate
  modified_base 17: mod_base = OTHER; note = 2'-O-methyluridine-3'-phosphate
  modified_base 18: mod_base = OTHER; note = 2'-O-methylcytidine-3'-phosphate
  modified_base 19: mod_base = OTHER; note = 2'-O-methyladenosine-3'-phosphorothioate
  modified_base 20: mod_base = OTHER; note = 2'-O-methyluridine-3'-phosphorothioate
  modified_base 21: mod_base = OTHER; note = 2'-O-methyladenosine-3'-phosphate
tcttgttactaatttctcata

SEQ ID NO: 2234 - RNA, 21 nt, synthetic construct
  source 1..21: mol_type = other RNA
  modified_base 1: mod_base = OTHER; note = 2'-O-methylcytidine-3'-phosphorothioate
  modified_base 2: mod_base = OTHER; note = 2'-O-methyluridine-3'-phosphorothioate
  modified_base 3: mod_base = OTHER; note = 2'-O-methylcytidine-3'-phosphate
  modified_base 4: mod_base = OTHER; note = 2'-O-methyladenosine-3'-phosphate
  modified_base 5: mod_base = OTHER; note = 2'-O-methylguanosine-3'-phosphate
  modified_base 6: mod_base = OTHER; note = 2'-O-methyluridine-3'-phosphate
  modified_base 7: mod_base = OTHER; note = 2'-fluoroguanosine-3'-phosphate
  modified_base 8: mod_base = OTHER; note = 2'-O-methyladenosine-3'-phosphate
  modified_base 9: mod_base = OTHER; note = 2'-fluorouridine-3'-phosphate
  modified_base 10: mod_base = OTHER; note = 2'-fluoroadenosine-3'-phosphate
  modified_base 11: mod_base = OTHER; note = 2'-fluoroguanosine-3'-phosphate
  modified_base 12: mod_base = OTHER; note = 2'-O-methylcytidine-3'-phosphate
  modified_base 13: mod_base = OTHER; note = 2'-O-methylcytidine-3'-phosphate
  modified_base 14: mod_base = OTHER; note = 2'-O-methyluridine-3'-phosphate
  modified_base 15: mod_base = OTHER; note = 2'-O-methyluridine-3'-phosphate
  modified_base 16: mod_base = OTHER; note = 2'-O-methyluridine-3'-phosphate
  modified_base 17: mod_base = OTHER; note = 2'-O-methyladenosine-3'-phosphate
  modified_base 18: mod_base = OTHER; note = 2'-O-methyluridine-3'-phosphate
  modified_base 19: mod_base = OTHER; note = 2'-O-methyladenosine-3'-phosphorothioate
  modified_base 20: mod_base = OTHER; note = 2'-O-methylcytidine-3'-phosphorothioate
  modified_base 21: mod_base = OTHER; note = 2'-O-methyladenosine-3'-phosphate
ctcagtgatagcctttataca

SEQ ID NO: 2235 - RNA, 21 nt, synthetic construct
  source 1..21: mol_type = other RNA
  modified_base 1: mod_base = OTHER; note = 2'-O-methyluridine-3'-phosphorothioate
  modified_base 2: mod_base = OTHER; note = 2'-O-methyluridine-3'-phosphorothioate
  modified_base 3: mod_base = OTHER; note = 2'-O-methyluridine-3'-phosphate
  modified_base 4: mod_base = OTHER; note = 2'-O-methyluridine-3'-phosphate
  modified_base 5: mod_base = OTHER; note = 2'-O-methyladenosine-3'-phosphate
  modified_base 6: mod_base = OTHER; note = 2'-O-methyluridine-3'-phosphate
  modified_base 7: mod_base = OTHER; note = 2'-fluoroguanosine-3'-phosphate
  modified_base 8: mod_base = OTHER; note = 2'-O-methylcytidine-3'-phosphate
  modified_base 9: mod_base = OTHER; note = 2'-fluorouridine-3'-phosphate
  modified_base 10: mod_base = OTHER; note = 2'-fluorocytidine-3'-phosphate
  modified_base 11: mod_base = OTHER; note = 2'-fluorocytidine-3'-phosphate
  modified_base 12: mod_base = OTHER; note = 2'-O-methyluridine-3'-phosphate
  modified_base 13: mod_base = OTHER; note = 2'-O-methyladenosine-3'-phosphate
  modified_base 14: mod_base = OTHER; note = 2'-O-methyladenosine-3'-phosphate
  modified_base 15: mod_base = OTHER; note = 2'-O-methyladenosine-3'-phosphate
  modified_base 16: mod_base = OTHER; note = 2'-O-methyladenosine-3'-phosphate
  modified_base 17: mod_base = OTHER; note = 2'-O-methylcytidine-3'-phosphate
  modified_base 18: mod_base = OTHER; note = 2'-O-methyladenosine-3'-phosphate
  modified_base 19: mod_base = OTHER; note = 2'-O-methyluridine-3'-phosphorothioate
  modified_base 20: mod_base = OTHER; note = 2'-O-methylcytidine-3'-phosphorothioate
  modified_base 21: mod_base = OTHER; note = 2'-O-methyladenosine-3'-phosphate
ttttatgctcctaaaacatca

SEQ ID NO: 2236 - RNA, 21 nt, synthetic construct
  source 1..21: mol_type = other RNA
  modified_base 1: mod_base = OTHER; note = 2'-O-methyluridine-3'-phosphorothioate
  modified_base 2: mod_base = OTHER; note = 2'-O-methyluridine-3'-phosphorothioate
  modified_base 3: mod_base = OTHER; note = 2'-O-methylcytidine-3'-phosphate
  modified_base 4: mod_base = OTHER; note = 2'-O-methyluridine-3'-phosphate
  modified_base 5: mod_base = OTHER; note = 2'-O-methylcytidine-3'-phosphate
  modified_base 6: mod_base = OTHER; note = 2'-O-methylcytidine-3'-phosphate
  modified_base 7: mod_base = OTHER; note = 2'-fluorouridine-3'-phosphate
  modified_base 8: mod_base = OTHER; note = 2'-O-methyluridine-3'-phosphate
  modified_base 9: mod_base = OTHER; note = 2'-fluoroadenosine-3'-phosphate
  modified_base 10: mod_base = OTHER; note = 2'-fluoroguanosine-3'-phosphate
  modified_base 11: mod_base = OTHER; note = 2'-fluoroguanosine-3'-phosphate
  modified_base 12: mod_base = OTHER; note = 2'-O-methyluridine-3'-phosphate
  modified_base 13: mod_base = OTHER; note = 2'-O-methyluridine-3'-phosphate
  modified_base 14: mod_base = OTHER; note = 2'-O-methyladenosine-3'-phosphate
  modified_base 15: mod_base = OTHER; note = 2'-O-methyluridine-3'-phosphate
  modified_base 16: mod_base = OTHER; note = 2'-O-methylguanosine-3'-phosphate
  modified_base 17: mod_base = OTHER; note = 2'-O-methyluridine-3'-phosphate
  modified_base 18: mod_base = OTHER; note = 2'-O-methyluridine-3'-phosphate
  modified_base 19: mod_base = OTHER; note = 2'-O-methylcytidine-3'-phosphorothioate
  modified_base 20: mod_base = OTHER; note = 2'-O-methyladenosine-3'-phosphorothioate
  modified_base 21: mod_base = OTHER; note = 2'-O-methyladenosine-3'-phosphate
ttctccttaggttatgttcaa

SEQ ID NO: 2237 - RNA, 21 nt, synthetic construct
  source 1..21: mol_type = other RNA
  modified_base 1: mod_base = OTHER; note = 2'-O-methyladenosine-3'-phosphorothioate
  modified_base 2: mod_base = OTHER; note = 2'-O-methyluridine-3'-phosphorothioate
  modified_base 3: mod_base = OTHER; note = 2'-O-methyluridine-3'-phosphate
  modified_base 4: mod_base = OTHER; note = 2'-O-methylguanosine-3'-phosphate
  modified_base 5: mod_base = OTHER; note = 2'-O-methylcytidine-3'-phosphate
  modified_base 6: mod_base = OTHER; note = 2'-O-methyluridine-3'-phosphate
  modified_base 7: mod_base = OTHER; note = 2'-fluorocytidine-3'-phosphate
  modified_base 8: mod_base = OTHER; note = 2'-O-methyladenosine-3'-phosphate
  modified_base 9: mod_base = OTHER; note = 2'-fluorouridine-3'-phosphate
  modified_base 10: mod_base = OTHER; note = 2'-fluorocytidine-3'-phosphate
  modified_base 11: mod_base = OTHER; note = 2'-fluoroguanosine-3'-phosphate
  modified_base 12: mod_base = OTHER; note = 2'-O-methyladenosine-3'-phosphate
  modified_base 13: mod_base = OTHER; note = 2'-O-methylguanosine-3'-phosphate
  modified_base 14: mod_base = OTHER; note = 2'-O-methyladenosine-3'-phosphate
  modified_base 15: mod_base = OTHER; note = 2'-O-methylcytidine-3'-phosphate
  modified_base 16: mod_base = OTHER; note = 2'-O-methyladenosine-3'-phosphate
  modified_base 17: mod_base = OTHER; note = 2'-O-methyluridine-3'-phosphate
  modified_base 18: mod_base = OTHER; note = 2'-O-methyladenosine-3'-phosphate
  modified_base 19: mod_base = OTHER; note = 2'-O-methyladenosine-3'-phosphorothioate
  modified_base 20: mod_base = OTHER; note = 2'-O-methyladenosine-3'-phosphorothioate
  modified_base 21: mod_base = OTHER; note = 2'-O-methyladenosine-3'-phosphate
attgctcatcgagacataaaa

SEQ ID NO: 2238 - RNA, 21 nt, synthetic construct
  source 1..21: mol_type = other RNA
  modified_base 1: mod_base = OTHER; note = 2'-O-methylcytidine-3'-phosphorothioate
  modified_base 2: mod_base = OTHER; note = 2'-O-methylcytidine-3'-phosphorothioate
  modified_base 3: mod_base = OTHER; note = 2'-O-methyluridine-3'-phosphate
  modified_base 4: mod_base = OTHER; note = 2'-O-methyluridine-3'-phosphate
  modified_base 5: mod_base = OTHER; note = 2'-O-methyluridine-3'-phosphate
  modified_base 6: mod_base = OTHER; note = 2'-O-methylguanosine-3'-phosphate
  modified_base 7: mod_base = OTHER; note = 2'-fluorouridine-3'-phosphate
  modified_base 8: mod_base = OTHER; note = 2'-O-methyladenosine-3'-phosphate
  modified_base 9: mod_base = OTHER; note = 2'-fluorocytidine-3'-phosphate
  modified_base 10: mod_base = OTHER; note = 2'-fluoroadenosine-3'-phosphate
  modified_base 11: mod_base = OTHER; note = 2'-fluorouridine-3'-phosphate
  modified_base 12: mod_base = OTHER; note = 2'-O-methyladenosine-3'-phosphate
  modified_base 13: mod_base = OTHER; note = 2'-O-methylcytidine-3'-phosphate
  modified_base 14: mod_base = OTHER; note = 2'-O-methyladenosine-3'-phosphate
  modified_base 15: mod_base = OTHER; note = 2'-O-methylcytidine-3'-phosphate
  modified_base 16: mod_base = OTHER; note = 2'-O-methyladenosine-3'-phosphate
  modified_base 17: mod_base = OTHER; note = 2'-O-methylcytidine-3'-phosphate
  modified_base 18: mod_base = OTHER; note = 2'-O-methyluridine-3'-phosphate
  modified_base 19: mod_base = OTHER; note = 2'-O-methyluridine-3'-phosphorothioate
  modified_base 20: mod_base = OTHER; note = 2'-O-methyladenosine-3'-phosphorothioate
  modified_base 21: mod_base = OTHER; note = 2'-O-methyladenosine-3'-phosphate
cctttgtacatacacacttaa

SEQ ID NO: 2239 - RNA, 21 nt, synthetic construct
  source 1..21: mol_type = other RNA
  modified_base 1: mod_base = OTHER; note = 2'-O-methyluridine-3'-phosphorothioate
  modified_base 2: mod_base = OTHER; note = 2'-O-methyluridine-3'-phosphorothioate
  modified_base 3: mod_base = OTHER; note = 2'-O-methylguanosine-3'-phosphate
  modified_base 4: mod_base = OTHER; note = 2'-O-methyladenosine-3'-phosphate
  modified_base 5: mod_base = OTHER; note = 2'-O-methyladenosine-3'-phosphate
  modified_base 6: mod_base = OTHER; note = 2'-O-methylcytidine-3'-phosphate
  modified_base 7: mod_base = OTHER; note = 2'-fluorocytidine-3'-phosphate
  modified_base 8: mod_base = OTHER; note = 2'-O-methyladenosine-3'-phosphate
  modified_base 9: mod_base = OTHER; note = 2'-fluoroadenosine-3'-phosphate
  modified_base 10: mod_base = OTHER; note = 2'-fluoroguanosine-3'-phosphate
  modified_base 11: mod_base = OTHER; note = 2'-fluoroadenosine-3'-phosphate
  modified_base 12: mod_base = OTHER; note = 2'-O-methylguanosine-3'-phosphate
  modified_base 13: mod_base = OTHER; note = 2'-O-methylcytidine-3'-phosphate
  modified_base 14: mod_base = OTHER; note = 2'-O-methyladenosine-3'-phosphate
  modified_base 15: mod_base = OTHER; note = 2'-O-methylcytidine-3'-phosphate
  modified_base 16: mod_base = OTHER; note = 2'-O-methyladenosine-3'-phosphate
  modified_base 17: mod_base = OTHER; note = 2'-O-methyluridine-3'-phosphate
  modified_base 18: mod_base = OTHER; note = 2'-O-methylguanosine-3'-phosphate
  modified_base 19: mod_base = OTHER; note = 2'-O-methyladenosine-3'-phosphorothioate
  modified_base 20: mod_base = OTHER; note = 2'-O-methyladenosine-3'-phosphorothioate
  modified_base 21: mod_base = OTHER; note = 2'-O-methyladenosine-3'-phosphate
ttgaaccaagagcacatgaaa

SEQ ID NO: 2240 - RNA, 21 nt, synthetic construct
  source 1..21: mol_type = other RNA
  modified_base 1: mod_base = OTHER; note = 2'-O-methyluridine-3'-phosphorothioate
  modified_base 2: mod_base = OTHER; note = 2'-O-methylcytidine-3'-phosphorothioate
  modified_base 3: mod_base = OTHER; note = 2'-O-methyladenosine-3'-phosphate
  modified_base 4: mod_base = OTHER; note = 2'-O-methylguanosine-3'-phosphate
  modified_base 5: mod_base = OTHER; note = 2'-O-methylguanosine-3'-phosphate
  modified_base 6: mod_base = OTHER; note = 2'-O-methylguanosine-3'-phosphate
  modified_base 7: mod_base = OTHER; note = 2'-fluoroadenosine-3'-phosphate
  modified_base 8: mod_base = OTHER; note = 2'-O-methyluridine-3'-phosphate
  modified_base 9: mod_base = OTHER; note = 2'-fluorouridine-3'-phosphate
  modified_base 10: mod_base = OTHER; note = 2'-fluorouridine-3'-phosphate
  modified_base 11: mod_base = OTHER; note = 2'-fluorouridine-3'-phosphate
  modified_base 12: mod_base = OTHER; note = 2'-O-methyladenosine-3'-phosphate
  modified_base 13: mod_base = OTHER; note = 2'-O-methyladenosine-3'-phosphate
  modified_base 14: mod_base = OTHER; note = 2'-O-methyladenosine-3'-phosphate
  modified_base 15: mod_base = OTHER; note = 2'-O-methylguanosine-3'-phosphate
  modified_base 16: mod_base = OTHER; note = 2'-O-methyluridine-3'-phosphate
  modified_base 17: mod_base = OTHER; note = 2'-O-methylcytidine-3'-phosphate
  modified_base 18: mod_base = OTHER; note = 2'-O-methyluridine-3'-phosphate
  modified_base 19: mod_base = OTHER; note = 2'-O-methyladenosine-3'-phosphorothioate
  modified_base 20: mod_base = OTHER; note = 2'-O-methyladenosine-3'-phosphorothioate
  modified_base 21: mod_base = OTHER; note = 2'-O-methyladenosine-3'-phosphate
tcagggattttaaagtctaaa

SEQ ID NO: 2241 - RNA, 21 nt, synthetic construct
  source 1..21: mol_type = other RNA
  modified_base 1: mod_base = OTHER; note = 2'-O-methyluridine-3'-phosphorothioate
  modified_base 2: mod_base = OTHER; note = 2'-O-methyladenosine-3'-phosphorothioate
  modified_base 3: mod_base = OTHER; note = 2'-O-methylcytidine-3'-phosphate
  modified_base 4: mod_base = OTHER; note = 2'-O-methyluridine-3'-phosphate
  modified_base 5: mod_base = OTHER; note = 2'-O-methyluridine-3'-phosphate
  modified_base 6: mod_base = OTHER; note = 2'-O-methylguanosine-3'-phosphate
  modified_base 7: mod_base = OTHER; note = 2'-fluorocytidine-3'-phosphate
  modified_base 8: mod_base = OTHER; note = 2'-O-methyluridine-3'-phosphate
  modified_base 9: mod_base = OTHER; note = 2'-fluorouridine-3'-phosphate
  modified_base 10: mod_base = OTHER; note = 2'-fluoroadenosine-3'-phosphate
  modified_base 11: mod_base = OTHER; note = 2'-fluorouridine-3'-phosphate
  modified_base 12: mod_base = OTHER; note = 2'-O-methyladenosine-3'-phosphate
  modified_base 13: mod_base = OTHER; note = 2'-O-methyladenosine-3'-phosphate
  modified_base 14: mod_base = OTHER; note = 2'-O-methyladenosine-3'-phosphate
  modified_base 15: mod_base = OTHER; note = 2'-O-methylguanosine-3'-phosphate
  modified_base 16: mod_base = OTHER; note = 2'-O-methyluridine-3'-phosphate
  modified_base 17: mod_base = OTHER; note = 2'-O-methylguanosine-3'-phosphate
  modified_base 18: mod_base = OTHER; note = 2'-O-methyladenosine-3'-phosphate
  modified_base 19: mod_base = OTHER; note = 2'-O-methyluridine-3'-phosphorothioate
  modified_base 20: mod_base = OTHER; note = 2'-O-methyladenosine-3'-phosphorothioate
  modified_base 21: mod_base = OTHER; note = 2'-O-methyladenosine-3'-phosphate
tacttgcttataaagtgataa

SEQ ID NO: 2242 - RNA, 21 nt, synthetic construct
  source 1..21: mol_type = other RNA
  modified_base 1: mod_base = OTHER; note = 2'-O-methyladenosine-3'-phosphorothioate
  modified_base 2: mod_base = OTHER; note = 2'-O-methyluridine-3'-phosphorothioate
  modified_base 3: mod_base = OTHER; note = 2'-O-methylguanosine-3'-phosphate
  modified_base 4: mod_base = OTHER; note = 2'-O-methylcytidine-3'-phosphate
  modified_base 5: mod_base = OTHER; note = 2'-O-methyladenosine-3'-phosphate
  modified_base 6: mod_base = OTHER; note = 2'-O-methyluridine-3'-phosphate
  modified_base 7: mod_base = OTHER; note = 2'-fluorocytidine-3'-phosphate
  modified_base 8: mod_base = OTHER; note = 2'-O-methyluridine-3'-phosphate
  modified_base 9: mod_base = OTHER; note = 2'-fluoroadenosine-3'-phosphate
  modified_base 10: mod_base = OTHER; note = 2'-fluoroadenosine-3'-phosphate
  modified_base 11: mod_base = OTHER; note = 2'-fluoroadenosine-3'-phosphate
  modified_base 12: mod_base = OTHER; note = 2'-O-methylcytidine-3'-phosphate
  modified_base 13: mod_base = OTHER; note = 2'-O-methylcytidine-3'-phosphate
  modified_base 14: mod_base = OTHER; note = 2'-O-methyluridine-3'-phosphate
  modified_base 15: mod_base = OTHER; note = 2'-O-methyladenosine-3'-phosphate
  modified_base 16: mod_base = OTHER; note = 2'-O-methylcytidine-3'-phosphate
  modified_base 17: mod_base = OTHER; note = 2'-O-methylcytidine-3'-phosphate
  modified_base 18: mod_base = OTHER; note = 2'-O-methyluridine-3'-phosphate
  modified_base 19: mod_base = OTHER; note = 2'-O-methyluridine-3'-phosphorothioate
  modified_base 20: mod_base = OTHER; note = 2'-O-methylguanosine-3'-phosphorothioate
  modified_base 21: mod_base = OTHER; note = 2'-O-methyladenosine-3'-phosphate
atgcatctaaacctaccttga

SEQ ID NO: 2243 - RNA, 21 nt, synthetic construct
  source 1..21: mol_type = other RNA
  modified_base 1: mod_base = OTHER; note = 2'-O-methyluridine-3'-phosphorothioate
  modified_base 2: mod_base = OTHER; note = 2'-O-methyluridine-3'-phosphorothioate
  modified_base 3: mod_base = OTHER; note = 2'-O-methylguanosine-3'-phosphate
  modified_base 4: mod_base = OTHER; note = 2'-O-methylguanosine-3'-phosphate
  modified_base 5: mod_base = OTHER; note = 2'-O-methylguanosine-3'-phosphate
  modified_base 6: mod_base = OTHER; note = 2'-O-methyladenosine-3'-phosphate
  modified_base 7: mod_base = OTHER; note = 2'-fluoroadenosine-3'-phosphate
  modified_base 8: mod_base = OTHER; note = 2'-O-methyladenosine-3'-phosphate
  modified_base 9: mod_base = OTHER; note = 2'-fluoroadenosine-3'-phosphate
  modified_base 10: mod_base = OTHER; note = 2'-fluorocytidine-3'-phosphate
  modified_base 11: mod_base = OTHER; note = 2'-fluoroadenosine-3'-phosphate
  modified_base 12: mod_base = OTHER; note = 2'-O-methylcytidine-3'-phosphate
  modified_base 13: mod_base = OTHER; note = 2'-O-methyluridine-3'-phosphate
  modified_base 14: mod_base = OTHER; note = 2'-O-methyladenosine-3'-phosphate
  modified_base 15: mod_base = OTHER; note = 2'-O-methyluridine-3'-phosphate
  modified_base 16: mod_base = OTHER; note = 2'-O-methyluridine-3'-phosphate
  modified_base 17: mod_base = OTHER; note = 2'-O-methyladenosine-3'-phosphate
  modified_base 18: mod_base = OTHER; note = 2'-O-methyluridine-3'-phosphate
  modified_base 19: mod_base = OTHER; note = 2'-O-methylguanosine-3'-phosphorothioate
  modified_base 20: mod_base = OTHER; note = 2'-O-methyladenosine-3'-phosphorothioate
  modified_base 21: mod_base = OTHER; note = 2'-O-methyladenosine-3'-phosphate
ttgggaaaacactattatgaa

SEQ ID NO: 2244 - RNA, 21 nt, synthetic construct
  source 1..21: mol_type = other RNA
  modified_base 1: mod_base = OTHER; note = 2'-O-methyladenosine-3'-phosphorothioate
  modified_base 2: mod_base = OTHER; note = 2'-O-methyladenosine-3'-phosphorothioate
  modified_base 3: mod_base = OTHER; note = 2'-O-methyladenosine-3'-phosphate
  modified_base 4: mod_base = OTHER; note = 2'-O-methylcytidine-3'-phosphate
  modified_base 5: mod_base = OTHER; note = 2'-O-methyluridine-3'-phosphate
  modified_base 6: mod_base = OTHER; note = 2'-O-methylcytidine-3'-phosphate
  modified_base 7: mod_base = OTHER; note = 2'-fluorocytidine-3'-phosphate
  modified_base 8: mod_base = OTHER; note = 2'-O-methyladenosine-3'-phosphate
  modified_base 9: mod_base = OTHER; note = 2'-fluoroadenosine-3'-phosphate
  modified_base 10: mod_base = OTHER; note = 2'-fluoroadenosine-3'-phosphate
  modified_base 11: mod_base = OTHER; note = 2'-fluoroguanosine-3'-phosphate
  modified_base 12: mod_base = OTHER; note = 2'-O-methyladenosine-3'-phosphate
  modified_base 13: mod_base = OTHER; note = 2'-O-methylguanosine-3'-phosphate
  modified_base 14: mod_base = OTHER; note = 2'-O-methyladenosine-3'-phosphate
  modified_base 15: mod_base = OTHER; note = 2'-O-methyladenosine-3'-phosphate
  modified_base 16: mod_base = OTHER; note = 2'-O-methyladenosine-3'-phosphate
  modified_base 17: mod_base = OTHER; note = 2'-O-methyluridine-3'-phosphate
  modified_base 18: mod_base = OTHER; note = 2'-O-methylguanosine-3'-phosphate
  modified_base 19: mod_base = OTHER; note = 2'-O-methyladenosine-3'-phosphorothioate
  modified_base 20: mod_base = OTHER; note = 2'-O-methyladenosine-3'-phosphorothioate
  modified_base 21: mod_base = OTHER; note = 2'-O-methyladenosine-3'-phosphate
aaactccaaagagaaatgaaa

SEQ ID NO: 2245 - RNA, 21 nt, synthetic construct
  source 1..21: mol_type = other RNA
  modified_base 1: mod_base = OTHER; note = 2'-O-methyladenosine-3'-phosphorothioate
  modified_base 2: mod_base = OTHER; note = 2'-O-methyluridine-3'-phosphorothioate
  modified_base 3: mod_base = OTHER; note = 2'-O-methylguanosine-3'-phosphate
  modified_base 4: mod_base = OTHER; note = 2'-O-methylguanosine-3'-phosphate
  modified_base 5: mod_base = OTHER; note = 2'-O-methylguanosine-3'-phosphate
  modified_base 6: mod_base = OTHER; note = 2'-O-methylcytidine-3'-phosphate
  modified_base 7: mod_base = OTHER; note = 2'-fluoroadenosine-3'-phosphate
  modified_base 8: mod_base = OTHER; note = 2'-O-methyluridine-3'-phosphate
  modified_base 9: mod_base = OTHER; note = 2'-fluorouridine-3'-phosphate
  modified_base 10: mod_base = OTHER; note = 2'-fluorouridine-3'-phosphate
  modified_base 11: mod_base = OTHER; note = 2'-fluorouridine-3'-phosphate
  modified_base 12: mod_base = OTHER; note = 2'-O-methyluridine-3'-phosphate
  modified_base 13: mod_base = OTHER; note = 2'-O-methylcytidine-3'-phosphate
  modified_base 14: mod_base = OTHER; note = 2'-O-methyladenosine-3'-phosphate
  modified_base 15: mod_base = OTHER; note = 2'-O-methyladenosine-3'-phosphate
  modified_base 16: mod_base = OTHER; note = 2'-O-methyladenosine-3'-phosphate
  modified_base 17: mod_base = OTHER; note = 2'-O-methyladenosine-3'-phosphate
  modified_base 18: mod_base = OTHER; note = 2'-O-methylcytidine-3'-phosphate
  modified_base 19: mod_base = OTHER; note = 2'-O-methyladenosine-3'-phosphorothioate
  modified_base 20: mod_base = OTHER; note = 2'-O-methyluridine-3'-phosphorothioate
  modified_base 21: mod_base = OTHER; note = 2'-O-methyladenosine-3'-phosphate
atgggcatttttcaaaacata

SEQ ID NO: 2246 - RNA, 21 nt, synthetic construct
  source 1..21: mol_type = other RNA
  modified_base 1: mod_base = OTHER; note = 2'-O-methyladenosine-3'-phosphorothioate
  modified_base 2: mod_base = OTHER; note = 2'-O-methyluridine-3'-phosphorothioate
  modified_base 3: mod_base = OTHER; note = 2'-O-methyladenosine-3'-phosphate
  modified_base 4: mod_base = OTHER; note = 2'-O-methyladenosine-3'-phosphate
  modified_base 5: mod_base = OTHER; note = 2'-O-methyluridine-3'-phosphate
  modified_base 6: mod_base = OTHER; note = 2'-O-methylguanosine-3'-phosphate
  modified_base 7: mod_base = OTHER; note = 2'-fluoroguanosine-3'-phosphate
  modified_base 8: mod_base = OTHER; note = 2'-O-methyladenosine-3'-phosphate
  modified_base 9: mod_base = OTHER; note = 2'-fluoroadenosine-3'-phosphate
  modified_base 10: mod_base = OTHER; note = 2'-fluorocytidine-3'-phosphate
  modified_base 11: mod_base = OTHER; note = 2'-fluorouridine-3'-phosphate
  modified_base 12: mod_base = OTHER; note = 2'-O-methyluridine-3'-phosphate
  modified_base 13: mod_base = OTHER; note = 2'-O-methylguanosine-3'-phosphate
  modified_base 14: mod_base = OTHER; note = 2'-O-methylguanosine-3'-phosphate
  modified_base 15: mod_base = OTHER; note = 2'-O-methyladenosine-3'-phosphate
  modified_base 16: mod_base = OTHER; note = 2'-O-methylcytidine-3'-phosphate
  modified_base 17: mod_base = OTHER; note = 2'-O-methyluridine-3'-phosphate
  modified_base 18: mod_base = OTHER; note = 2'-O-methylcytidine-3'-phosphate
  modified_base 19: mod_base = OTHER; note = 2'-O-methyladenosine-3'-phosphorothioate
  modified_base 20: mod_base = OTHER; note = 2'-O-methyladenosine-3'-phosphorothioate
  modified_base 21: mod_base = OTHER; note = 2'-O-methyladenosine-3'-phosphate
ataatggaacttggactcaaa

SEQ ID NO: 2247 - RNA, 21 nt, synthetic construct
  source 1..21: mol_type = other RNA
  modified_base 1: mod_base = OTHER; note = 2'-O-methyluridine-3'-phosphorothioate
  modified_base 2: mod_base = OTHER; note = 2'-O-methylguanosine-3'-phosphorothioate
  modified_base 3: mod_base = OTHER; note = 2'-O-methyluridine-3'-phosphate
  modified_base 4: mod_base = OTHER; note = 2'-O-methylguanosine-3'-phosphate
  modified_base 5: mod_base = OTHER; note = 2'-O-methyluridine-3'-phosphate
  modified_base 6: mod_base = OTHER; note = 2'-O-methyladenosine-3'-phosphate
  modified_base 7: mod_base = OTHER; note = 2'-fluoroguanosine-3'-phosphate
  modified_base 8: mod_base = OTHER; note = 2'-O-methyladenosine-3'-phosphate
  modified_base 9: mod_base = OTHER; note = 2'-fluorouridine-3'-phosphate
  modified_base 10: mod_base = OTHER; note = 2'-fluoroguanosine-3'-phosphate
  modified_base 11: mod_base = OTHER; note = 2'-fluoroadenosine-3'-phosphate
  modified_base 12: mod_base = OTHER; note = 2'-O-methylcytidine-3'-phosphate
  modified_base 13: mod_base = OTHER; note = 2'-O-methylguanosine-3'-phosphate
  modified_base 14: mod_base = OTHER; note = 2'-O-methyladenosine-3'-phosphate
  modified_base 15: mod_base = OTHER; note = 2'-O-methyladenosine-3'-phosphate
  modified_base 16: mod_base = OTHER; note = 2'-O-methyladenosine-3'-phosphate
  modified_base 17: mod_base = OTHER; note = 2'-O-methylcytidine-3'-phosphate
  modified_base 18: mod_base = OTHER; note = 2'-O-methylcytidine-3'-phosphate
  modified_base 19: mod_base = OTHER; note = 2'-O-methyladenosine-3'-phosphorothioate
  modified_base 20: mod_base = OTHER; note = 2'-O-methyladenosine-3'-phosphorothioate
  modified_base 21: mod_base = OTHER; note = 2'-O-methyladenosine-3'-phosphate
tgtgtagatgacgaaaccaaa

SEQ ID NO: 2248 - RNA, 21 nt, synthetic construct
  source 1..21: mol_type = other RNA
  modified_base 1: mod_base = OTHER; note = 2'-O-methyluridine-3'-phosphorothioate
  modified_base 2: mod_base = OTHER; note = 2'-O-methyluridine-3'-phosphorothioate
  modified_base 3: mod_base = OTHER; note = 2'-O-methylcytidine-3'-phosphate
  modified_base 4: mod_base = OTHER; note = 2'-O-methyluridine-3'-phosphate
  modified_base 5: mod_base = OTHER; note = 2'-O-methyladenosine-3'-phosphate
  modified_base 6: mod_base = OTHER; note = 2'-O-methylcytidine-3'-phosphate
  modified_base 7: mod_base = OTHER; note = 2'-fluorocytidine-3'-phosphate
  modified_base 8: mod_base = OTHER; note = 2'-O-methyluridine-3'-phosphate
  modified_base 9: mod_base = OTHER; note = 2'-fluorocytidine-3'-phosphate
  modified_base 10: mod_base = OTHER; note = 2'-fluoroadenosine-3'-phosphate
  modified_base 11: mod_base = OTHER; note = 2'-fluoroadenosine-3'-phosphate
  modified_base 12: mod_base = OTHER; note = 2'-O-methyladenosine-3'-phosphate
  modified_base 13: mod_base = OTHER; note = 2'-O-methylguanosine-3'-phosphate
  modified_base 14: mod_base = OTHER; note = 2'-O-methyladenosine-3'-phosphate
  modified_base 15: mod_base = OTHER; note = 2'-O-methyluridine-3'-phosphate
  modified_base 16: mod_base = OTHER; note = 2'-O-methyladenosine-3'-phosphate
  modified_base 17: mod_base = OTHER; note = 2'-O-methyladenosine-3'-phosphate
  modified_base 18: mod_base = OTHER; note = 2'-O-methylguanosine-3'-phosphate
  modified_base 19: mod_base = OTHER; note = 2'-O-methyladenosine-3'-phosphorothioate
  modified_base 20: mod_base = OTHER; note = 2'-O-methylcytidine-3'-phosphorothioate
  modified_base 21: mod_base = OTHER; note = 2'-O-methyladenosine-3'-phosphate
ttctacctcaaagataagaca

SEQ ID NO: 2249 - RNA, 21 nt, synthetic construct
  source 1..21: mol_type = other RNA
  modified_base 1: mod_base = OTHER; note = 2'-O-methyladenosine-3'-phosphorothioate
  modified_base 2: mod_base = OTHER; note = 2'-O-methylguanosine-3'-phosphorothioate
  modified_base 3: mod_base = OTHER; note = 2'-O-methyladenosine-3'-phosphate
  modified_base 4: mod_base = OTHER; note = 2'-O-methyladenosine-3'-phosphate
  modified_base 5: mod_base = OTHER; note = 2'-O-methylguanosine-3'-phosphate
  modified_base 6: mod_base = OTHER; note = 2'-O-methylguanosine-3'-phosphate
  modified_base 7: mod_base = OTHER; note = 2'-fluorocytidine-3'-phosphate
  modified_base 8: mod_base = OTHER; note = 2'-O-methyladenosine-3'-phosphate
  modified_base 9: mod_base = OTHER; note = 2'-fluorouridine-3'-phosphate
  modified_base 10: mod_base = OTHER; note = 2'-fluoroadenosine-3'-phosphate
  modified_base 11: mod_base = OTHER; note = 2'-fluorouridine-3'-phosphate
  modified_base 12: mod_base = OTHER; note = 2'-O-methyluridine-3'-phosphate
  modified_base 13: mod_base = OTHER; note = 2'-O-methylguanosine-3'-phosphate
  modified_base 14: mod_base = OTHER; note = 2'-O-methyladenosine-3'-phosphate
  modified_base 15: mod_base = OTHER; note = 2'-O-methylguanosine-3'-phosphate
  modified_base 16: mod_base = OTHER; note = 2'-O-methyluridine-3'-phosphate
  modified_base 17: mod_base = OTHER; note = 2'-O-methyluridine-3'-phosphate
  modified_base 18: mod_base = OTHER; note = 2'-O-methyladenosine-3'-phosphate
  modified_base 19: mod_base = OTHER; note = 2'-O-methyluridine-3'-phosphorothioate
  modified_base 20: mod_base = OTHER; note = 2'-O-methyluridine-3'-phosphorothioate
  modified_base 21: mod_base = OTHER; note = 2'-O-methyladenosine-3'-phosphate
agaaggcatattgagttatta

SEQ ID NO: 2250 - RNA, 21 nt, synthetic construct
  source 1..21: mol_type = other RNA
  modified_base 1: mod_base = OTHER; note = 2'-O-methyladenosine-3'-phosphorothioate
  modified_base 2: mod_base = OTHER; note = 2'-O-methyluridine-3'-phosphorothioate
  modified_base 3: mod_base = OTHER; note = 2'-O-methylguanosine-3'-phosphate
  modified_base 4: mod_base = OTHER; note = 2'-O-methylguanosine-3'-phosphate
  modified_base 5: mod_base = OTHER; note = 2'-O-methyladenosine-3'-phosphate
  modified_base 6: mod_base = OTHER; note = 2'-O-methylguanosine-3'-phosphate
  modified_base 7: mod_base = OTHER; note = 2'-fluorouridine-3'-phosphate
  modified_base 8: mod_base = OTHER; note = 2'-O-methyluridine-3'-phosphate
  modified_base 9: mod_base = OTHER; note = 2'-fluorouridine-3'-phosphate
  modified_base 10: mod_base = OTHER; note = 2'-fluorouridine-3'-phosphate
  modified_base 11: mod_base = OTHER; note = 2'-fluorouridine-3'-phosphate
  modified_base 12: mod_base = OTHER; note = 2'-O-methylcytidine-3'-phosphate
  modified_base 13: mod_base = OTHER; note = 2'-O-methyluridine-3'-phosphate
  modified_base 14: mod_base = OTHER; note = 2'-O-methylguanosine-3'-phosphate
  modified_base 15: mod_base = OTHER; note = 2'-O-methylcytidine-3'-phosphate
  modified_base 16: mod_base = OTHER; note = 2'-O-methyluridine-3'-phosphate
  modified_base 17: mod_base = OTHER; note = 2'-O-methyladenosine-3'-phosphate
  modified_base 18: mod_base = OTHER; note = 2'-O-methyluridine-3'-phosphate
  modified_base 19: mod_base = OTHER; note = 2'-O-methyluridine-3'-phosphorothioate
  modified_base 20: mod_base = OTHER; note = 2'-O-methyluridine-3'-phosphorothioate
  modified_base 21: mod_base = OTHER; note = 2'-O-methyladenosine-3'-phosphate
atggagtttttctgctattta

SEQ ID NO: 2251 - RNA, 21 nt, synthetic construct
  source 1..21: mol_type = other RNA
  modified_base 1: mod_base = OTHER; note = 2'-O-methyluridine-3'-phosphorothioate
  modified_base 2: mod_base = OTHER; note = 2'-O-methylcytidine-3'-phosphorothioate
  modified_base 3: mod_base = OTHER; note = 2'-O-methyladenosine-3'-phosphate
  modified_base 4: mod_base = OTHER; note = 2'-O-methylguanosine-3'-phosphate
  modified_base 5: mod_base = OTHER; note = 2'-O-methyluridine-3'-phosphate
  modified_base 6: mod_base = OTHER; note = 2'-O-methyluridine-3'-phosphate
  modified_base 7: mod_base = OTHER; note = 2'-fluorouridine-3'-phosphate
  modified_base 8: mod_base = OTHER; note = 2'-O-methylcytidine-3'-phosphate
  modified_base 9: mod_base = OTHER; note = 2'-fluorouridine-3'-phosphate
  modified_base 10: mod_base = OTHER; note = 2'-fluorocytidine-3'-phosphate
  modified_base 11: mod_base = OTHER; note = 2'-fluoroadenosine-3'-phosphate
  modified_base 12: mod_base = OTHER; note = 2'-O-methyluridine-3'-phosphate
  modified_base 13: mod_base = OTHER; note = 2'-O-methyluridine-3'-phosphate
  modified_base 14: mod_base = OTHER; note = 2'-O-methyladenosine-3'-phosphate
  modified_base 15: mod_base = OTHER; note = 2'-O-methylguanosine-3'-phosphate
  modified_base 16: mod_base = OTHER; note = 2'-O-methyluridine-3'-phosphate
  modified_base 17: mod_base = OTHER; note = 2'-O-methyluridine-3'-phosphate
  modified_base 18: mod_base = OTHER; note = 2'-O-methyluridine-3'-phosphate
  modified_base 19: mod_base = OTHER; note = 2'-O-methylguanosine-3'-phosphorothioate
  modified_base 20: mod_base = OTHER; note = 2'-O-methyluridine-3'-phosphorothioate
  modified_base 21: mod_base = OTHER; note = 2'-O-methyladenosine-3'-phosphate
tcagtttctcattagtttgta

SEQ ID NO: 2252 - RNA, 21 nt, synthetic construct
  source 1..21: mol_type = other RNA
  modified_base 1: mod_base = OTHER; note = 2'-O-methylcytidine-3'-phosphorothioate
  modified_base 2: mod_base = OTHER; note = 2'-O-methyluridine-3'-phosphorothioate
  modified_base 3: mod_base = OTHER; note = 2'-O-methylguanosine-3'-phosphate
  modified_base 4: mod_base = OTHER; note = 2'-O-methylcytidine-3'-phosphate
  modified_base 5: mod_base = OTHER; note = 2'-O-methyladenosine-3'-phosphate
  modified_base 6: mod_base = OTHER; note = 2'-O-methyluridine-3'-phosphate
  modified_base 7: mod_base = OTHER; note = 2'-fluoroadenosine-3'-phosphate
  modified_base 8: mod_base = OTHER; note = 2'-O-methyluridine-3'-phosphate
  modified_base 9: mod_base = OTHER; note = 2'-fluoroadenosine-3'-phosphate
  modified_base 10: mod_base = OTHER; note = 2'-fluorouridine-3'-phosphate
  modified_base 11: mod_base = OTHER; note = 2'-fluoroadenosine-3'-phosphate
  modified_base 12: mod_base = OTHER; note = 2'-O-methyladenosine-3'-phosphate
  modified_base 13: mod_base = OTHER; note = 2'-O-methylguanosine-3'-phosphate
  modified_base 14: mod_base = OTHER; note = 2'-O-methyladenosine-3'-phosphate
  modified_base 15: mod_base = OTHER; note = 2'-O-methyladenosine-3'-phosphate
  modified_base 16: mod_base = OTHER; note = 2'-O-methylcytidine-3'-phosphate
  modified_base 17: mod_base = OTHER; note = 2'-O-methylguanosine-3'-phosphate
  modified_base 18: mod_base = OTHER; note = 2'-O-methyladenosine-3'-phosphate
  modified_base 19: mod_base = OTHER; note = 2'-O-methyladenosine-3'-phosphorothioate
  modified_base 20: mod_base = OTHER; note = 2'-O-methyladenosine-3'-phosphorothioate
  modified_base 21: mod_base = OTHER; note = 2'-O-methyladenosine-3'-phosphate
ctgcatatataagaacgaaaa

SEQ ID NO: 2253 - RNA, 21 nt, synthetic construct
  source 1..21: mol_type = other RNA
  modified_base 1: mod_base = OTHER; note = 2'-O-methyluridine-3'-phosphorothioate
  modified_base 2: mod_base = OTHER; note = 2'-O-methylguanosine-3'-phosphorothioate
  modified_base 3: mod_base = OTHER; note = 2'-O-methyladenosine-3'-phosphate
  modified_base 4: mod_base = OTHER; note = 2'-O-methylguanosine-3'-phosphate
  modified_base 5: mod_base = OTHER; note = 2'-O-methylcytidine-3'-phosphate
  modified_base 6: mod_base = OTHER; note = 2'-O-methylcytidine-3'-phosphate
  modified_base 7: mod_base = OTHER; note = 2'-fluoroadenosine-3'-phosphate
  modified_base 8: mod_base = OTHER; note = 2'-O-methyladenosine-3'-phosphate
  modified_base 9: mod_base = OTHER; note = 2'-fluoroadenosine-3'-phosphate
  modified_base 10: mod_base = OTHER; note = 2'-fluoroadenosine-3'-phosphate
  modified_base 11: mod_base = OTHER; note = 2'-fluorouridine-3'-phosphate
  modified_base 12: mod_base = OTHER; note = 2'-O-methyladenosine-3'-phosphate
  modified_base 13: mod_base = OTHER; note = 2'-O-methyluridine-3'-phosphate
  modified_base 14: mod_base = OTHER; note = 2'-O-methyluridine-3'-phosphate
  modified_base 15: mod_base = OTHER; note = 2'-O-methyladenosine-3'-phosphate
  modified_base 16: mod_base = OTHER; note = 2'-O-methyladenosine-3'-phosphate
  modified_base 17: mod_base = OTHER; note = 2'-O-methyladenosine-3'-phosphate
  modified_base 18: mod_base = OTHER; note = 2'-O-methyluridine-3'-phosphate
  modified_base 19: mod_base = OTHER; note = 2'-O-methyluridine-3'-phosphorothioate
  modified_base 20: mod_base = OTHER; note = 2'-O-methylcytidine-3'-phosphorothioate
  modified_base 21: mod_base = OTHER; note = 2'-O-methyladenosine-3'-phosphate
tgagccaaaatattaaattca

SEQ ID NO: 2254 - RNA, 21 nt, synthetic construct
  source 1..21: mol_type = other RNA
  modified_base 1: mod_base = OTHER; note = 2'-O-methyladenosine-3'-phosphorothioate
  modified_base 2: mod_base = OTHER; note = 2'-O-methylguanosine-3'-phosphorothioate
  modified_base 3: mod_base = OTHER; note = 2'-O-methyladenosine-3'-phosphate
  modified_base 4: mod_base = OTHER; note = 2'-O-methyladenosine-3'-phosphate
  modified_base 5: mod_base = OTHER; note = 2'-O-methyluridine-3'-phosphate
  modified_base 6: mod_base = OTHER; note = 2'-O-methylguanosine-3'-phosphate
  modified_base 7: mod_base = OTHER; note = 2'-fluoroadenosine-3'-phosphate
  modified_base 8: mod_base = OTHER; note = 2'-O-methyluridine-3'-phosphate
  modified_base 9: mod_base = OTHER; note = 2'-fluoroadenosine-3'-phosphate
  modified_base 10: mod_base = OTHER; note = 2'-fluorouridine-3'-phosphate
  modified_base 11: mod_base = OTHER; note = 2'-fluorouridine-3'-phosphate
  modified_base 12: mod_base = OTHER; note = 2'-O-methyluridine-3'-phosphate
  modified_base 13: mod_base = OTHER; note = 2'-O-methylcytidine-3'-phosphate
  modified_base 14: mod_base = OTHER; note = 2'-O-methylcytidine-3'-phosphate
  modified_base 15: mod_base = OTHER; note = 2'-O-methyluridine-3'-phosphate
  modified_base 16: mod_base = OTHER; note = 2'-O-methylguanosine-3'-phosphate
  modified_base 17: mod_base = OTHER; note = 2'-O-methyluridine-3'-phosphate
  modified_base 18: mod_base = OTHER; note = 2'-O-methyluridine-3'-phosphate
  modified_base 19: mod_base = OTHER; note = 2'-O-methyluridine-3'-phosphorothioate
  modified_base 20: mod_base = OTHER; note = 2'-O-methyluridine-3'-phosphorothioate
  modified_base 21: mod_base = OTHER; note = 2'-O-methyladenosine-3'-phosphate
agaatgatatttcctgtttta

SEQ ID NO: 2255 - RNA, 21 nt, synthetic construct
  source 1..21: mol_type = other RNA
  modified_base 1: mod_base = OTHER; note = 2'-O-methylguanosine-3'-phosphorothioate
  modified_base 2: mod_base = OTHER; note = 2'-O-methyluridine-3'-phosphorothioate
  modified_base 3: mod_base = OTHER; note = 2'-O-methylguanosine-3'-phosphate
  modified_base 4: mod_base = OTHER; note = 2'-O-methylcytidine-3'-phosphate
  modified_base 5: mod_base = OTHER; note = 2'-O-methyluridine-3'-phosphate
  modified_base 6: mod_base = OTHER; note = 2'-O-methylcytidine-3'-phosphate
  modified_base 7: mod_base = OTHER; note = 2'-fluorouridine-3'-phosphate
  modified_base 8: mod_base = OTHER; note = 2'-O-methyladenosine-3'-phosphate
  modified_base 9: mod_base = OTHER; note = 2'-fluorouridine-3'-phosphate
  modified_base 10: mod_base = OTHER; note = 2'-fluoroadenosine-3'-phosphate
  modified_base 11: mod_base = OTHER; note = 2'-fluorouridine-3'-phosphate
  modified_base 12: mod_base = OTHER; note = 2'-O-methyladenosine-3'-phosphate
  modified_base 13: mod_base = OTHER; note = 2'-O-methyladenosine-3'-phosphate
  modified_base 14: mod_base = OTHER; note = 2'-O-methyladenosine-3'-phosphate
  modified_base 15: mod_base = OTHER; note = 2'-O-methyluridine-3'-phosphate
  modified_base 16: mod_base = OTHER; note = 2'-O-methylcytidine-3'-phosphate
  modified_base 17: mod_base = OTHER; note = 2'-O-methyluridine-3'-phosphate
  modified_base 18: mod_base = OTHER; note = 2'-O-methyluridine-3'-phosphate
  modified_base 19: mod_base = OTHER; note = 2'-O-methylcytidine-3'-phosphorothioate
  modified_base 20: mod_base = OTHER; note = 2'-O-methylcytidine-3'-phosphorothioate
  modified_base 21: mod_base = OTHER; note = 2'-O-methyladenosine-3'-phosphate
gtgctctatataaatcttcca

SEQ ID NO: 2256 - RNA, 21 nt, synthetic construct
  source 1..21: mol_type = other RNA
  modified_base 1: mod_base = OTHER; note = 2'-O-methyluridine-3'-phosphorothioate
  modified_base 2: mod_base = OTHER; note = 2'-O-methyluridine-3'-phosphorothioate
  modified_base 3: mod_base = OTHER; note = 2'-O-methyluridine-3'-phosphate
  modified_base 4: mod_base = OTHER; note = 2'-O-methyladenosine-3'-phosphate
  modified_base 5: mod_base = OTHER; note = 2'-O-methylcytidine-3'-phosphate
  modified_base 6: mod_base = OTHER; note = 2'-O-methyladenosine-3'-phosphate
  modified_base 7: mod_base = OTHER; note = 2'-fluoroguanosine-3'-phosphate
  modified_base 8: mod_base = OTHER; note = 2'-O-methyladenosine-3'-phosphate
  modified_base 9: mod_base = OTHER; note = 2'-fluoroguanosine-3'-phosphate
  modified_base 10: mod_base = OTHER; note = 2'-fluoroadenosine-3'-phosphate
  modified_base 11: mod_base = OTHER; note = 2'-fluoroadenosine-3'-phosphate
  modified_base 12: mod_base = OTHER; note = 2'-O-methylguanosine-3'-phosphate
  modified_base 13: mod_base = OTHER; note = 2'-O-methylcytidine-3'-phosphate
  modified_base 14: mod_base = OTHER; note = 2'-O-methyladenosine-3'-phosphate
  modified_base 15: mod_base = OTHER; note = 2'-O-methyluridine-3'-phosphate
  modified_base 16: mod_base = OTHER; note = 2'-O-methylcytidine-3'-phosphate
  modified_base 17: mod_base = OTHER; note = 2'-O-methyluridine-3'-phosphate
  modified_base 18: mod_base = OTHER; note = 2'-O-methyluridine-3'-phosphate
  modified_base 19: mod_base = OTHER; note = 2'-O-methyladenosine-3'-phosphorothioate
  modified_base 20: mod_base = OTHER; note = 2'-O-methyluridine-3'-phosphorothioate
  modified_base 21: mod_base = OTHER; note = 2'-O-methyladenosine-3'-phosphate
tttacagagaagcatcttata

SEQ ID NO: 2257 - RNA, 21 nt, synthetic construct
  source 1..21: mol_type = other RNA
  modified_base 1: mod_base = OTHER; note = 2'-O-methylguanosine-3'-phosphorothioate
  modified_base 2: mod_base = OTHER; note = 2'-O-methyluridine-3'-phosphorothioate
  modified_base 3: mod_base = OTHER; note = 2'-O-methylcytidine-3'-phosphate
  modified_base 4: mod_base = OTHER; note = 2'-O-methyluridine-3'-phosphate
  modified_base 5: mod_base = OTHER; note = 2'-O-methyluridine-3'-phosphate
  modified_base 6: mod_base = OTHER; note = 2'-O-methylguanosine-3'-phosphate
  modified_base 7: mod_base = OTHER; note = 2'-fluoroadenosine-3'-phosphate
  modified_base 8: mod_base = OTHER; note = 2'-O-methylguanosine-3'-phosphate
  modified_base 9: mod_base = OTHER; note = 2'-fluorouridine-3'-phosphate
  modified_base 10: mod_base = OTHER; note = 2'-fluorouridine-3'-phosphate
  modified_base 11: mod_base = OTHER; note = 2'-fluorocytidine-3'-phosphate
  modified_base 12: mod_base = OTHER; note = 2'-O-methyluridine-3'-phosphate
  modified_base 13: mod_base = OTHER; note = 2'-O-methylguanosine-3'-phosphate
  modified_base 14: mod_base = OTHER; note = 2'-O-methylcytidine-3'-phosphate
  modified_base 15: mod_base = OTHER; note = 2'-O-methyladenosine-3'-phosphate
  modified_base 16: mod_base = OTHER; note = 2'-O-methyluridine-3'-phosphate
  modified_base 17: mod_base = OTHER; note = 2'-O-methylguanosine-3'-phosphate
  modified_base 18: mod_base = OTHER; note = 2'-O-methyladenosine-3'-phosphate
  modified_base 19: mod_base = OTHER; note = 2'-O-methylcytidine-3'-phosphorothioate
  modified_base 20: mod_base = OTHER; note = 2'-O-methyladenosine-3'-phosphorothioate
  modified_base 21: mod_base = OTHER; note = 2'-O-methyladenosine-3'-phosphate
gtcttgagttctgcatgacaa

SEQ ID NO: 2258 - RNA, 21 nt, synthetic construct
  source 1..21: mol_type = other RNA
  modified_base 1: mod_base = OTHER; note = 2'-O-methylcytidine-3'-phosphorothioate
  modified_base 2: mod_base = OTHER; note = 2'-O-methyluridine-3'-phosphorothioate
  modified_base 3: mod_base = OTHER; note = 2'-O-methyluridine-3'-phosphate
  modified_base 4: mod_base = OTHER; note = 2'-O-methylcytidine-3'-phosphate
  modified_base 5: mod_base = OTHER; note = 2'-O-methyladenosine-3'-phosphate
  modified_base 6: mod_base = OTHER; note = 2'-O-methyladenosine-3'-phosphate
  modified_base 7: mod_base = OTHER; note = 2'-fluoroadenosine-3'-phosphate
  modified_base 8: mod_base = OTHER; note = 2'-O-methyluridine-3'-phosphate
  modified_base 9: mod_base = OTHER; note = 2'-fluorocytidine-3'-phosphate
  modified_base 10: mod_base = OTHER; note = 2'-fluorouridine-3'-phosphate
  modified_base 11: mod_base = OTHER; note = 2'-fluoroadenosine-3'-phosphate
  modified_base 12: mod_base = OTHER; note = 2'-O-methyluridine-3'-phosphate
  modified_base 13: mod_base = OTHER; note = 2'-O-methyladenosine-3'-phosphate
  modified_base 14: mod_base = OTHER; note = 2'-O-methyladenosine-3'-phosphate
  modified_base 15: mod_base = OTHER; note = 2'-O-methyluridine-3'-phosphate
  modified_base 16: mod_base = OTHER; note = 2'-O-methyluridine-3'-phosphate
  modified_base 17: mod_base = OTHER; note = 2'-O-methyluridine-3'-phosphate
  modified_base 18: mod_base = OTHER; note = 2'-O-methyluridine-3'-phosphate
  modified_base 19: mod_base = OTHER; note = 2'-O-methyladenosine-3'-phosphorothioate
  modified_base 20: mod_base = OTHER; note = 2'-O-methylcytidine-3'-phosphorothioate
  modified_base 21: mod_base = OTHER; note = 2'-O-methyladenosine-3'-phosphate
cttcaaatctataattttaca

SEQ ID NO: 2259 - RNA, 21 nt, synthetic construct
  source 1..21: mol_type = other RNA
  modified_base 1: mod_base = OTHER; note = 2'-O-methylguanosine-3'-phosphorothioate
  modified_base 2: mod_base = OTHER; note = 2'-O-methyladenosine-3'-phosphorothioate
  modified_base 3: mod_base = OTHER; note = 2'-O-methyladenosine-3'-phosphate
  modified_base 4: mod_base = OTHER; note = 2'-O-methylguanosine-3'-phosphate
  modified_base 5: mod_base = OTHER; note = 2'-O-methylcytidine-3'-phosphate
  modified_base 6: mod_base = OTHER; note = 2'-O-methyladenosine-3'-phosphate
  modified_base 7: mod_base = OTHER; note = 2'-fluorouridine-3'-phosphate
  modified_base 8: mod_base = OTHER; note = 2'-O-methyladenosine-3'-phosphate
  modified_base 9: mod_base = OTHER; note = 2'-fluorouridine-3'-phosphate
  modified_base 10: mod_base = OTHER; note = 2'-fluoroadenosine-3'-phosphate
  modified_base 11: mod_base = OTHER; note = 2'-fluoroguanosine-3'-phosphate
  modified_base 12: mod_base = OTHER; note = 2'-O-methyladenosine-3'-phosphate
  modified_base 13: mod_base = OTHER; note = 2'-O-methyladenosine-3'-phosphate
  modified_base 14: mod_base = OTHER; note = 2'-O-methylcytidine-3'-phosphate
  modified_base 15: mod_base = OTHER; note = 2'-O-methyluridine-3'-phosphate
  modified_base 16: mod_base = OTHER; note = 2'-O-methylcytidine-3'-phosphate
  modified_base 17: mod_base = OTHER; note = 2'-O-methyluridine-3'-phosphate
  modified_base 18: mod_base = OTHER; note = 2'-O-methyladenosine-3'-phosphate
  modified_base 19: mod_base = OTHER; note = 2'-O-methyluridine-3'-phosphorothioate
  modified_base 20: mod_base = OTHER; note = 2'-O-methyluridine-3'-phosphorothioate
  modified_base 21: mod_base = OTHER; note = 2'-O-methyladenosine-3'-phosphate
gaagcatatagaactctatta

SEQ ID NO: 2260 - RNA, 21 nt, synthetic construct
  source 1..21: mol_type = other RNA
  modified_base 1: mod_base = OTHER; note = 2'-O-methylguanosine-3'-phosphorothioate
  modified_base 2: mod_base = OTHER; note = 2'-O-methyladenosine-3'-phosphorothioate
  modified_base 3: mod_base = OTHER; note = 2'-O-methylguanosine-3'-phosphate
  modified_base 4: mod_base = OTHER; note = 2'-O-methylcytidine-3'-phosphate
  modified_base 5: mod_base = OTHER; note = 2'-O-methyluridine-3'-phosphate
  modified_base 6: mod_base = OTHER; note = 2'-O-methylguanosine-3'-phosphate
  modified_base 7: mod_base = OTHER; note = 2'-fluorocytidine-3'-phosphate
  modified_base 8: mod_base = OTHER; note = 2'-O-methyluridine-3'-phosphate
  modified_base 9: mod_base = OTHER; note = 2'-fluorouridine-3'-phosphate
  modified_base 10: mod_base = OTHER; note = 2'-fluorocytidine-3'-phosphate
  modified_base 11: mod_base = OTHER; note = 2'-fluorouridine-3'-phosphate
  modified_base 12: mod_base = OTHER; note = 2'-O-methyladenosine-3'-phosphate
  modified_base 13: mod_base = OTHER; note = 2'-O-methyladenosine-3'-phosphate
  modified_base 14: mod_base = OTHER; note = 2'-O-methyladenosine-3'-phosphate
  modified_base 15: mod_base = OTHER; note = 2'-O-methyluridine-3'-phosphate
  modified_base 16: mod_base = OTHER; note = 2'-O-methyladenosine-3'-phosphate
  modified_base 17: mod_base = OTHER; note = 2'-O-methyladenosine-3'-phosphate
  modified_base 18: mod_base = OTHER; note = 2'-O-methylcytidine-3'-phosphate
  modified_base 19: mod_base = OTHER; note = 2'-O-methyladenosine-3'-phosphorothioate
  modified_base 20: mod_base = OTHER; note = 2'-O-methyladenosine-3'-phosphorothioate
  modified_base 21: mod_base = OTHER; note = 2'-O-methyladenosine-3'-phosphate
gagctgcttctaaataacaaa

SEQ ID NO: 2261 - RNA, 21 nt, synthetic construct
  source 1..21: mol_type = other RNA
  modified_base 1: mod_base = OTHER; note = 2'-O-methyluridine-3'-phosphorothioate
  modified_base 2: mod_base = OTHER; note = 2'-O-methylguanosine-3'-phosphorothioate
  modified_base 3: mod_base = OTHER; note = 2'-O-methyladenosine-3'-phosphate
  modified_base 4: mod_base = OTHER; note = 2'-O-methylcytidine-3'-phosphate
  modified_base 5: mod_base = OTHER; note = 2'-O-methyluridine-3'-phosphate
  modified_base 6: mod_base = OTHER; note = 2'-O-methylguanosine-3'-phosphate
  modified_base 7: mod_base = OTHER; note = 2'-fluorouridine-3'-phosphate
  modified_base 8: mod_base = OTHER; note = 2'-O-methyladenosine-3'-phosphate
  modified_base 9: mod_base = OTHER; note = 2'-fluorouridine-3'-phosphate
  modified_base 10: mod_base = OTHER; note = 2'-fluorouridine-3'-phosphate
  modified_base 11: mod_base = OTHER; note = 2'-fluorouridine-3'-phosphate
  modified_base 12: mod_base = OTHER; note = 2'-O-methylcytidine-3'-phosphate
  modified_base 13: mod_base = OTHER; note = 2'-O-methylcytidine-3'-phosphate
  modified_base 14: mod_base = OTHER; note = 2'-O-methyluridine-3'-phosphate
  modified_base 15: mod_base = OTHER; note = 2'-O-methylguanosine-3'-phosphate
  modified_base 16: mod_base = OTHER; note = 2'-O-methyladenosine-3'-phosphate
  modified_base 17: mod_base = OTHER; note = 2'-O-methyluridine-3'-phosphate
  modified_base 18: mod_base = OTHER; note = 2'-O-methylcytidine-3'-phosphate
  modified_base 19: mod_base = OTHER; note = 2'-O-methyladenosine-3'-phosphorothioate
  modified_base 20: mod_base = OTHER; note = 2'-O-methyluridine-3'-phosphorothioate
  modified_base 21: mod_base = OTHER; note = 2'-O-methyladenosine-3'-phosphate
tgactgtatttcctgatcata

SEQ ID NO: 2262 - RNA, 21 nt, synthetic construct
  source 1..21: mol_type = other RNA
  modified_base 1: mod_base = OTHER; note = 2'-O-methylguanosine-3'-phosphorothioate
  modified_base 2: mod_base = OTHER; note = 2'-O-methyluridine-3'-phosphorothioate
  modified_base 3: mod_base = OTHER; note = 2'-O-methyluridine-3'-phosphate
  modified_base 4: mod_base = OTHER; note = 2'-O-methylcytidine-3'-phosphate
  modified_base 5: mod_base = OTHER; note = 2'-O-methyluridine-3'-phosphate
  modified_base 6: mod_base = OTHER; note = 2'-O-methylguanosine-3'-phosphate
  modified_base 7: mod_base = OTHER; note = 2'-fluoroadenosine-3'-phosphate
  modified_base 8: mod_base = OTHER; note = 2'-O-methyladenosine-3'-phosphate
  modified_base 9: mod_base = OTHER; note = 2'-fluoroguanosine-3'-phosphate
  modified_base 10: mod_base = OTHER; note = 2'-fluoroguanosine-3'-phosphate
  modified_base 11: mod_base = OTHER; note = 2'-fluoroadenosine-3'-phosphate
  modified_base 12: mod_base = OTHER; note = 2'-O-methyluridine-3'-phosphate
  modified_base 13: mod_base = OTHER; note = 2'-O-methyladenosine-3'-phosphate
  modified_base 14: mod_base = OTHER; note = 2'-O-methyluridine-3'-phosphate
  modified_base 15: mod_base = OTHER; note = 2'-O-methyladenosine-3'-phosphate
  modified_base 16: mod_base = OTHER; note = 2'-O-methylcytidine-3'-phosphate
  modified_base 17: mod_base = OTHER; note = 2'-O-methyluridine-3'-phosphate
  modified_base 18: mod_base = OTHER; note = 2'-O-methyluridine-3'-phosphate
  modified_base 19: mod_base = OTHER; note = 2'-O-methylcytidine-3'-phosphorothioate
  modified_base 20: mod_base = OTHER; note = 2'-O-methyluridine-3'-phosphorothioate
  modified_base 21: mod_base = OTHER; note = 2'-O-methyladenosine-3'-phosphate
gttctgaaggatatacttcta

SEQ ID NO: 2263 - RNA, 21 nt, synthetic construct
  source 1..21: mol_type = other RNA
  modified_base 1: mod_base = OTHER; note = 2'-O-methylguanosine-3'-phosphorothioate
  modified_base 2: mod_base = OTHER; note = 2'-O-methyluridine-3'-phosphorothioate
  modified_base 3: mod_base = OTHER; note = 2'-O-methylguanosine-3'-phosphate
  modified_base 4: mod_base = OTHER; note = 2'-O-methyladenosine-3'-phosphate
  modified_base 5: mod_base = OTHER; note = 2'-O-methyladenosine-3'-phosphate
  modified_base 6: mod_base = OTHER; note = 2'-O-methylguanosine-3'-phosphate
  modified_base 7: mod_base = OTHER; note = 2'-fluorocytidine-3'-phosphate
  modified_base 8: mod_base = OTHER; note = 2'-O-methyladenosine-3'-phosphate
  modified_base 9: mod_base = OTHER; note = 2'-fluorouridine-3'-phosphate
  modified_base 10: mod_base = OTHER; note = 2'-fluoroguanosine-3'-phosphate
  modified_base 11: mod_base = OTHER; note = 2'-fluoroadenosine-3'-phosphate
  modified_base 12: mod_base = OTHER; note = 2'-O-methyluridine-3'-phosphate
  modified_base 13: mod_base = OTHER; note = 2'-O-methyluridine-3'-phosphate
  modified_base 14: mod_base = OTHER; note = 2'-O-methylcytidine-3'-phosphate
  modified_base 15: mod_base = OTHER; note = 2'-O-methyladenosine-3'-phosphate
  modified_base 16: mod_base = OTHER; note = 2'-O-methyladenosine-3'-phosphate
  modified_base 17: mod_base = OTHER; note = 2'-O-methyluridine-3'-phosphate
  modified_base 18: mod_base = OTHER; note = 2'-O-methyladenosine-3'-phosphate
  modified_base 19: mod_base = OTHER; note = 2'-O-methylcytidine-3'-phosphorothioate
  modified_base 20: mod_base = OTHER; note = 2'-O-methyluridine-3'-phosphorothioate
  modified_base 21: mod_base = OTHER; note = 2'-O-methyladenosine-3'-phosphate
gtgaagcatgattcaatacta

SEQ ID NO: 2264 - RNA, 21 nt, synthetic construct
  source 1..21: mol_type = other RNA
  modified_base 1: mod_base = OTHER; note = 2'-O-methyladenosine-3'-phosphorothioate
  modified_base 2: mod_base = OTHER; note = 2'-O-methyladenosine-3'-phosphorothioate
  modified_base 3: mod_base = OTHER; note = 2'-O-methyluridine-3'-phosphate
  modified_base 4: mod_base = OTHER; note = 2'-O-methylguanosine-3'-phosphate
  modified_base 5: mod_base = OTHER; note = 2'-O-methylcytidine-3'-phosphate
  modified_base 6: mod_base = OTHER; note = 2'-O-methyluridine-3'-phosphate
  modified_base 7: mod_base = OTHER; note = 2'-fluoroguanosine-3'-phosphate
  modified_base 8: mod_base = OTHER; note = 2'-O-methylcytidine-3'-phosphate
  modified_base 9: mod_base = OTHER; note = 2'-fluorouridine-3'-phosphate
  modified_base 10: mod_base = OTHER; note = 2'-fluorouridine-3'-phosphate
  modified_base 11: mod_base = OTHER; note = 2'-fluorocytidine-3'-phosphate
  modified_base 12: mod_base = OTHER; note = 2'-O-methyladenosine-3'-phosphate
  modified_base 13: mod_base = OTHER; note = 2'-O-methylcytidine-3'-phosphate
  modified_base 14: mod_base = OTHER; note = 2'-O-methyladenosine-3'-phosphate
  modified_base 15: mod_base = OTHER; note = 2'-O-methylguanosine-3'-phosphate
  modified_base 16: mod_base = OTHER; note = 2'-O-methyladenosine-3'-phosphate
  modified_base 17: mod_base = OTHER; note = 2'-O-methyluridine-3'-phosphate
  modified_base 18: mod_base = OTHER; note = 2'-O-methyluridine-3'-phosphate
  modified_base 19: mod_base = OTHER; note = 2'-O-methyluridine-3'-phosphorothioate
  modified_base 20: mod_base = OTHER; note = 2'-O-methyluridine-3'-phosphorothioate
  modified_base 21: mod_base = OTHER; note = 2'-O-methyladenosine-3'-phosphate
aatgctgcttcacagatttta

SEQ ID NO: 2265 - RNA, 21 nt, synthetic construct
  source 1..21: mol_type = other RNA
  modified_base 1: mod_base = OTHER; note = 2'-O-methyluridine-3'-phosphorothioate
  modified_base 2: mod_base = OTHER; note = 2'-O-methylguanosine-3'-phosphorothioate
  modified_base 3: mod_base = OTHER; note = 2'-O-methyluridine-3'-phosphate
  modified_base 4: mod_base = OTHER; note = 2'-O-methylguanosine-3'-phosphate
  modified_base 5: mod_base = OTHER; note = 2'-O-methylguanosine-3'-phosphate
  modified_base 6: mod_base = OTHER; note = 2'-O-methylguanosine-3'-phosphate
  modified_base 7: mod_base = OTHER; note = 2'-fluorouridine-3'-phosphate
  modified_base 8: mod_base = OTHER; note = 2'-O-methyluridine-3'-phosphate
  modified_base 9: mod_base = OTHER; note = 2'-fluoroadenosine-3'-phosphate
  modified_base 10: mod_base = OTHER; note = 2'-fluorouridine-3'-phosphate
  modified_base 11: mod_base = OTHER; note = 2'-fluoroguanosine-3'-phosphate
  modified_base 12: mod_base = OTHER; note = 2'-O-methyluridine-3'-phosphate
  modified_base 13: mod_base = OTHER; note = 2'-O-methyluridine-3'-phosphate
  modified_base 14: mod_base = OTHER; note = 2'-O-methyladenosine-3'-phosphate
  modified_base 15: mod_base = OTHER; note = 2'-O-methyladenosine-3'-phosphate
  modified_base 16: mod_base = OTHER; note = 2'-O-methyluridine-3'-phosphate
  modified_base 17: mod_base = OTHER; note = 2'-O-methylcytidine-3'-phosphate
  modified_base 18: mod_base = OTHER; note = 2'-O-methyluridine-3'-phosphate
  modified_base 19: mod_base = OTHER; note = 2'-O-methylguanosine-3'-phosphorothioate
  modified_base 20: mod_base = OTHER; note = 2'-O-methyladenosine-3'-phosphorothioate
  modified_base 21: mod_base = OTHER; note = 2'-O-methyladenosine-3'-phosphate
tgtgggttatgttaatctgaa

SEQ ID NO: 2266 - RNA, 21 nt, synthetic construct
  source 1..21: mol_type = other RNA
  modified_base 1: mod_base = OTHER; note = 2'-O-methylguanosine-3'-phosphorothioate
  modified_base 2: mod_base = OTHER; note = 2'-O-methyladenosine-3'-phosphorothioate
  modified_base 3: mod_base = OTHER; note = 2'-O-methylguanosine-3'-phosphate
  modified_base 4: mod_base = OTHER; note = 2'-O-methyluridine-3'-phosphate
  modified_base 5: mod_base = OTHER; note = 2'-O-methyladenosine-3'-phosphate
  modified_base 6: mod_base = OTHER; note = 2'-O-methylcytidine-3'-phosphate
  modified_base 7: mod_base = OTHER; note = 2'-fluoroadenosine-3'-phosphate
  modified_base 8: mod_base = OTHER; note = 2'-O-methylguanosine-3'-phosphate
  modified_base 9: mod_base = OTHER; note = 2'-fluoroadenosine-3'-phosphate
  modified_base 10: mod_base = OTHER; note = 2'-fluoroadenosine-3'-phosphate
  modified_base 11: mod_base = OTHER; note = 2'-fluoroguanosine-3'-phosphate
  modified_base 12: mod_base = OTHER; note = 2'-O-methyladenosine-3'-phosphate
  modified_base 13: mod_base = OTHER; note = 2'-O-methyladenosine-3'-phosphate
  modified_base 14: mod_base = OTHER; note = 2'-O-methyluridine-3'-phosphate
  modified_base 15: mod_base = OTHER; note = 2'-O-methylguanosine-3'-phosphate
  modified_base 16: mod_base = OTHER; note = 2'-O-methylcytidine-3'-phosphate
  modified_base 17: mod_base = OTHER; note = 2'-O-methyluridine-3'-phosphate
  modified_base 18: mod_base = OTHER; note = 2'-O-methylcytidine-3'-phosphate
  modified_base 19: mod_base = OTHER; note = 2'-O-methyladenosine-3'-phosphorothioate
  modified_base 20: mod_base = OTHER; note = 2'-O-methyluridine-3'-phosphorothioate
  modified_base 21: mod_base = OTHER; note = 2'-O-methyladenosine-3'-phosphate
gagtacagaagaatgctcata

SEQ ID NO: 2267 - RNA, 21 nt, synthetic construct
  source 1..21: mol_type = other RNA
  modified_base 1: mod_base = OTHER; note = 2'-O-methylcytidine-3'-phosphorothioate
  modified_base 2: mod_base = OTHER; note = 2'-O-methyluridine-3'-phosphorothioate
  modified_base 3: mod_base = OTHER; note = 2'-O-methylguanosine-3'-phosphate
  modified_base 4: mod_base = OTHER; note = 2'-O-methyluridine-3'-phosphate
  modified_base 5: mod_base = OTHER; note = 2'-O-methyladenosine-3'-phosphate
  modified_base 6: mod_base = OTHER; note = 2'-O-methyluridine-3'-phosphate
  modified_base 7: mod_base = OTHER; note = 2'-fluorouridine-3'-phosphate
  modified_base 8: mod_base = OTHER; note = 2'-O-methyluridine-3'-phosphate
  modified_base 9: mod_base = OTHER; note = 2'-fluorocytidine-3'-phosphate
  modified_base 10: mod_base = OTHER; note = 2'-fluoroadenosine-3'-phosphate
  modified_base 11: mod_base = OTHER; note = 2'-fluorouridine-3'-phosphate
  modified_base 12: mod_base = OTHER; note = 2'-O-methylcytidine-3'-phosphate
  modified_base 13: mod_base = OTHER; note = 2'-O-methylcytidine-3'-phosphate
  modified_base 14: mod_base = OTHER; note = 2'-O-methyluridine-3'-phosphate
  modified_base 15: mod_base = OTHER; note = 2'-O-methyladenosine-3'-phosphate
  modified_base 16: mod_base = OTHER; note = 2'-O-methylguanosine-3'-phosphate
  modified_base 17: mod_base = OTHER; note = 2'-O-methyladenosine-3'-phosphate
  modified_base 18: mod_base = OTHER; note = 2'-O-methyluridine-3'-phosphate
  modified_base 19: mod_base = OTHER; note = 2'-O-methyluridine-3'-phosphorothioate
  modified_base 20: mod_base = OTHER; note = 2'-O-methyluridine-3'-phosphorothioate
  modified_base 21: mod_base = OTHER; note = 2'-O-methyladenosine-3'-phosphate
ctgtatttcatcctagattta

SEQ ID NO: 2268 - RNA, 21 nt, synthetic construct
  source 1..21: mol_type = other RNA
  modified_base 1: mod_base = OTHER; note = 2'-O-methyladenosine-3'-phosphorothioate
  modified_base 2: mod_base = OTHER; note = 2'-O-methyladenosine-3'-phosphorothioate
  modified_base 3: mod_base = OTHER; note = 2'-O-methyluridine-3'-phosphate
  modified_base 4: mod_base = OTHER; note = 2'-O-methylcytidine-3'-phosphate
  modified_base 5: mod_base = OTHER; note = 2'-O-methyluridine-3'-phosphate
  modified_base 6: mod_base = OTHER; note = 2'-O-methylguanosine-3'-phosphate
  modified_base 7: mod_base = OTHER; note = 2'-fluoroguanosine-3'-phosphate
  modified_base 8: mod_base = OTHER; note = 2'-O-methyluridine-3'-phosphate
  modified_base 9: mod_base = OTHER; note = 2'-fluoroadenosine-3'-phosphate
  modified_base 10: mod_base = OTHER; note = 2'-fluoroadenosine-3'-phosphate
  modified_base 11: mod_base = OTHER; note = 2'-fluoroadenosine-3'-phosphate
  modified_base 12: mod_base = OTHER; note = 2'-O-methyluridine-3'-phosphate
  modified_base 13: mod_base = OTHER; note = 2'-O-methylguanosine-3'-phosphate
  modified_base 14: mod_base = OTHER; note = 2'-O-methylcytidine-3'-phosphate
  modified_base 15: mod_base = OTHER; note = 2'-O-methyluridine-3'-phosphate
  modified_base 16: mod_base = OTHER; note = 2'-O-methylguanosine-3'-phosphate
  modified_base 17: mod_base = OTHER; note = 2'-O-methylguanosine-3'-phosphate
  modified_base 18: mod_base = OTHER; note = 2'-O-methyladenosine-3'-phosphate
  modified_base 19: mod_base = OTHER; note = 2'-O-methyladenosine-3'-phosphorothioate
  modified_base 20: mod_base = OTHER; note = 2'-O-methyladenosine-3'-phosphorothioate
  modified_base 21: mod_base = OTHER; note = 2'-O-methyladenosine-3'-phosphate
aatctggtaaatgctggaaaa

SEQ ID NO: 2269 - RNA, 21 nt, synthetic construct
  source 1..21: mol_type = other RNA
  modified_base 1: mod_base = OTHER; note = 2'-O-methyluridine-3'-phosphorothioate
  modified_base 2: mod_base = OTHER; note = 2'-O-methylguanosine-3'-phosphorothioate
  modified_base 3: mod_base = OTHER; note = 2'-O-methylcytidine-3'-phosphate
  modified_base 4: mod_base = OTHER; note = 2'-O-methyluridine-3'-phosphate
  modified_base 5: mod_base = OTHER; note = 2'-O-methylcytidine-3'-phosphate
  modified_base 6: mod_base = OTHER; note = 2'-O-methyladenosine-3'-phosphate
  modified_base 7: mod_base = OTHER; note = 2'-fluoroguanosine-3'-phosphate
  modified_base 8: mod_base = OTHER; note = 2'-O-methyladenosine-3'-phosphate
  modified_base 9: mod_base = OTHER; note = 2'-fluorouridine-3'-phosphate
  modified_base 10: mod_base = OTHER; note = 2'-fluorouridine-3'-phosphate
  modified_base 11: mod_base = OTHER; note = 2'-fluoroadenosine-3'-phosphate
  modified_base 12: mod_base = OTHER; note = 2'-O-methylcytidine-3'-phosphate
  modified_base 13: mod_base = OTHER; note = 2'-O-methylcytidine-3'-phosphate
  modified_base 14: mod_base = OTHER; note = 2'-O-methyluridine-3'-phosphate
  modified_base 15: mod_base = OTHER; note = 2'-O-methylguanosine-3'-phosphate
  modified_base 16: mod_base = OTHER; note = 2'-O-methyladenosine-3'-phosphate
  modified_base 17: mod_base = OTHER; note = 2'-O-methyluridine-3'-phosphate
  modified_base 18: mod_base = OTHER; note = 2'-O-methylcytidine-3'-phosphate
  modified_base 19: mod_base = OTHER; note = 2'-O-methylguanosine-3'-phosphorothioate
  modified_base 20: mod_base = OTHER; note = 2'-O-methyluridine-3'-phosphorothioate
  modified_base 21: mod_base = OTHER; note = 2'-O-methyladenosine-3'-phosphate
tgctcagattacctgatcgta

SEQ ID NO: 2270 - RNA, 21 nt, synthetic construct
  source 1..21: mol_type = other RNA
  modified_base 1: mod_base = OTHER; note = 2'-O-methylguanosine-3'-phosphorothioate
  modified_base 2: mod_base = OTHER; note = 2'-O-methyladenosine-3'-phosphorothioate
  modified_base 3: mod_base = OTHER; note = 2'-O-methylcytidine-3'-phosphate
  modified_base 4: mod_base = OTHER; note = 2'-O-methyladenosine-3'-phosphate
  modified_base 5: mod_base = OTHER; note = 2'-O-methylguanosine-3'-phosphate
  modified_base 6: mod_base = OTHER; note = 2'-O-methylcytidine-3'-phosphate
  modified_base 7: mod_base = OTHER; note = 2'-fluorouridine-3'-phosphate
  modified_base 8: mod_base = OTHER; note = 2'-O-methyladenosine-3'-phosphate
  modified_base 9: mod_base = OTHER; note = 2'-fluorouridine-3'-phosphate
  modified_base 10: mod_base = OTHER; note = 2'-fluoroguanosine-3'-phosphate
  modified_base 11: mod_base = OTHER; note = 2'-fluoroguanosine-3'-phosphate
  modified_base 12: mod_base = OTHER; note = 2'-O-methyladenosine-3'-phosphate
  modified_base 13: mod_base = OTHER; note = 2'-O-methylguanosine-3'-phosphate
  modified_base 14: mod_base = OTHER; note = 2'-O-methyluridine-3'-phosphate
  modified_base 15: mod_base = OTHER; note = 2'-O-methyluridine-3'-phosphate
  modified_base 16: mod_base = OTHER; note = 2'-O-methyluridine-3'-phosphate
  modified_base 17: mod_base = OTHER; note = 2'-O-methylguanosine-3'-phosphate
  modified_base 18: mod_base = OTHER; note = 2'-O-methylcytidine-3'-phosphate
  modified_base 19: mod_base = OTHER; note = 2'-O-methylguanosine-3'-phosphorothioate
  modified_base 20: mod_base = OTHER; note = 2'-O-methyluridine-3'-phosphorothioate
  modified_base 21: mod_base = OTHER; note = 2'-O-methyladenosine-3'-phosphate
gacagctatggagtttgcgta

SEQ ID NO: 2271 - RNA, 21 nt, synthetic construct
  source 1..21: mol_type = other RNA
  modified_base 1: mod_base = OTHER; note = 2'-O-methyluridine-3'-phosphorothioate
  modified_base 2: mod_base = OTHER; note = 2'-O-methyladenosine-3'-phosphorothioate
  modified_base 3: mod_base = OTHER; note = 2'-O-methylguanosine-3'-phosphate
  modified_base 4: mod_base = OTHER; note = 2'-O-methyladenosine-3'-phosphate
  modified_base 5: mod_base = OTHER; note = 2'-O-methyladenosine-3'-phosphate
  modified_base 6: mod_base = OTHER; note = 2'-O-methylcytidine-3'-phosphate
  modified_base 7: mod_base = OTHER; note = 2'-fluoroadenosine-3'-phosphate
  modified_base 8: mod_base = OTHER; note = 2'-O-methyluridine-3'-phosphate
  modified_base 9: mod_base = OTHER; note = 2'-fluoroguanosine-3'-phosphate
  modified_base 10: mod_base = OTHER; note = 2'-fluorocytidine-3'-phosphate
  modified_base 11: mod_base = OTHER; note = 2'-fluorouridine-3'-phosphate
  modified_base 12: mod_base = OTHER; note = 2'-O-methylcytidine-3'-phosphate
  modified_base 13: mod_base = OTHER; note = 2'-O-methyladenosine-3'-phosphate
  modified_base 14: mod_base = OTHER; note = 2'-O-methylcytidine-3'-phosphate
  modified_base 15: mod_base = OTHER; note = 2'-O-methyluridine-3'-phosphate
  modified_base 16: mod_base = OTHER; note = 2'-O-methyluridine-3'-phosphate
  modified_base 17: mod_base = OTHER; note = 2'-O-methyladenosine-3'-phosphate
  modified_base 18: mod_base = OTHER; note = 2'-O-methylcytidine-3'-phosphate
  modified_base 19: mod_base = OTHER; note = 2'-O-methyladenosine-3'-phosphorothioate
  modified_base 20: mod_base = OTHER; note = 2'-O-methyladenosine-3'-phosphorothioate
  modified_base 21: mod_base = OTHER; note = 2'-O-methyladenosine-3'-phosphate
tagaacatgctcacttacaaa

SEQ ID NO: 2272 - RNA, 21 nt, synthetic construct
  source 1..21: mol_type = other RNA
  modified_base 1: mod_base = OTHER; note = 2'-O-methyladenosine-3'-phosphorothioate
  modified_base 2: mod_base = OTHER; note = 2'-O-methyluridine-3'-phosphorothioate
  modified_base 3: mod_base = OTHER; note = 2'-O-methyluridine-3'-phosphate
  modified_base 4: mod_base = OTHER; note = 2'-O-methyladenosine-3'-phosphate
  modified_base 5: mod_base = OTHER; note = 2'-O-methyluridine-3'-phosphate
  modified_base 6: mod_base = OTHER; note = 2'-O-methylguanosine-3'-phosphate
  modified_base 7: mod_base = OTHER; note = 2'-fluorocytidine-3'-phosphate
  modified_base 8: mod_base = OTHER; note = 2'-O-methyluridine-3'-phosphate
  modified_base 9: mod_base = OTHER; note = 2'-fluorouridine-3'-phosphate
  modified_base 10: mod_base = OTHER; note = 2'-fluorocytidine-3'-phosphate
  modified_base 11: mod_base = OTHER; note = 2'-fluoroadenosine-3'-phosphate
  modified_base 12: mod_base = OTHER; note = 2'-O-methyluridine-3'-phosphate
  modified_base 13: mod_base = OTHER; note = 2'-O-methyluridine-3'-phosphate
  modified_base 14: mod_base = OTHER; note = 2'-O-methyluridine-3'-phosphate
  modified_base 15: mod_base = OTHER; note = 2'-O-methylcytidine-3'-phosphate
  modified_base 16: mod_base = OTHER; note = 2'-O-methyladenosine-3'-phosphate
  modified_base 17: mod_base = OTHER; note = 2'-O-methylcytidine-3'-phosphate
  modified_base 18: mod_base = OTHER; note = 2'-O-methyluridine-3'-phosphate
  modified_base 19: mod_base = OTHER; note = 2'-O-methyladenosine-3'-phosphorothioate
  modified_base 20: mod_base = OTHER; note = 2'-O-methyluridine-3'-phosphorothioate
  modified_base 21: mod_base = OTHER; note = 2'-O-methyladenosine-3'-phosphate
attatgcttcatttcactata

SEQ ID NO: 2273 - RNA, 21 nt, synthetic construct
  source 1..21: mol_type = other RNA
  modified_base 1: mod_base = OTHER; note = 2'-O-methylcytidine-3'-phosphorothioate
  modified_base 2: mod_base = OTHER; note = 2'-O-methyladenosine-3'-phosphorothioate
  modified_base 3: mod_base = OTHER; note = 2'-O-methyladenosine-3'-phosphate
  modified_base 4: mod_base = OTHER; note = 2'-O-methylcytidine-3'-phosphate
  modified_base 5: mod_base = OTHER; note = 2'-O-methyladenosine-3'-phosphate
  modified_base 6: mod_base = OTHER; note = 2'-O-methylguanosine-3'-phosphate
  modified_base 7: mod_base = OTHER; note = 2'-fluorocytidine-3'-phosphate
  modified_base 8: mod_base = OTHER; note = 2'-O-methyladenosine-3'-phosphate
  modified_base 9: mod_base = OTHER; note = 2'-fluoroadenosine-3'-phosphate
  modified_base 10: mod_base = OTHER; note = 2'-fluoroguanosine-3'-phosphate
  modified_base 11: mod_base = OTHER; note = 2'-fluorouridine-3'-phosphate
  modified_base 12: mod_base = OTHER; note = 2'-O-methylcytidine-3'-phosphate
  modified_base 13: mod_base = OTHER; note = 2'-O-methyladenosine-3'-phosphate
  modified_base 14: mod_base = OTHER; note = 2'-O-methyluridine-3'-phosphate
  modified_base 15: mod_base = OTHER; note = 2'-O-methyladenosine-3'-phosphate
  modified_base 16: mod_base = OTHER; note = 2'-O-methyladenosine-3'-phosphate
  modified_base 17: mod_base = OTHER; note = 2'-O-methyladenosine-3'-phosphate
  modified_base 18: mod_base = OTHER; note = 2'-O-methyladenosine-3'-phosphate
  modified_base 19: mod_base = OTHER; note = 2'-O-methylguanosine-3'-phosphorothioate
  modified_base 20: mod_base = OTHER; note = 2'-O-methyluridine-3'-phosphorothioate
  modified_base 21: mod_base = OTHER; note = 2'-O-methyladenosine-3'-phosphate
caacagcaagtcataaaagta

SEQ ID NO: 2274 - RNA, 21 nt, synthetic construct
  source 1..21: mol_type = other RNA
  modified_base 1: mod_base = OTHER; note = 2'-O-methyluridine-3'-phosphorothioate
  modified_base 2: mod_base = OTHER; note = 2'-O-methyluridine-3'-phosphorothioate
  modified_base 3: mod_base = OTHER; note = 2'-O-methylguanosine-3'-phosphate
  modified_base 4: mod_base = OTHER; note = 2'-O-methyluridine-3'-phosphate
  modified_base 5: mod_base = OTHER; note = 2'-O-methylcytidine-3'-phosphate
  modified_base 6: mod_base = OTHER; note = 2'-O-methyluridine-3'-phosphate
  modified_base 7: mod_base = OTHER; note = 2'-fluoroguanosine-3'-phosphate
  modified_base 8: mod_base = OTHER; note = 2'-O-methyladenosine-3'-phosphate
  modified_base 9: mod_base = OTHER; note = 2'-fluoroadenosine-3'-phosphate
  modified_base 10: mod_base = OTHER; note = 2'-fluoroadenosine-3'-phosphate
  modified_base 11: mod_base = OTHER; note = 2'-fluoroadenosine-3'-phosphate
  modified_base 12: mod_base = OTHER; note = 2'-O-methyluridine-3'-phosphate
  modified_base 13: mod_base = OTHER; note = 2'-O-methylguanosine-3'-phosphate
  modified_base 14: mod_base = OTHER; note = 2'-O-methyluridine-3'-phosphate
  modified_base 15: mod_base = OTHER; note = 2'-O-methylcytidine-3'-phosphate
  modified_base 16: mod_base = OTHER; note = 2'-O-methyluridine-3'-phosphate
  modified_base 17: mod_base = OTHER; note = 2'-O-methyluridine-3'-phosphate
  modified_base 18: mod_base = OTHER; note = 2'-O-methyluridine-3'-phosphate
  modified_base 19: mod_base = OTHER; note = 2'-O-methyladenosine-3'-phosphorothioate
  modified_base 20: mod_base = OTHER; note = 2'-O-methyladenosine-3'-phosphorothioate
  modified_base 21: mod_base = OTHER; note = 2'-O-methyladenosine-3'-phosphate
ttgtctgaaaatgtctttaaa

SEQ ID NO: 2275 - RNA, 21 nt, synthetic construct
  source 1..21: mol_type = other RNA
  modified_base 1: mod_base = OTHER; note = 2'-O-methyluridine-3'-phosphorothioate
  modified_base 2: mod_base = OTHER; note = 2'-O-methylguanosine-3'-phosphorothioate
  modified_base 3: mod_base = OTHER; note = 2'-O-methyluridine-3'-phosphate
  modified_base 4: mod_base = OTHER; note = 2'-O-methyluridine-3'-phosphate
  modified_base 5: mod_base = OTHER; note = 2'-O-methylguanosine-3'-phosphate
  modified_base 6: mod_base = OTHER; note = 2'-O-methylguanosine-3'-phosphate
  modified_base 7: mod_base = OTHER; note = 2'-fluorouridine-3'-phosphate
  modified_base 8: mod_base = OTHER; note = 2'-O-methyluridine-3'-phosphate
  modified_base 9: mod_base = OTHER; note = 2'-fluorocytidine-3'-phosphate
  modified_base 10: mod_base = OTHER; note = 2'-fluoroadenosine-3'-phosphate
  modified_base 11: mod_base = OTHER; note = 2'-fluoroadenosine-3'-phosphate
  modified_base 12: mod_base = OTHER; note = 2'-O-methyladenosine-3'-phosphate
  modified_base 13: mod_base = OTHER; note = 2'-O-methylguanosine-3'-phosphate
  modified_base 14: mod_base = OTHER; note = 2'-O-methylguanosine-3'-phosphate
  modified_base 15: mod_base = OTHER; note = 2'-O-methyladenosine-3'-phosphate
  modified_base 16: mod_base = OTHER; note = 2'-O-methylcytidine-3'-phosphate
  modified_base 17: mod_base = OTHER; note = 2'-O-methyladenosine-3'-phosphate
  modified_base 18: mod_base = OTHER; note = 2'-O-methyladenosine-3'-phosphate
  modified_base 19: mod_base = OTHER; note = 2'-O-methyluridine-3'-phosphorothioate
  modified_base 20: mod_base = OTHER; note = 2'-O-methyluridine-3'-phosphorothioate
  modified_base 21: mod_base = OTHER; note = 2'-O-methyladenosine-3'-phosphate
tgttggttcaaaggacaatta

SEQ ID NO: 2276 - RNA, 21 nt, synthetic construct
  source 1..21: mol_type = other RNA
  modified_base 1: mod_base = OTHER; note = 2'-O-methyluridine-3'-phosphorothioate
  modified_base 2: mod_base = OTHER; note = 2'-O-methylcytidine-3'-phosphorothioate
  modified_base 3: mod_base = OTHER; note = 2'-O-methyluridine-3'-phosphate
  modified_base 4: mod_base = OTHER; note = 2'-O-methyladenosine-3'-phosphate
  modified_base 5: mod_base = OTHER; note = 2'-O-methyladenosine-3'-phosphate
  modified_base 6: mod_base = OTHER; note = 2'-O-methyladenosine-3'-phosphate
  modified_base 7: mod_base = OTHER; note = 2'-fluorocytidine-3'-phosphate
  modified_base 8: mod_base = OTHER; note = 2'-O-methyluridine-3'-phosphate
  modified_base 9: mod_base = OTHER; note = 2'-fluorouridine-3'-phosphate
  modified_base 10: mod_base = OTHER; note = 2'-fluorouridine-3'-phosphate
  modified_base 11: mod_base = OTHER; note = 2'-fluoroadenosine-3'-phosphate
  modified_base 12: mod_base = OTHER; note = 2'-O-methyladenosine-3'-phosphate
  modified_base 13: mod_base = OTHER; note = 2'-O-methyluridine-3'-phosphate
  modified_base 14: mod_base = OTHER; note = 2'-O-methyladenosine-3'-phosphate
  modified_base 15: mod_base = OTHER; note = 2'-O-methyluridine-3'-phosphate
  modified_base 16: mod_base = OTHER; note = 2'-O-methyladenosine-3'-phosphate
  modified_base 17: mod_base = OTHER; note = 2'-O-methyluridine-3'-phosphate
  modified_base 18: mod_base = OTHER; note = 2'-O-methylcytidine-3'-phosphate
  modified_base 19: mod_base = OTHER; note = 2'-O-methylguanosine-3'-phosphorothioate
  modified_base 20: mod_base = OTHER; note = 2'-O-methyladenosine-3'-phosphorothioate
  modified_base 21: mod_base = OTHER; note = 2'-O-methyladenosine-3'-phosphate
tctaaactttaatatatcgaa

SEQ ID NO: 2277 - RNA, 21 nt, synthetic construct
  source 1..21: mol_type = other RNA
  modified_base 1: mod_base = OTHER; note = 2'-O-methyladenosine-3'-phosphorothioate
  modified_base 2: mod_base = OTHER; note = 2'-O-methyladenosine-3'-phosphorothioate
  modified_base 3: mod_base = OTHER; note = 2'-O-methylguanosine-3'-phosphate
  modified_base 4: mod_base = OTHER; note = 2'-O-methyluridine-3'-phosphate
  modified_base 5: mod_base = OTHER; note = 2'-O-methylguanosine-3'-phosphate
  modified_base 6: mod_base = OTHER; note = 2'-O-methyladenosine-3'-phosphate
  modified_base 7: mod_base = OTHER; note = 2'-fluoroadenosine-3'-phosphate
  modified_base 8: mod_base = OTHER; note = 2'-O-methyladenosine-3'-phosphate
  modified_base 9: mod_base = OTHER; note = 2'-fluorocytidine-3'-phosphate
  modified_base 10: mod_base = OTHER; note = 2'-fluoroadenosine-3'-phosphate
  modified_base 11: mod_base = OTHER; note = 2'-fluorouridine-3'-phosphate
  modified_base 12: mod_base = OTHER; note = 2'-O-methylguanosine-3'-phosphate
  modified_base 13: mod_base = OTHER; note = 2'-O-methyladenosine-3'-phosphate
  modified_base 14: mod_base = OTHER; note = 2'-O-methylcytidine-3'-phosphate
  modified_base 15: mod_base = OTHER; note = 2'-O-methyluridine-3'-phosphate
  modified_base 16: mod_base = OTHER; note = 2'-O-methylguanosine-3'-phosphate
  modified_base 17: mod_base = OTHER; note = 2'-O-methyluridine-3'-phosphate
  modified_base 18: mod_base = OTHER; note = 2'-O-methylcytidine-3'-phosphate
  modified_base 19: mod_base = OTHER; note = 2'-O-methylguanosine-3'-phosphorothioate
  modified_base 20: mod_base = OTHER; note = 2'-O-methyluridine-3'-phosphorothioate
  modified_base 21: mod_base = OTHER; note = 2'-O-methyladenosine-3'-phosphate
aagtgaaacatgactgtcgta

SEQ ID NO: 2278 - RNA, 21 nt, synthetic construct
  source 1..21: mol_type = other RNA
  modified_base 1: mod_base = OTHER; note = 2'-O-methyladenosine-3'-phosphorothioate
  modified_base 2: mod_base = OTHER; note = 2'-O-methyluridine-3'-phosphorothioate
  modified_base 3: mod_base = OTHER; note = 2'-O-methylcytidine-3'-phosphate
  modified_base 4: mod_base = OTHER; note = 2'-O-methylguanosine-3'-phosphate
  modified_base 5: mod_base = OTHER; note = 2'-O-methyluridine-3'-phosphate
  modified_base 6: mod_base = OTHER; note = 2'-O-methylcytidine-3'-phosphate
  modified_base 7: mod_base = OTHER; note = 2'-fluorocytidine-3'-phosphate
  modified_base 8: mod_base = OTHER; note = 2'-O-methyladenosine-3'-phosphate
  modified_base 9: mod_base = OTHER; note = 2'-fluorouridine-3'-phosphate
  modified_base 10: mod_base = OTHER; note = 2'-fluoroadenosine-3'-phosphate
  modified_base 11: mod_base = OTHER; note = 2'-fluorocytidine-3'-phosphate
  modified_base 12: mod_base = OTHER; note = 2'-O-methyladenosine-3'-phosphate
  modified_base 13: mod_base = OTHER; note = 2'-O-methylguanosine-3'-phosphate
  modified_base 14: mod_base = OTHER; note = 2'-O-methyluridine-3'-phosphate
  modified_base 15: mod_base = OTHER; note = 2'-O-methyluridine-3'-phosphate
  modified_base 16: mod_base = OTHER; note = 2'-O-methyluridine-3'-phosphate
  modified_base 17: mod_base = OTHER; note = 2'-O-methyluridine-3'-phosphate
  modified_base 18: mod_base = OTHER; note = 2'-O-methylcytidine-3'-phosphate
  modified_base 19: mod_base = OTHER; note = 2'-O-methyladenosine-3'-phosphorothioate
  modified_base 20: mod_base = OTHER; note = 2'-O-methyluridine-3'-phosphorothioate
  modified_base 21: mod_base = OTHER; note = 2'-O-methyladenosine-3'-phosphate
atcgtccatacagttttcata

SEQ ID NO: 2279 - RNA, 21 nt, synthetic construct
  source 1..21: mol_type = other RNA
  modified_base 1: mod_base = OTHER; note = 2'-O-methylcytidine-3'-phosphorothioate
  modified_base 2: mod_base = OTHER; note = 2'-O-methyluridine-3'-phosphorothioate
  modified_base 3: mod_base = OTHER; note = 2'-O-methyluridine-3'-phosphate
  modified_base 4: mod_base = OTHER; note = 2'-O-methylcytidine-3'-phosphate
  modified_base 5: mod_base = OTHER; note = 2'-O-methyladenosine-3'-phosphate
  modified_base 6: mod_base = OTHER; note = 2'-O-methylguanosine-3'-phosphate
  modified_base 7: mod_base = OTHER; note = 2'-fluoroguanosine-3'-phosphate
  modified_base 8: mod_base = OTHER; note = 2'-O-methyladenosine-3'-phosphate
  modified_base 9: mod_base = OTHER; note = 2'-fluoroadenosine-3'-phosphate
  modified_base 10: mod_base = OTHER; note = 2'-fluoroadenosine-3'-phosphate
  modified_base 11: mod_base = OTHER; note = 2'-fluorouridine-3'-phosphate
  modified_base 12: mod_base = OTHER; note = 2'-O-methyladenosine-3'-phosphate
  modified_base 13: mod_base = OTHER; note = 2'-O-methylguanosine-3'-phosphate
  modified_base 14: mod_base = OTHER; note = 2'-O-methyluridine-3'-phosphate
  modified_base 15: mod_base = OTHER; note = 2'-O-methyladenosine-3'-phosphate
  modified_base 16: mod_base = OTHER; note = 2'-O-methylguanosine-3'-phosphate
  modified_base 17: mod_base = OTHER; note = 2'-O-methylguanosine-3'-phosphate
  modified_base 18: mod_base = OTHER; note = 2'-O-methyladenosine-3'-phosphate
  modified_base 19: mod_base = OTHER; note = 2'-O-methyladenosine-3'-phosphorothioate
  modified_base 20: mod_base = OTHER; note = 2'-O-methyladenosine-3'-phosphorothioate
  modified_base 21: mod_base = OTHER; note = 2'-O-methyladenosine-3'-phosphate
cttcaggaaatagtaggaaaa

SEQ ID NO: 2280 - RNA, 21 nt, synthetic construct
  source 1..21: mol_type = other RNA
  modified_base 1: mod_base = OTHER; note = 2'-O-methylcytidine-3'-phosphorothioate
  modified_base 2: mod_base = OTHER; note = 2'-O-methyladenosine-3'-phosphorothioate
  modified_base 3: mod_base = OTHER; note = 2'-O-methylcytidine-3'-phosphate
  modified_base 4: mod_base = OTHER; note = 2'-O-methylcytidine-3'-phosphate
  modified_base 5: mod_base = OTHER; note = 2'-O-methylcytidine-3'-phosphate
  modified_base 6: mod_base = OTHER; note = 2'-O-methyluridine-3'-phosphate
  modified_base 7: mod_base = OTHER; note = 2'-fluorouridine-3'-phosphate
  modified_base 8: mod_base = OTHER; note = 2'-O-methyluridine-3'-phosphate
  modified_base 9: mod_base = OTHER; note = 2'-fluorocytidine-3'-phosphate
  modified_base 10: mod_base = OTHER; note = 2'-fluorouridine-3'-phosphate
  modified_base 11: mod_base = OTHER; note = 2'-fluoroguanosine-3'-phosphate
  modified_base 12: mod_base = OTHER; note = 2'-O-methyluridine-3'-phosphate
  modified_base 13: mod_base = OTHER; note = 2'-O-methyladenosine-3'-phosphate
  modified_base 14: mod_base = OTHER; note = 2'-O-methyladenosine-3'-phosphate
  modified_base 15: mod_base = OTHER; note = 2'-O-methylguanosine-3'-phosphate
  modified_base 16: mod_base = OTHER; note = 2'-O-methylguanosine-3'-phosphate
  modified_base 17: mod_base = OTHER; note = 2'-O-methyladenosine-3'-phosphate
  modified_base 18: mod_base = OTHER; note = 2'-O-methylcytidine-3'-phosphate
  modified_base 19: mod_base = OTHER; note = 2'-O-methyluridine-3'-phosphorothioate
  modified_base 20: mod_base = OTHER; note = 2'-O-methylguanosine-3'-phosphorothioate
  modified_base 21: mod_base = OTHER; note = 2'-O-methyladenosine-3'-phosphate
caccctttctgtaaggactga

SEQ ID NO: 2281 - RNA, 21 nt, synthetic construct
  source 1..21: mol_type = other RNA
  modified_base 1: mod_base = OTHER; note = 2'-O-methyladenosine-3'-phosphorothioate
  modified_base 2: mod_base = OTHER; note = 2'-O-methyladenosine-3'-phosphorothioate
  modified_base 3: mod_base = OTHER; note = 2'-O-methyladenosine-3'-phosphate
  modified_base 4: mod_base = OTHER; note = 2'-O-methylguanosine-3'-phosphate
  modified_base 5: mod_base = OTHER; note = 2'-O-methyladenosine-3'-phosphate
  modified_base 6: mod_base = OTHER; note = 2'-O-methylguanosine-3'-phosphate
  modified_base 7: mod_base = OTHER; note = 2'-fluoroadenosine-3'-phosphate
  modified_base 8: mod_base = OTHER; note = 2'-O-methyluridine-3'-phosphate
  modified_base 9: mod_base = OTHER; note = 2'-fluoroadenosine-3'-phosphate
  modified_base 10: mod_base = OTHER; note = 2'-fluorocytidine-3'-phosphate
  modified_base 11: mod_base = OTHER; note = 2'-fluorocytidine-3'-phosphate
  modified_base 12: mod_base = OTHER; note = 2'-O-methyluridine-3'-phosphate
  modified_base 13: mod_base = OTHER; note = 2'-O-methylguanosine-3'-phosphate
  modified_base 14: mod_base = OTHER; note = 2'-O-methyladenosine-3'-phosphate
  modified_base 15: mod_base = OTHER; note = 2'-O-methylcytidine-3'-phosphate
  modified_base 16: mod_base = OTHER; note = 2'-O-methyladenosine-3'-phosphate
  modified_base 17: mod_base = OTHER; note = 2'-O-methyluridine-3'-phosphate
  modified_base 18: mod_base = OTHER; note = 2'-O-methylcytidine-3'-phosphate
  modified_base 19: mod_base = OTHER; note = 2'-O-methylcytidine-3'-phosphorothioate
  modified_base 20: mod_base = OTHER; note = 2'-O-methyluridine-3'-phosphorothioate
  modified_base 21: mod_base = OTHER; note = 2'-O-methyladenosine-3'-phosphate
aaagagatacctgacatccta

SEQ ID NO: 2282 - RNA, 21 nt, synthetic construct
  source 1..21: mol_type = other RNA
  modified_base 1: mod_base = OTHER; note = 2'-O-methyladenosine-3'-phosphorothioate
  modified_base 2: mod_base = OTHER; note = 2'-O-methyluridine-3'-phosphorothioate
  modified_base 3: mod_base = OTHER; note = 2'-O-methylguanosine-3'-phosphate
  modified_base 4: mod_base = OTHER; note = 2'-O-methyladenosine-3'-phosphate
  modified_base 5: mod_base = OTHER; note = 2'-O-methylguanosine-3'-phosphate
  modified_base 6: mod_base = OTHER; note = 2'-O-methylcytidine-3'-phosphate
  modified_base 7: mod_base = OTHER; note = 2'-fluoroadenosine-3'-phosphate
  modified_base 8: mod_base = OTHER; note = 2'-O-methyluridine-3'-phosphate
  modified_base 9: mod_base = OTHER; note = 2'-fluorouridine-3'-phosphate
  modified_base 10: mod_base = OTHER; note = 2'-fluoroadenosine-3'-phosphate
  modified_base 11: mod_base = OTHER; note = 2'-fluoroadenosine-3'-phosphate
  modified_base 12: mod_base = OTHER; note = 2'-O-methyluridine-3'-phosphate
  modified_base 13: mod_base = OTHER; note = 2'-O-methylguanosine-3'-phosphate
  modified_base 14: mod_base = OTHER; note = 2'-O-methyluridine-3'-phosphate
  modified_base 15: mod_base = OTHER; note = 2'-O-methyluridine-3'-phosphate
  modified_base 16: mod_base = OTHER; note = 2'-O-methyluridine-3'-phosphate
  modified_base 17: mod_base = OTHER; note = 2'-O-methyluridine-3'-phosphate
  modified_base 18: mod_base = OTHER; note = 2'-O-methylcytidine-3'-phosphate
  modified_base 19: mod_base = OTHER; note = 2'-O-methyluridine-3'-phosphorothioate
  modified_base 20: mod_base = OTHER; note = 2'-O-methylguanosine-3'-phosphorothioate
  modified_base 21: mod_base = OTHER; note = 2'-O-methyladenosine-3'-phosphate
atgagcattaatgttttctga

SEQ ID NO: 2283 - RNA, 21 nt, synthetic construct
  source 1..21: mol_type = other RNA
  modified_base 1: mod_base = OTHER; note = 2'-O-methyluridine-3'-phosphorothioate
  modified_base 2: mod_base = OTHER; note = 2'-O-methylguanosine-3'-phosphorothioate
  modified_base 3: mod_base = OTHER; note = 2'-O-methyladenosine-3'-phosphate
  modified_base 4: mod_base = OTHER; note = 2'-O-methylcytidine-3'-phosphate
  modified_base 5: mod_base = OTHER; note = 2'-O-methyladenosine-3'-phosphate
  modified_base 6: mod_base = OTHER; note = 2'-O-methyluridine-3'-phosphate
  modified_base 7: mod_base = OTHER; note = 2'-fluorouridine-3'-phosphate
  modified_base 8: mod_base = OTHER; note = 2'-O-methyluridine-3'-phosphate
  modified_base 9: mod_base = OTHER; note = 2'-fluorouridine-3'-phosphate
  modified_base 10: mod_base = OTHER; note = 2'-fluorouridine-3'-phosphate
  modified_base 11: mod_base = OTHER; note = 2'-fluorouridine-3'-phosphate
  modified_base 12: mod_base = OTHER; note = 2'-O-methylcytidine-3'-phosphate
  modified_base 13: mod_base = OTHER; note = 2'-O-methyluridine-3'-phosphate
  modified_base 14: mod_base = OTHER; note = 2'-O-methylcytidine-3'-phosphate
  modified_base 15: mod_base = OTHER; note = 2'-O-methyladenosine-3'-phosphate
  modified_base 16: mod_base = OTHER; note = 2'-O-methyluridine-3'-phosphate
  modified_base 17: mod_base = OTHER; note = 2'-O-methyladenosine-3'-phosphate
  modified_base 18: mod_base = OTHER; note = 2'-O-methylguanosine-3'-phosphate
  modified_base 19: mod_base = OTHER; note = 2'-O-methyladenosine-3'-phosphorothioate
  modified_base 20: mod_base = OTHER; note = 2'-O-methyladenosine-3'-phosphorothioate
  modified_base 21: mod_base = OTHER; note = 2'-O-methyladenosine-3'-phosphate
tgacattttttctcatagaaa

SEQ ID NO: 2284 - RNA, 21 nt, synthetic construct
  source 1..21: mol_type = other RNA
  modified_base 1: mod_base = OTHER; note = 2'-O-methylcytidine-3'-phosphorothioate
  modified_base 2: mod_base = OTHER; note = 2'-O-methyladenosine-3'-phosphorothioate
  modified_base 3: mod_base = OTHER; note = 2'-O-methylguanosine-3'-phosphate
  modified_base 4: mod_base = OTHER; note = 2'-O-methyladenosine-3'-phosphate
  modified_base 5: mod_base = OTHER; note = 2'-O-methylguanosine-3'-phosphate
  modified_base 6: mod_base = OTHER; note = 2'-O-methyladenosine-3'-phosphate
  modified_base 7: mod_base = OTHER; note = 2'-fluorouridine-3'-phosphate
  modified_base 8: mod_base = OTHER; note = 2'-O-methyluridine-3'-phosphate
  modified_base 9: mod_base = OTHER; note = 2'-fluoroadenosine-3'-phosphate
  modified_base 10: mod_base = OTHER; note = 2'-fluoroadenosine-3'-phosphate
  modified_base 11: mod_base = OTHER; note = 2'-fluoroadenosine-3'-phosphate
  modified_base 12: mod_base = OTHER; note = 2'-O-methyluridine-3'-phosphate
  modified_base 13: mod_base = OTHER; note = 2'-O-methylguanosine-3'-phosphate
  modified_base 14: mod_base = OTHER; note = 2'-O-methyladenosine-3'-phosphate
  modified_base 15: mod_base = OTHER; note = 2'-O-methylcytidine-3'-phosphate
  modified_base 16: mod_base = OTHER; note = 2'-O-methyluridine-3'-phosphate
  modified_base 17: mod_base = OTHER; note = 2'-O-methyladenosine-3'-phosphate
  modified_base 18: mod_base = OTHER; note = 2'-O-methylcytidine-3'-phosphate
  modified_base 19: mod_base = OTHER; note = 2'-O-methyluridine-3'-phosphorothioate
  modified_base 20: mod_base = OTHER; note = 2'-O-methyladenosine-3'-phosphorothioate
  modified_base 21: mod_base = OTHER; note = 2'-O-methyladenosine-3'-phosphate
cagagattaaatgactactaa

SEQ ID NO: 2285 - RNA, 21 nt, synthetic construct
  source 1..21: mol_type = other RNA
  modified_base 1: mod_base = OTHER; note = 2'-O-methylguanosine-3'-phosphorothioate
  modified_base 2: mod_base = OTHER; note = 2'-O-methylcytidine-3'-phosphorothioate
  modified_base 3: mod_base = OTHER; note = 2'-O-methyluridine-3'-phosphate
  modified_base 4: mod_base = OTHER; note = 2'-O-methylguanosine-3'-phosphate
  modified_base 5: mod_base = OTHER; note = 2'-O-methyluridine-3'-phosphate
  modified_base 6: mod_base = OTHER; note = 2'-O-methylcytidine-3'-phosphate
  modified_base 7: mod_base = OTHER; note = 2'-fluoroadenosine-3'-phosphate
  modified_base 8: mod_base = OTHER; note = 2'-O-methyladenosine-3'-phosphate
  modified_base 9: mod_base = OTHER; note = 2'-fluoroadenosine-3'-phosphate
  modified_base 10: mod_base = OTHER; note = 2'-fluorouridine-3'-phosphate
  modified_base 11: mod_base = OTHER; note = 2'-fluoroguanosine-3'-phosphate
  modified_base 12: mod_base = OTHER; note = 2'-O-methyluridine-3'-phosphate
  modified_base 13: mod_base = OTHER; note = 2'-O-methyluridine-3'-phosphate
  modified_base 14: mod_base = OTHER; note = 2'-O-methyladenosine-3'-phosphate
  modified_base 15: mod_base = OTHER; note = 2'-O-methyluridine-3'-phosphate
  modified_base 16: mod_base = OTHER; note = 2'-O-methyladenosine-3'-phosphate
  modified_base 17: mod_base = OTHER; note = 2'-O-methyluridine-3'-phosphate
  modified_base 18: mod_base = OTHER; note = 2'-O-methyluridine-3'-phosphate
  modified_base 19: mod_base = OTHER; note = 2'-O-methylguanosine-3'-phosphorothioate
  modified_base 20: mod_base = OTHER; note = 2'-O-methyluridine-3'-phosphorothioate
  modified_base 21: mod_base = OTHER; note = 2'-O-methyladenosine-3'-phosphate
gctgtcaaatgttatattgta

SEQ ID NO: 2286 - RNA, 21 nt, synthetic construct
  source 1..21: mol_type = other RNA
  modified_base 1: mod_base = OTHER; note = 2'-O-methyladenosine-3'-phosphorothioate
  modified_base 2: mod_base = OTHER; note = 2'-O-methyladenosine-3'-phosphorothioate
  modified_base 3: mod_base = OTHER; note = 2'-O-methyluridine-3'-phosphate
  modified_base 4: mod_base = OTHER; note = 2'-O-methyladenosine-3'-phosphate
  modified_base 5: mod_base = OTHER; note = 2'-O-methyluridine-3'-phosphate
  modified_base 6: mod_base = OTHER; note = 2'-O-methyladenosine-3'-phosphate
  modified_base 7: mod_base = OTHER; note = 2'-fluoroadenosine-3'-phosphate
  modified_base 8: mod_base = OTHER; note = 2'-O-methyluridine-3'-phosphate
  modified_base 9: mod_base = OTHER; note = 2'-fluoroadenosine-3'-phosphate
  modified_base 10: mod_base = OTHER; note = 2'-fluorocytidine-3'-phosphate
  modified_base 11: mod_base = OTHER; note = 2'-fluorouridine-3'-phosphate
  modified_base 12: mod_base = OTHER; note = 2'-O-methyladenosine-3'-phosphate
  modified_base 13: mod_base = OTHER; note = 2'-O-methylcytidine-3'-phosphate
  modified_base 14: mod_base = OTHER; note = 2'-O-methyladenosine-3'-phosphate
  modified_base 15: mod_base = OTHER; note = 2'-O-methylguanosine-3'-phosphate
  modified_base 16: mod_base = OTHER; note = 2'-O-methylcytidine-3'-phosphate
  modified_base 17: mod_base = OTHER; note = 2'-O-methyladenosine-3'-phosphate
  modified_base 18: mod_base = OTHER; note = 2'-O-methyladenosine-3'-phosphate
  modified_base 19: mod_base = OTHER; note = 2'-O-methyladenosine-3'-phosphorothioate
  modified_base 20: mod_base = OTHER; note = 2'-O-methyladenosine-3'-phosphorothioate
  modified_base 21: mod_base = OTHER; note = 2'-O-methyladenosine-3'-phosphate
aatataatactacagcaaaaa

SEQ ID NO: 2287 - RNA, 21 nt, synthetic construct
  source 1..21: mol_type = other RNA
  modified_base 1: mod_base = OTHER; note = 2'-O-methylguanosine-3'-phosphorothioate
  modified_base 2: mod_base = OTHER; note = 2'-O-methylguanosine-3'-phosphorothioate
  modified_base 3: mod_base = OTHER; note = 2'-O-methyluridine-3'-phosphate
  modified_base 4: mod_base = OTHER; note = 2'-O-methylguanosine-3'-phosphate
  modified_base 5: mod_base = OTHER; note = 2'-O-methyluridine-3'-phosphate
  modified_base 6: mod_base = OTHER; note = 2'-O-methylcytidine-3'-phosphate
  modified_base 7: mod_base = OTHER; note = 2'-fluorouridine-3'-phosphate
  modified_base 8: mod_base = OTHER; note = 2'-O-methyladenosine-3'-phosphate
  modified_base 9: mod_base = OTHER; note = 2'-fluoroadenosine-3'-phosphate
  modified_base 10: mod_base = OTHER; note = 2'-fluoroadenosine-3'-phosphate
  modified_base 11: mod_base = OTHER; note = 2'-fluorouridine-3'-phosphate
  modified_base 12: mod_base = OTHER; note = 2'-O-methyladenosine-3'-phosphate
  modified_base 13: mod_base = OTHER; note = 2'-O-methyluridine-3'-phosphate
  modified_base 14: mod_base = OTHER; note = 2'-O-methyladenosine-3'-phosphate
  modified_base 15: mod_base = OTHER; note = 2'-O-methyladenosine-3'-phosphate
  modified_base 16: mod_base = OTHER; note = 2'-O-methyluridine-3'-phosphate
  modified_base 17: mod_base = OTHER; note = 2'-O-methyluridine-3'-phosphate
  modified_base 18: mod_base = OTHER; note = 2'-O-methyluridine-3'-phosphate
  modified_base 19: mod_base = OTHER; note = 2'-O-methylcytidine-3'-phosphorothioate
  modified_base 20: mod_base = OTHER; note = 2'-O-methyladenosine-3'-phosphorothioate
  modified_base 21: mod_base = OTHER; note = 2'-O-methyladenosine-3'-phosphate
ggtgtctaaatataatttcaa

SEQ ID NO: 2288 - RNA, 21 nt, synthetic construct
  source 1..21: mol_type = other RNA
  modified_base 1: mod_base = OTHER; note = 2'-O-methylcytidine-3'-phosphorothioate
  modified_base 2: mod_base = OTHER; note = 2'-O-methyluridine-3'-phosphorothioate
  modified_base 3: mod_base = OTHER; note = 2'-O-methylcytidine-3'-phosphate
  modified_base 4: mod_base = OTHER; note = 2'-O-methyluridine-3'-phosphate
  modified_base 5: mod_base = OTHER; note = 2'-O-methyluridine-3'-phosphate
  modified_base 6: mod_base = OTHER; note = 2'-O-methyluridine-3'-phosphate
  modified_base 7: mod_base = OTHER; note = 2'-fluoroadenosine-3'-phosphate
  modified_base 8: mod_base = OTHER; note = 2'-O-methyluridine-3'-phosphate
  modified_base 9: mod_base = OTHER; note = 2'-fluoroadenosine-3'-phosphate
  modified_base 10: mod_base = OTHER; note = 2'-fluorocytidine-3'-phosphate
  modified_base 11: mod_base = OTHER; note = 2'-fluoroadenosine-3'-phosphate
  modified_base 12: mod_base = OTHER; note = 2'-O-methyladenosine-3'-phosphate
  modified_base 13: mod_base = OTHER; note = 2'-O-methyladenosine-3'-phosphate
  modified_base 14: mod_base = OTHER; note = 2'-O-methyladenosine-3'-phosphate
  modified_base 15: mod_base = OTHER; note = 2'-O-methyluridine-3'-phosphate
  modified_base 16: mod_base = OTHER; note = 2'-O-methylguanosine-3'-phosphate
  modified_base 17: mod_base = OTHER; note = 2'-O-methyladenosine-3'-phosphate
  modified_base 18: mod_base = OTHER; note = 2'-O-methylguanosine-3'-phosphate
  modified_base 19: mod_base = OTHER; note = 2'-O-methyladenosine-3'-phosphorothioate
  modified_base 20: mod_base = OTHER; note = 2'-O-methylguanosine-3'-phosphorothioate
  modified_base 21: mod_base = OTHER; note = 2'-O-methyladenosine-3'-phosphate
ctctttatacaaaatgagaga

SEQ ID NO: 2289 - RNA, 21 nt, synthetic construct
  source 1..21: mol_type = other RNA
  modified_base 1: mod_base = OTHER; note = 2'-O-methylguanosine-3'-phosphorothioate
  modified_base 2: mod_base = OTHER; note = 2'-O-methylcytidine-3'-phosphorothioate
  modified_base 3: mod_base = OTHER; note = 2'-O-methyladenosine-3'-phosphate
  modified_base 4: mod_base = OTHER; note = 2'-O-methylguanosine-3'-phosphate
  modified_base 5: mod_base = OTHER; note = 2'-O-methyluridine-3'-phosphate
  modified_base 6: mod_base = OTHER; note = 2'-O-methyladenosine-3'-phosphate
  modified_base 7: mod_base = OTHER; note = 2'-fluorocytidine-3'-phosphate
  modified_base 8: mod_base = OTHER; note = 2'-O-methylcytidine-3'-phosphate
  modified_base 9: mod_base = OTHER; note = 2'-fluoroadenosine-3'-phosphate
  modified_base 10: mod_base = OTHER; note = 2'-fluoroadenosine-3'-phosphate
  modified_base 11: mod_base = OTHER; note = 2'-fluoroadenosine-3'-phosphate
  modified_base 12: mod_base = OTHER; note = 2'-O-methyluridine-3'-phosphate
  modified_base 13: mod_base = OTHER; note = 2'-O-methylguanosine-3'-phosphate
  modified_base 14: mod_base = OTHER; note = 2'-O-methyladenosine-3'-phosphate
  modified_base 15: mod_base = OTHER; note = 2'-O-methyladenosine-3'-phosphate
  modified_base 16: mod_base = OTHER; note = 2'-O-methyluridine-3'-phosphate
  modified_base 17: mod_base = OTHER; note = 2'-O-methyladenosine-3'-phosphate
  modified_base 18: mod_base = OTHER; note = 2'-O-methyladenosine-3'-phosphate
  modified_base 19: mod_base = OTHER; note = 2'-O-methyladenosine-3'-phosphorothioate
  modified_base 20: mod_base = OTHER; note = 2'-O-methyladenosine-3'-phosphorothioate
  modified_base 21: mod_base = OTHER; note = 2'-O-methyladenosine-3'-phosphate
gcagtaccaaatgaataaaaa

SEQ ID NO: 2290 - RNA, 21 nt, synthetic construct
  source 1..21: mol_type = other RNA
  modified_base 1: mod_base = OTHER; note = 2'-O-methyluridine-3'-phosphorothioate
  modified_base 2: mod_base = OTHER; note = 2'-O-methyluridine-3'-phosphorothioate
  modified_base 3: mod_base = OTHER; note = 2'-O-methylguanosine-3'-phosphate
  modified_base 4: mod_base = OTHER; note = 2'-O-methyluridine-3'-phosphate
  modified_base 5: mod_base = OTHER; note = 2'-O-methyluridine-3'-phosphate
  modified_base 6: mod_base = OTHER; note = 2'-O-methylguanosine-3'-phosphate
  modified_base 7: mod_base = OTHER; note = 2'-fluoroguanosine-3'-phosphate
  modified_base 8: mod_base = OTHER; note = 2'-O-methyluridine-3'-phosphate
  modified_base 9: mod_base = OTHER; note = 2'-fluoroadenosine-3'-phosphate
  modified_base 10: mod_base = OTHER; note = 2'-fluorocytidine-3'-phosphate
  modified_base 11: mod_base = OTHER; note = 2'-fluoroadenosine-3'-phosphate
  modified_base 12: mod_base = OTHER; note = 2'-O-methylcytidine-3'-phosphate
  modified_base 13: mod_base = OTHER; note = 2'-O-methyladenosine-3'-phosphate
  modified_base 14: mod_base = OTHER; note = 2'-O-methyladenosine-3'-phosphate
  modified_base 15: mod_base = OTHER; note = 2'-O-methylguanosine-3'-phosphate
  modified_base 16: mod_base = OTHER; note = 2'-O-methylguanosine-3'-phosphate
  modified_base 17: mod_base = OTHER; note = 2'-O-methyluridine-3'-phosphate
  modified_base 18: mod_base = OTHER; note = 2'-O-methyladenosine-3'-phosphate
  modified_base 19: mod_base = OTHER; note = 2'-O-methyladenosine-3'-phosphorothioate
  modified_base 20: mod_base = OTHER; note = 2'-O-methyladenosine-3'-phosphorothioate
  modified_base 21: mod_base = OTHER; note = 2'-O-methyladenosine-3'-phosphate
ttgttggtacacaaggtaaaa

SEQ ID NO: 2291 - RNA, 21 nt, synthetic construct
  source 1..21: mol_type = other RNA
  modified_base 1: mod_base = OTHER; note = 2'-O-methylcytidine-3'-phosphorothioate
  modified_base 2: mod_base = OTHER; note = 2'-O-methyluridine-3'-phosphorothioate
  modified_base 3: mod_base = OTHER; note = 2'-O-methylcytidine-3'-phosphate
  modified_base 4: mod_base = OTHER; note = 2'-O-methyluridine-3'-phosphate
  modified_base 5: mod_base = OTHER; note = 2'-O-methyluridine-3'-phosphate
  modified_base 6: mod_base = OTHER; note = 2'-O-methyladenosine-3'-phosphate
  modified_base 7: mod_base = OTHER; note = 2'-fluorouridine-3'-phosphate
  modified_base 8: mod_base = OTHER; note = 2'-O-methyluridine-3'-phosphate
  modified_base 9: mod_base = OTHER; note = 2'-fluorouridine-3'-phosphate
  modified_base 10: mod_base = OTHER; note = 2'-fluoroadenosine-3'-phosphate
  modified_base 11: mod_base = OTHER; note = 2'-fluoroadenosine-3'-phosphate
  modified_base 12: mod_base = OTHER; note = 2'-O-methylcytidine-3'-phosphate
  modified_base 13: mod_base = OTHER; note = 2'-O-methyluridine-3'-phosphate
  modified_base 14: mod_base = OTHER; note = 2'-O-methyluridine-3'-phosphate
  modified_base 15: mod_base = OTHER; note = 2'-O-methyladenosine-3'-phosphate
  modified_base 16: mod_base = OTHER; note = 2'-O-methyladenosine-3'-phosphate
  modified_base 17: mod_base = OTHER; note = 2'-O-methylcytidine-3'-phosphate
  modified_base 18: mod_base = OTHER; note = 2'-O-methylcytidine-3'-phosphate
  modified_base 19: mod_base = OTHER; note = 2'-O-methylguanosine-3'-phosphorothioate
  modified_base 20: mod_base = OTHER; note = 2'-O-methyluridine-3'-phosphorothioate
  modified_base 21: mod_base = OTHER; note = 2'-O-methyladenosine-3'-phosphate
ctcttatttaacttaaccgta

SEQ ID NO: 2292 - RNA, 21 nt, synthetic construct
  source 1..21: mol_type = other RNA
  modified_base 1: mod_base = OTHER; note = 2'-O-methyluridine-3'-phosphorothioate
  modified_base 2: mod_base = OTHER; note = 2'-O-methylguanosine-3'-phosphorothioate
  modified_base 3: mod_base = OTHER; note = 2'-O-methylcytidine-3'-phosphate
  modified_base 4: mod_base = OTHER; note = 2'-O-methyluridine-3'-phosphate
  modified_base 5: mod_base = OTHER; note = 2'-O-methyluridine-3'-phosphate
  modified_base 6: mod_base = OTHER; note = 2'-O-methylguanosine-3'-phosphate
  modified_base 7: mod_base = OTHER; note = 2'-fluoroadenosine-3'-phosphate
  modified_base 8: mod_base = OTHER; note = 2'-O-methyluridine-3'-phosphate
  modified_base 9: mod_base = OTHER; note = 2'-fluoroguanosine-3'-phosphate
  modified_base 10: mod_base = OTHER; note = 2'-fluoroadenosine-3'-phosphate
  modified_base 11: mod_base = OTHER; note = 2'-fluorouridine-3'-phosphate
  modified_base 12: mod_base = OTHER; note = 2'-O-methyladenosine-3'-phosphate
  modified_base 13: mod_base = OTHER; note = 2'-O-methylcytidine-3'-phosphate
  modified_base 14: mod_base = OTHER; note = 2'-O-methyladenosine-3'-phosphate
  modified_base 15: mod_base = OTHER; note = 2'-O-methyladenosine-3'-phosphate
  modified_base 16: mod_base = OTHER; note = 2'-O-methyluridine-3'-phosphate
  modified_base 17: mod_base = OTHER; note = 2'-O-methylguanosine-3'-phosphate
  modified_base 18: mod_base = OTHER; note = 2'-O-methyladenosine-3'-phosphate
  modified_base 19: mod_base = OTHER; note = 2'-O-methyladenosine-3'-phosphorothioate
  modified_base 20: mod_base = OTHER; note = 2'-O-methyluridine-3'-phosphorothioate
  modified_base 21: mod_base = OTHER; note = 2'-O-methyladenosine-3'-phosphate
tgcttgatgatacaatgaata

SEQ ID NO: 2293 - RNA, 21 nt, synthetic construct
  source 1..21: mol_type = other RNA
  modified_base 1: mod_base = OTHER; note = 2'-O-methyladenosine-3'-phosphorothioate
  modified_base 2: mod_base = OTHER; note = 2'-O-methyladenosine-3'-phosphorothioate
  modified_base 3: mod_base = OTHER; note = 2'-O-methylcytidine-3'-phosphate
  modified_base 4: mod_base = OTHER; note = 2'-O-methyluridine-3'-phosphate
  modified_base 5: mod_base = OTHER; note = 2'-O-methylguanosine-3'-phosphate
  modified_base 6: mod_base = OTHER; note = 2'-O-methylguanosine-3'-phosphate
  modified_base 7: mod_base = OTHER; note = 2'-fluoroguanosine-3'-phosphate
  modified_base 8: mod_base = OTHER; note = 2'-O-methyladenosine-3'-phosphate
  modified_base 9: mod_base = OTHER; note = 2'-fluoroadenosine-3'-phosphate
  modified_base 10: mod_base = OTHER; note = 2'-fluoroadenosine-3'-phosphate
  modified_base 11: mod_base = OTHER; note = 2'-fluoroguanosine-3'-phosphate
  modified_base 12: mod_base = OTHER; note = 2'-O-methyladenosine-3'-phosphate
  modified_base 13: mod_base = OTHER; note = 2'-O-methylcytidine-3'-phosphate
  modified_base 14: mod_base = OTHER; note = 2'-O-methyladenosine-3'-phosphate
  modified_base 15: mod_base = OTHER; note = 2'-O-methyladenosine-3'-phosphate
  modified_base 16: mod_base = OTHER; note = 2'-O-methyluridine-3'-phosphate
  modified_base 17: mod_base = OTHER; note = 2'-O-methyluridine-3'-phosphate
  modified_base 18: mod_base = OTHER; note = 2'-O-methyluridine-3'-phosphate
  modified_base 19: mod_base = OTHER; note = 2'-O-methylguanosine-3'-phosphorothioate
  modified_base 20: mod_base = OTHER; note = 2'-O-methyladenosine-3'-phosphorothioate
  modified_base 21: mod_base = OTHER; note = 2'-O-methyladenosine-3'-phosphate
aactgggaaagacaatttgaa

SEQ ID NO: 2294 - RNA, 21 nt, synthetic construct
  source 1..21: mol_type = other RNA
  modified_base 1: mod_base = OTHER; note = 2'-O-methylcytidine-3'-phosphorothioate
  modified_base 2: mod_base = OTHER; note = 2'-O-methyluridine-3'-phosphorothioate
  modified_base 3: mod_base = OTHER; note = 2'-O-methylcytidine-3'-phosphate
  modified_base 4: mod_base = OTHER; note = 2'-O-methylcytidine-3'-phosphate
  modified_base 5: mod_base = OTHER; note = 2'-O-methyluridine-3'-phosphate
  modified_base 6: mod_base = OTHER; note = 2'-O-methyluridine-3'-phosphate
  modified_base 7: mod_base = OTHER; note = 2'-fluoroadenosine-3'-phosphate
  modified_base 8: mod_base = OTHER; note = 2'-O-methyluridine-3'-phosphate
  modified_base 9: mod_base = OTHER; note = 2'-fluoroadenosine-3'-phosphate
  modified_base 10: mod_base = OTHER; note = 2'-fluorouridine-3'-phosphate
  modified_base 11: mod_base = OTHER; note = 2'-fluoroguanosine-3'-phosphate
  modified_base 12: mod_base = OTHER; note = 2'-O-methyladenosine-3'-phosphate
  modified_base 13: mod_base = OTHER; note = 2'-O-methylcytidine-3'-phosphate
  modified_base 14: mod_base = OTHER; note = 2'-O-methyluridine-3'-phosphate
  modified_base 15: mod_base = OTHER; note = 2'-O-methyladenosine-3'-phosphate
  modified_base 16: mod_base = OTHER; note = 2'-O-methyluridine-3'-phosphate
  modified_base 17: mod_base = OTHER; note = 2'-O-methyluridine-3'-phosphate
  modified_base 18: mod_base = OTHER; note = 2'-O-methyluridine-3'-phosphate
  modified_base 19: mod_base = OTHER; note = 2'-O-methylguanosine-3'-phosphorothioate
  modified_base 20: mod_base = OTHER; note = 2'-O-methyladenosine-3'-phosphorothioate
  modified_base 21: mod_base = OTHER; note = 2'-O-methyladenosine-3'-phosphate
ctccttatatgactatttgaa

SEQ ID NO: 2295 - RNA, 21 nt, synthetic construct
  source 1..21: mol_type = other RNA
  modified_base 1: mod_base = OTHER; note = 2'-O-methyladenosine-3'-phosphorothioate
  modified_base 2: mod_base = OTHER; note = 2'-O-methylguanosine-3'-phosphorothioate
  modified_base 3: mod_base = OTHER; note = 2'-O-methyluridine-3'-phosphate
  modified_base 4: mod_base = OTHER; note = 2'-O-methylcytidine-3'-phosphate
  modified_base 5: mod_base = OTHER; note = 2'-O-methyladenosine-3'-phosphate
  modified_base 6: mod_base = OTHER; note = 2'-O-methyluridine-3'-phosphate
  modified_base 7: mod_base = OTHER; note = 2'-fluoroguanosine-3'-phosphate
  modified_base 8: mod_base = OTHER; note = 2'-O-methylcytidine-3'-phosphate
  modified_base 9: mod_base = OTHER; note = 2'-fluorouridine-3'-phosphate
  modified_base 10: mod_base = OTHER; note = 2'-fluoroadenosine-3'-phosphate
  modified_base 11: mod_base = OTHER; note = 2'-fluoroadenosine-3'-phosphate
  modified_base 12: mod_base = OTHER; note = 2'-O-methylcytidine-3'-phosphate
  modified_base 13: mod_base = OTHER; note = 2'-O-methylcytidine-3'-phosphate
  modified_base 14: mod_base = OTHER; note = 2'-O-methyladenosine-3'-phosphate
  modified_base 15: mod_base = OTHER; note = 2'-O-methyladenosine-3'-phosphate
  modified_base 16: mod_base = OTHER; note = 2'-O-methyluridine-3'-phosphate
  modified_base 17: mod_base = OTHER; note = 2'-O-methylguanosine-3'-phosphate
  modified_base 18: mod_base = OTHER; note = 2'-O-methylguanosine-3'-phosphate
  modified_base 19: mod_base = OTHER; note = 2'-O-methyladenosine-3'-phosphorothioate
  modified_base 20: mod_base = OTHER; note = 2'-O-methyladenosine-3'-phosphorothioate
  modified_base 21: mod_base = OTHER; note = 2'-O-methyladenosine-3'-phosphate
agtcatgctaaccaatggaaa

SEQ ID NO: 2296 - RNA, 21 nt, synthetic construct
  source 1..21: mol_type = other RNA
  modified_base 1: mod_base = OTHER; note = 2'-O-methylcytidine-3'-phosphorothioate
  modified_base 2: mod_base = OTHER; note = 2'-O-methylcytidine-3'-phosphorothioate
  modified_base 3: mod_base = OTHER; note = 2'-O-methyluridine-3'-phosphate
  modified_base 4: mod_base = OTHER; note = 2'-O-methylguanosine-3'-phosphate
  modified_base 5: mod_base = OTHER; note = 2'-O-methyladenosine-3'-phosphate
  modified_base 6: mod_base = OTHER; note = 2'-O-methyladenosine-3'-phosphate
  modified_base 7: mod_base = OTHER; note = 2'-fluoroguanosine-3'-phosphate
  modified_base 8: mod_base = OTHER; note = 2'-O-methyluridine-3'-phosphate
  modified_base 9: mod_base = OTHER; note = 2'-fluorocytidine-3'-phosphate
  modified_base 10: mod_base = OTHER; note = 2'-fluoroadenosine-3'-phosphate
  modified_base 11: mod_base = OTHER; note = 2'-fluorocytidine-3'-phosphate
  modified_base 12: mod_base = OTHER; note = 2'-O-methyladenosine-3'-phosphate
  modified_base 13: mod_base = OTHER; note = 2'-O-methylcytidine-3'-phosphate
  modified_base 14: mod_base = OTHER; note = 2'-O-methyladenosine-3'-phosphate
  modified_base 15: mod_base = OTHER; note = 2'-O-methylguanosine-3'-phosphate
  modified_base 16: mod_base = OTHER; note = 2'-O-methylcytidine-3'-phosphate
  modified_base 17: mod_base = OTHER; note = 2'-O-methyluridine-3'-phosphate
  modified_base 18: mod_base = OTHER; note = 2'-O-methyladenosine-3'-phosphate
  modified_base 19: mod_base = OTHER; note = 2'-O-methyladenosine-3'-phosphorothioate
  modified_base 20: mod_base = OTHER; note = 2'-O-methyluridine-3'-phosphorothioate
  modified_base 21: mod_base = OTHER; note = 2'-O-methyladenosine-3'-phosphate
cctgaagtcacacagctaata

SEQ ID NO: 2297 - RNA, 21 nt, synthetic construct
  source 1..21: mol_type = other RNA
  modified_base 1: mod_base = OTHER; note = 2'-O-methyluridine-3'-phosphorothioate
  modified_base 2: mod_base = OTHER; note = 2'-O-methyluridine-3'-phosphorothioate
  modified_base 3: mod_base = OTHER; note = 2'-O-methylguanosine-3'-phosphate
  modified_base 4: mod_base = OTHER; note = 2'-O-methylcytidine-3'-phosphate
  modified_base 5: mod_base = OTHER; note = 2'-O-methyluridine-3'-phosphate
  modified_base 6: mod_base = OTHER; note = 2'-O-methylguanosine-3'-phosphate
  modified_base 7: mod_base = OTHER; note = 2'-fluorocytidine-3'-phosphate
  modified_base 8: mod_base = OTHER; note = 2'-O-methyluridine-3'-phosphate
  modified_base 9: mod_base = OTHER; note = 2'-fluoroguanosine-3'-phosphate
  modified_base 10: mod_base = OTHER; note = 2'-fluoroadenosine-3'-phosphate
  modified_base 11: mod_base = OTHER; note = 2'-fluorocytidine-3'-phosphate
  modified_base 12: mod_base = OTHER; note = 2'-O-methyladenosine-3'-phosphate
  modified_base 13: mod_base = OTHER; note = 2'-O-methyladenosine-3'-phosphate
  modified_base 14: mod_base = OTHER; note = 2'-O-methylcytidine-3'-phosphate
  modified_base 15: mod_base = OTHER; note = 2'-O-methyladenosine-3'-phosphate
  modified_base 16: mod_base = OTHER; note = 2'-O-methyladenosine-3'-phosphate
  modified_base 17: mod_base = OTHER; note = 2'-O-methyladenosine-3'-phosphate
  modified_base 18: mod_base = OTHER; note = 2'-O-methylguanosine-3'-phosphate
  modified_base 19: mod_base = OTHER; note = 2'-O-methyladenosine-3'-phosphorothioate
  modified_base 20: mod_base = OTHER; note = 2'-O-methyluridine-3'-phosphorothioate
  modified_base 21: mod_base = OTHER; note = 2'-O-methyladenosine-3'-phosphate
ttgctgctgacaacaaagata

SEQ ID NO: 2298 - RNA, 21 nt, synthetic construct
  source 1..21: mol_type = other RNA
  modified_base 1: mod_base = OTHER; note = 2'-O-methyluridine-3'-phosphorothioate
  modified_base 2: mod_base = OTHER; note = 2'-O-methyladenosine-3'-phosphorothioate
  modified_base 3: mod_base = OTHER; note = 2'-O-methylcytidine-3'-phosphate
  modified_base 4: mod_base = OTHER; note = 2'-O-methyluridine-3'-phosphate
  modified_base 5: mod_base = OTHER; note = 2'-O-methylguanosine-3'-phosphate
  modified_base 6: mod_base = OTHER; note = 2'-O-methyladenosine-3'-phosphate
  modified_base 7: mod_base = OTHER; note = 2'-fluorocytidine-3'-phosphate
  modified_base 8: mod_base = OTHER; note = 2'-O-methyluridine-3'-phosphate
  modified_base 9: mod_base = OTHER; note = 2'-fluorouridine-3'-phosphate
  modified_base 10: mod_base = OTHER; note = 2'-fluorouridine-3'-phosphate
  modified_base 11: mod_base = OTHER; note = 2'-fluoroguanosine-3'-phosphate
  modified_base 12: mod_base = OTHER; note = 2'-O-methylcytidine-3'-phosphate
  modified_base 13: mod_base = OTHER; note = 2'-O-methylcytidine-3'-phosphate
  modified_base 14: mod_base = OTHER; note = 2'-O-methyluridine-3'-phosphate
  modified_base 15: mod_base = OTHER; note = 2'-O-methylguanosine-3'-phosphate
  modified_base 16: mod_base = OTHER; note = 2'-O-methyluridine-3'-phosphate
  modified_base 17: mod_base = OTHER; note = 2'-O-methyladenosine-3'-phosphate
  modified_base 18: mod_base = OTHER; note = 2'-O-methyladenosine-3'-phosphate
  modified_base 19: mod_base = OTHER; note = 2'-O-methyladenosine-3'-phosphorothioate
  modified_base 20: mod_base = OTHER; note = 2'-O-methylguanosine-3'-phosphorothioate
  modified_base 21: mod_base = OTHER; note = 2'-O-methyladenosine-3'-phosphate
tactgactttgcctgtaaaga

SEQ ID NO: 2299 - RNA, 21 nt, synthetic construct
  source 1..21: mol_type = other RNA
  modified_base 1: mod_base = OTHER; note = 2'-O-methyladenosine-3'-phosphorothioate
  modified_base 2: mod_base = OTHER; note = 2'-O-methyladenosine-3'-phosphorothioate
  modified_base 3: mod_base = OTHER; note = 2'-O-methyluridine-3'-phosphate
  modified_base 4: mod_base = OTHER; note = 2'-O-methylcytidine-3'-phosphate
  modified_base 5: mod_base = OTHER; note = 2'-O-methylcytidine-3'-phosphate
  modified_base 6: mod_base = OTHER; note = 2'-O-methylcytidine-3'-phosphate
  modified_base 7: mod_base = OTHER; note = 2'-fluorouridine-3'-phosphate
  modified_base 8: mod_base = OTHER; note = 2'-O-methyladenosine-3'-phosphate
  modified_base 9: mod_base = OTHER; note = 2'-fluorouridine-3'-phosphate
  modified_base 10: mod_base = OTHER; note = 2'-fluorouridine-3'-phosphate
  modified_base 11: mod_base = OTHER; note = 2'-fluorouridine-3'-phosphate
  modified_base 12: mod_base = OTHER; note = 2'-O-methyluridine-3'-phosphate
  modified_base 13: mod_base = OTHER; note = 2'-O-methyladenosine-3'-phosphate
  modified_base 14: mod_base = OTHER; note = 2'-O-methyladenosine-3'-phosphate
  modified_base 15: mod_base = OTHER; note = 2'-O-methyladenosine-3'-phosphate
  modified_base 16: mod_base = OTHER; note = 2'-O-methyladenosine-3'-phosphate
  modified_base 17: mod_base = OTHER; note = 2'-O-methyluridine-3'-phosphate
  modified_base 18: mod_base = OTHER; note = 2'-O-methyluridine-3'-phosphate
  modified_base 19: mod_base = OTHER; note = 2'-O-methylcytidine-3'-phosphorothioate
  modified_base 20: mod_base = OTHER; note = 2'-O-methylcytidine-3'-phosphorothioate
  modified_base 21: mod_base = OTHER; note = 2'-O-methyladenosine-3'-phosphate
aatccctattttaaaattcca

SEQ ID NO: 2300 - RNA, 21 nt, synthetic construct
  source 1..21: mol_type = other RNA
  modified_base 1: mod_base = OTHER; note = 2'-O-methylguanosine-3'-phosphorothioate
  modified_base 2: mod_base = OTHER; note = 2'-O-methyluridine-3'-phosphorothioate
  modified_base 3: mod_base = OTHER; note = 2'-O-methylguanosine-3'-phosphate
  modified_base 4: mod_base = OTHER; note = 2'-O-methylcytidine-3'-phosphate
  modified_base 5: mod_base = OTHER; note = 2'-O-methylcytidine-3'-phosphate
  modified_base 6: mod_base = OTHER; note = 2'-O-methyluridine-3'-phosphate
  modified_base 7: mod_base = OTHER; note = 2'-fluorouridine-3'-phosphate
  modified_base 8: mod_base = OTHER; note = 2'-O-methyladenosine-3'-phosphate
  modified_base 9: mod_base = OTHER; note = 2'-fluoroguanosine-3'-phosphate
  modified_base 10: mod_base = OTHER; note = 2'-fluoroguanosine-3'-phosphate
  modified_base 11: mod_base = OTHER; note = 2'-fluoroadenosine-3'-phosphate
  modified_base 12: mod_base = OTHER; note = 2'-O-methylguanosine-3'-phosphate
  modified_base 13: mod_base = OTHER; note = 2'-O-methyladenosine-3'-phosphate
  modified_base 14: mod_base = OTHER; note = 2'-O-methyluridine-3'-phosphate
  modified_base 15: mod_base = OTHER; note = 2'-O-methyluridine-3'-phosphate
  modified_base 16: mod_base = OTHER; note = 2'-O-methyladenosine-3'-phosphate
  modified_base 17: mod_base = OTHER; note = 2'-O-methylcytidine-3'-phosphate
  modified_base 18: mod_base = OTHER; note = 2'-O-methylcytidine-3'-phosphate
  modified_base 19: mod_base = OTHER; note = 2'-O-methylcytidine-3'-phosphorothioate
  modified_base 20: mod_base = OTHER; note = 2'-O-methyluridine-3'-phosphorothioate
  modified_base 21: mod_base = OTHER; note = 2'-O-methyladenosine-3'-phosphate
gtgccttaggagattacccta

SEQ ID NO: 2301 - RNA, 21 nt, synthetic construct
  source 1..21: mol_type = other RNA
  modified_base 1: mod_base = OTHER; note = 2'-O-methylguanosine-3'-phosphorothioate
  modified_base 2: mod_base = OTHER; note = 2'-O-methyladenosine-3'-phosphorothioate
  modified_base 3: mod_base = OTHER; note = 2'-O-methylcytidine-3'-phosphate
  modified_base 4: mod_base = OTHER; note = 2'-O-methyladenosine-3'-phosphate
  modified_base 5: mod_base = OTHER; note = 2'-O-methyladenosine-3'-phosphate
  modified_base 6: mod_base = OTHER; note = 2'-O-methyluridine-3'-phosphate
  modified_base 7: mod_base = OTHER; note = 2'-fluorocytidine-3'-phosphate
  modified_base 8: mod_base = OTHER; note = 2'-O-methyluridine-3'-phosphate
  modified_base 9: mod_base = OTHER; note = 2'-fluoroadenosine-3'-phosphate
  modified_base 10: mod_base = OTHER; note = 2'-fluoroadenosine-3'-phosphate
  modified_base 11: mod_base = OTHER; note = 2'-fluoroadenosine-3'-phosphate
  modified_base 12: mod_base = OTHER; note = 2'-O-methyluridine-3'-phosphate
  modified_base 13: mod_base = OTHER; note = 2'-O-methyladenosine-3'-phosphate
  modified_base 14: mod_base = OTHER; note = 2'-O-methyluridine-3'-phosphate
  modified_base 15: mod_base = OTHER; note = 2'-O-methyladenosine-3'-phosphate
  modified_base 16: mod_base = OTHER; note = 2'-O-methyluridine-3'-phosphate
  modified_base 17: mod_base = OTHER; note = 2'-O-methylcytidine-3'-phosphate
  modified_base 18: mod_base = OTHER; note = 2'-O-methyladenosine-3'-phosphate
  modified_base 19: mod_base = OTHER; note = 2'-O-methyluridine-3'-phosphorothioate
  modified_base 20: mod_base = OTHER; note = 2'-O-methylcytidine-3'-phosphorothioate
  modified_base 21: mod_base = OTHER; note = 2'-O-methyladenosine-3'-phosphate
gacaatctaaatatatcatca

SEQ ID NO: 2302 - RNA, 21 nt, synthetic construct
  source 1..21: mol_type = other RNA
  modified_base 1: mod_base = OTHER; note = 2'-O-methyluridine-3'-phosphorothioate
  modified_base 2: mod_base = OTHER; note = 2'-O-methylguanosine-3'-phosphorothioate
  modified_base 3: mod_base = OTHER; note = 2'-O-methyluridine-3'-phosphate
  modified_base 4: mod_base = OTHER; note = 2'-O-methylguanosine-3'-phosphate
  modified_base 5: mod_base = OTHER; note = 2'-O-methyladenosine-3'-phosphate
  modified_base 6: mod_base = OTHER; note = 2'-O-methyluridine-3'-phosphate
  modified_base 7: mod_base = OTHER; note = 2'-fluoroadenosine-3'-phosphate
  modified_base 8: mod_base = OTHER; note = 2'-O-methyladenosine-3'-phosphate
  modified_base 9: mod_base = OTHER; note = 2'-fluorouridine-3'-phosphate
  modified_base 10: mod_base = OTHER; note = 2'-fluoroguanosine-3'-phosphate
  modified_base 11: mod_base = OTHER; note = 2'-fluoroadenosine-3'-phosphate
  modified_base 12: mod_base = OTHER; note = 2'-O-methyladenosine-3'-phosphate
  modified_base 13: mod_base = OTHER; note = 2'-O-methylcytidine-3'-phosphate
  modified_base 14: mod_base = OTHER; note = 2'-O-methyladenosine-3'-phosphate
  modified_base 15: mod_base = OTHER; note = 2'-O-methylcytidine-3'-phosphate
  modified_base 16: mod_base = OTHER; note = 2'-O-methylcytidine-3'-phosphate
  modified_base 17: mod_base = OTHER; note = 2'-O-methylguanosine-3'-phosphate
  modified_base 18: mod_base = OTHER; note = 2'-O-methyluridine-3'-phosphate
  modified_base 19: mod_base = OTHER; note = 2'-O-methyladenosine-3'-phosphorothioate
  modified_base 20: mod_base = OTHER; note = 2'-O-methyladenosine-3'-phosphorothioate
  modified_base 21: mod_base = OTHER; note = 2'-O-methyladenosine-3'-phosphate
tgtgataatgaacaccgtaaa

SEQ ID NO: 2303 - RNA, 21 nt, synthetic construct
  source 1..21: mol_type = other RNA
  modified_base 1: mod_base = OTHER; note = 2'-O-methyluridine-3'-phosphorothioate
  modified_base 2: mod_base = OTHER; note = 2'-O-methylcytidine-3'-phosphorothioate
  modified_base 3: mod_base = OTHER; note = 2'-O-methyladenosine-3'-phosphate
  modified_base 4: mod_base = OTHER; note = 2'-O-methylcytidine-3'-phosphate
  modified_base 5: mod_base = OTHER; note = 2'-O-methylcytidine-3'-phosphate
  modified_base 6: mod_base = OTHER; note = 2'-O-methylguanosine-3'-phosphate
  modified_base 7: mod_base = OTHER; note = 2'-fluorouridine-3'-phosphate
  modified_base 8: mod_base = OTHER; note = 2'-O-methyluridine-3'-phosphate
  modified_base 9: mod_base = OTHER; note = 2'-fluoroguanosine-3'-phosphate
  modified_base 10: mod_base = OTHER; note = 2'-fluorouridine-3'-phosphate
  modified_base 11: mod_base = OTHER; note = 2'-fluoroadenosine-3'-phosphate
  modified_base 12: mod_base = OTHER; note = 2'-O-methyladenosine-3'-phosphate
  modified_base 13: mod_base = OTHER; note = 2'-O-methyladenosine-3'-phosphate
  modified_base 14: mod_base = OTHER; note = 2'-O-methylguanosine-3'-phosphate
  modified_base 15: mod_base = OTHER; note = 2'-O-methyladenosine-3'-phosphate
  modified_base 16: mod_base = OTHER; note = 2'-O-methylcytidine-3'-phosphate
  modified_base 17: mod_base = OTHER; note = 2'-O-methyluridine-3'-phosphate
  modified_base 18: mod_base = OTHER; note = 2'-O-methyluridine-3'-phosphate
  modified_base 19: mod_base = OTHER; note = 2'-O-methyluridine-3'-phosphorothioate
  modified_base 20: mod_base = OTHER; note = 2'-O-methyluridine-3'-phosphorothioate
  modified_base 21: mod_base = OTHER; note = 2'-O-methyladenosine-3'-phosphate
tcaccgttgtaaagactttta

SEQ ID NO: 2304 - RNA, 21 nt, synthetic construct
  source 1..21: mol_type = other RNA
  modified_base 1: mod_base = OTHER; note = 2'-O-methyluridine-3'-phosphorothioate
  modified_base 2: mod_base = OTHER; note = 2'-O-methyluridine-3'-phosphorothioate
  modified_base 3: mod_base = OTHER; note = 2'-O-methyladenosine-3'-phosphate
  modified_base 4: mod_base = OTHER; note = 2'-O-methylguanosine-3'-phosphate
  modified_base 5: mod_base = OTHER; note = 2'-O-methyladenosine-3'-phosphate
  modified_base 6: mod_base = OTHER; note = 2'-O-methylguanosine-3'-phosphate
  modified_base 7: mod_base = OTHER; note = 2'-fluoroadenosine-3'-phosphate
  modified_base 8: mod_base = OTHER; note = 2'-O-methyladenosine-3'-phosphate
  modified_base 9: mod_base = OTHER; note = 2'-fluoroguanosine-3'-phosphate
  modified_base 10: mod_base = OTHER; note = 2'-fluorocytidine-3'-phosphate
  modified_base 11: mod_base = OTHER; note = 2'-fluorouridine-3'-phosphate
  modified_base 12: mod_base = OTHER; note = 2'-O-methyluridine-3'-phosphate
  modified_base 13: mod_base = OTHER; note = 2'-O-methylcytidine-3'-phosphate
  modified_base 14: mod_base = OTHER; note = 2'-O-methylcytidine-3'-phosphate
  modified_base 15: mod_base = OTHER; note = 2'-O-methyluridine-3'-phosphate
  modified_base 16: mod_base = OTHER; note = 2'-O-methylguanosine-3'-phosphate
  modified_base 17: mod_base = OTHER; note = 2'-O-methyladenosine-3'-phosphate
  modified_base 18: mod_base = OTHER; note = 2'-O-methylcytidine-3'-phosphate
  modified_base 19: mod_base = OTHER; note = 2'-O-methyladenosine-3'-phosphorothioate
  modified_base 20: mod_base = OTHER; note = 2'-O-methyluridine-3'-phosphorothioate
  modified_base 21: mod_base = OTHER; note = 2'-O-methyladenosine-3'-phosphate
ttagagaagcttcctgacata

SEQ ID NO: 2305 - RNA, 21 nt, synthetic construct
  source 1..21: mol_type = other RNA
  modified_base 1: mod_base = OTHER; note = 2'-O-methyladenosine-3'-phosphorothioate
  modified_base 2: mod_base = OTHER; note = 2'-O-methyladenosine-3'-phosphorothioate
  modified_base 3: mod_base = OTHER; note = 2'-O-methylcytidine-3'-phosphate
  modified_base 4: mod_base = OTHER; note = 2'-O-methyladenosine-3'-phosphate
  modified_base 5: mod_base = OTHER; note = 2'-O-methylguanosine-3'-phosphate
  modified_base 6: mod_base = OTHER; note = 2'-O-methyluridine-3'-phosphate
  modified_base 7: mod_base = OTHER; note = 2'-fluoroadenosine-3'-phosphate
  modified_base 8: mod_base = OTHER; note = 2'-O-methyladenosine-3'-phosphate
  modified_base 9: mod_base = OTHER; note = 2'-fluoroadenosine-3'-phosphate
  modified_base 10: mod_base = OTHER; note = 2'-fluoroguanosine-3'-phosphate
  modified_base 11: mod_base = OTHER; note = 2'-fluoroadenosine-3'-phosphate
  modified_base 12: mod_base = OTHER; note = 2'-O-methyladenosine-3'-phosphate
  modified_base 13: mod_base = OTHER; note = 2'-O-methyladenosine-3'-phosphate
  modified_base 14: mod_base = OTHER; note = 2'-O-methyluridine-3'-phosphate
  modified_base 15: mod_base = OTHER; note = 2'-O-methylguanosine-3'-phosphate
  modified_base 16: mod_base = OTHER; note = 2'-O-methylcytidine-3'-phosphate
  modified_base 17: mod_base = OTHER; note = 2'-O-methyluridine-3'-phosphate
  modified_base 18: mod_base = OTHER; note = 2'-O-methyladenosine-3'-phosphate
  modified_base 19: mod_base = OTHER; note = 2'-O-methylcytidine-3'-phosphorothioate
  modified_base 20: mod_base = OTHER; note = 2'-O-methyluridine-3'-phosphorothioate
  modified_base 21: mod_base = OTHER; note = 2'-O-methyladenosine-3'-phosphate
aacagtaaagaaatgctacta

SEQ ID NO: 2306 - RNA, 21 nt, synthetic construct
  source 1..21: mol_type = other RNA
  modified_base 1: mod_base = OTHER; note = 2'-O-methyluridine-3'-phosphorothioate
  modified_base 2: mod_base = OTHER; note = 2'-O-methyladenosine-3'-phosphorothioate
  modified_base 3: mod_base = OTHER; note = 2'-O-methyluridine-3'-phosphate
  modified_base 4: mod_base = OTHER; note = 2'-O-methylguanosine-3'-phosphate
  modified_base 5: mod_base = OTHER; note = 2'-O-methyluridine-3'-phosphate
  modified_base 6: mod_base = OTHER; note = 2'-O-methyluridine-3'-phosphate
  modified_base 7: mod_base = OTHER; note = 2'-fluorocytidine-3'-phosphate
  modified_base 8: mod_base = OTHER; note = 2'-O-methyluridine-3'-phosphate
  modified_base 9: mod_base = OTHER; note = 2'-fluoroguanosine-3'-phosphate
  modified_base 10: mod_base = OTHER; note = 2'-fluoroadenosine-3'-phosphate
  modified_base 11: mod_base = OTHER; note = 2'-fluorocytidine-3'-phosphate
  modified_base 12: mod_base = OTHER; note = 2'-O-methyluridine-3'-phosphate
  modified_base 13: mod_base = OTHER; note = 2'-O-methyluridine-3'-phosphate
  modified_base 14: mod_base = OTHER; note = 2'-O-methylguanosine-3'-phosphate
  modified_base 15: mod_base = OTHER; note = 2'-O-methyladenosine-3'-phosphate
  modified_base 16: mod_base = OTHER; note = 2'-O-methylguanosine-3'-phosphate
  modified_base 17: mod_base = OTHER; note = 2'-O-methyladenosine-3'-phosphate
  modified_base 18: mod_base = OTHER; note = 2'-O-methylguanosine-3'-phosphate
  modified_base 19: mod_base = OTHER; note = 2'-O-methyluridine-3'-phosphorothioate
  modified_base 20: mod_base = OTHER; note = 2'-O-methyluridine-3'-phosphorothioate
  modified_base 21: mod_base = OTHER; note = 2'-O-methyladenosine-3'-phosphate
tatgttctgacttgagagtta

SEQ ID NO: 2307 - RNA, 21 nt, synthetic construct
  source 1..21: mol_type = other RNA
  modified_base 1: mod_base = OTHER; note = 2'-O-methyluridine-3'-phosphorothioate
  modified_base 2: mod_base = OTHER; note = 2'-O-methyluridine-3'-phosphorothioate
  modified_base 3: mod_base = OTHER; note = 2'-O-methyladenosine-3'-phosphate
  modified_base 4: mod_base = OTHER; note = 2'-O-methylguanosine-3'-phosphate
  modified_base 5: mod_base = OTHER; note = 2'-O-methyladenosine-3'-phosphate
  modified_base 6: mod_base = OTHER; note = 2'-O-methylguanosine-3'-phosphate
  modified_base 7: mod_base = OTHER; note = 2'-fluorocytidine-3'-phosphate
  modified_base 8: mod_base = OTHER; note = 2'-O-methyladenosine-3'-phosphate
  modified_base 9: mod_base = OTHER; note = 2'-fluorouridine-3'-phosphate
  modified_base 10: mod_base = OTHER; note = 2'-fluoroguanosine-3'-phosphate
  modified_base 11: mod_base = OTHER; note = 2'-fluorocytidine-3'-phosphate
  modified_base 12: mod_base = OTHER; note = 2'-O-methyluridine-3'-phosphate
  modified_base 13: mod_base = OTHER; note = 2'-O-methyladenosine-3'-phosphate
  modified_base 14: mod_base = OTHER; note = 2'-O-methyluridine-3'-phosphate
  modified_base 15: mod_base = OTHER; note = 2'-O-methylcytidine-3'-phosphate
  modified_base 16: mod_base = OTHER; note = 2'-O-methyluridine-3'-phosphate
  modified_base 17: mod_base = OTHER; note = 2'-O-methyluridine-3'-phosphate
  modified_base 18: mod_base = OTHER; note = 2'-O-methyluridine-3'-phosphate
  modified_base 19: mod_base = OTHER; note = 2'-O-methyladenosine-3'-phosphorothioate
  modified_base 20: mod_base = OTHER; note = 2'-O-methylguanosine-3'-phosphorothioate
  modified_base 21: mod_base = OTHER; note = 2'-O-methyladenosine-3'-phosphate
ttagagcatgctatctttaga

SEQ ID NO: 2308 - RNA, 21 nt, synthetic construct
  source 1..21: mol_type = other RNA
  modified_base 1: mod_base = OTHER; note = 2'-O-methyluridine-3'-phosphorothioate
  modified_base 2: mod_base = OTHER; note = 2'-O-methyladenosine-3'-phosphorothioate
  modified_base 3: mod_base = OTHER; note = 2'-O-methylguanosine-3'-phosphate
  modified_base 4: mod_base = OTHER; note = 2'-O-methyluridine-3'-phosphate
  modified_base 5: mod_base = OTHER; note = 2'-O-methylcytidine-3'-phosphate
  modified_base 6: mod_base = OTHER; note = 2'-O-methyluridine-3'-phosphate
  modified_base 7: mod_base = OTHER; note = 2'-fluorouridine-3'-phosphate
  modified_base 8: mod_base = OTHER; note = 2'-O-methyluridine-3'-phosphate
  modified_base 9: mod_base = OTHER; note = 2'-fluoroguanosine-3'-phosphate
  modified_base 10: mod_base = OTHER; note = 2'-fluoroadenosine-3'-phosphate
  modified_base 11: mod_base = OTHER; note = 2'-fluorouridine-3'-phosphate
  modified_base 12: mod_base = OTHER; note = 2'-O-methyluridine-3'-phosphate
  modified_base 13: mod_base = OTHER; note = 2'-O-methylguanosine-3'-phosphate
  modified_base 14: mod_base = OTHER; note = 2'-O-methyladenosine-3'-phosphate
  modified_base 15: mod_base = OTHER; note = 2'-O-methyladenosine-3'-phosphate
  modified_base 16: mod_base = OTHER; note = 2'-O-methyladenosine-3'-phosphate
  modified_base 17: mod_base = OTHER; note = 2'-O-methyluridine-3'-phosphate
  modified_base 18: mod_base = OTHER; note = 2'-O-methyladenosine-3'-phosphate
  modified_base 19: mod_base = OTHER; note = 2'-O-methyladenosine-3'-phosphorothioate
  modified_base 20: mod_base = OTHER; note = 2'-O-methylguanosine-3'-phosphorothioate
  modified_base 21: mod_base = OTHER; note = 2'-O-methyladenosine-3'-phosphate
tagtctttgattgaaataaga

SEQ ID NO: 2309 - RNA, 21 nt, synthetic construct
  source 1..21: mol_type = other RNA
  modified_base 1: mod_base = OTHER; note = 2'-O-methyluridine-3'-phosphorothioate
  modified_base 2: mod_base = OTHER; note = 2'-O-methyluridine-3'-phosphorothioate
  modified_base 3: mod_base = OTHER; note = 2'-O-methylguanosine-3'-phosphate
  modified_base 4: mod_base = OTHER; note = 2'-O-methylguanosine-3'-phosphate
  modified_base 5: mod_base = OTHER; note = 2'-O-methyluridine-3'-phosphate
  modified_base 6: mod_base = OTHER; note = 2'-O-methyladenosine-3'-phosphate
  modified_base 7: mod_base = OTHER; note = 2'-fluoroadenosine-3'-phosphate
  modified_base 8: mod_base = OTHER; note = 2'-O-methyladenosine-3'-phosphate
  modified_base 9: mod_base = OTHER; note = 2'-fluorocytidine-3'-phosphate
  modified_base 10: mod_base = OTHER; note = 2'-fluoroguanosine-3'-phosphate
  modified_base 11: mod_base = OTHER; note = 2'-fluoroadenosine-3'-phosphate
  modified_base 12: mod_base = OTHER; note = 2'-O-methylguanosine-3'-phosphate
  modified_base 13: mod_base = OTHER; note = 2'-O-methyladenosine-3'-phosphate
  modified_base 14: mod_base = OTHER; note = 2'-O-methyluridine-3'-phosphate
  modified_base 15: mod_base = OTHER; note = 2'-O-methyluridine-3'-phosphate
  modified_base 16: mod_base = OTHER; note = 2'-O-methyluridine-3'-phosphate
  modified_base 17: mod_base = OTHER; note = 2'-O-methyladenosine-3'-phosphate
  modified_base 18: mod_base = OTHER; note = 2'-O-methyladenosine-3'-phosphate
  modified_base 19: mod_base = OTHER; note = 2'-O-methylcytidine-3'-phosphorothioate
  modified_base 20: mod_base = OTHER; note = 2'-O-methyladenosine-3'-phosphorothioate
  modified_base 21: mod_base = OTHER; note = 2'-O-methyladenosine-3'-phosphate
ttggtaaacgagatttaacaa

SEQ ID NO: 2310 - RNA, 21 nt, synthetic construct
  source 1..21: mol_type = other RNA
  modified_base 1: mod_base = OTHER; note = 2'-O-methylguanosine-3'-phosphorothioate
  modified_base 2: mod_base = OTHER; note = 2'-O-methyluridine-3'-phosphorothioate
  modified_base 3: mod_base = OTHER; note = 2'-O-methylcytidine-3'-phosphate
  modified_base 4: mod_base = OTHER; note = 2'-O-methyluridine-3'-phosphate
  modified_base 5: mod_base = OTHER; note = 2'-O-methylguanosine-3'-phosphate
  modified_base 6: mod_base = OTHER; note = 2'-O-methyladenosine-3'-phosphate
  modified_base 7: mod_base = OTHER; note = 2'-fluoroadenosine-3'-phosphate
  modified_base 8: mod_base = OTHER; note = 2'-O-methyladenosine-3'-phosphate
  modified_base 9: mod_base = OTHER; note = 2'-fluoroadenosine-3'-phosphate
  modified_base 10: mod_base = OTHER; note = 2'-fluorouridine-3'-phosphate
  modified_base 11: mod_base = OTHER; note = 2'-fluorouridine-3'-phosphate
  modified_base 12: mod_base = OTHER; note = 2'-O-methylguanosine-3'-phosphate
  modified_base 13: mod_base = OTHER; note = 2'-O-methylcytidine-3'-phosphate
  modified_base 14: mod_base = OTHER; note = 2'-O-methyluridine-3'-phosphate
  modified_base 15: mod_base = OTHER; note = 2'-O-methyluridine-3'-phosphate
  modified_base 16: mod_base = OTHER; note = 2'-O-methyluridine-3'-phosphate
  modified_base 17: mod_base = OTHER; note = 2'-O-methylcytidine-3'-phosphate
  modified_base 18: mod_base = OTHER; note = 2'-O-methyladenosine-3'-phosphate
  modified_base 19: mod_base = OTHER; note = 2'-O-methyluridine-3'-phosphorothioate
  modified_base 20: mod_base = OTHER; note = 2'-O-methyluridine-3'-phosphorothioate
  modified_base 21: mod_base = OTHER; note = 2'-O-methyladenosine-3'-phosphate
gtctgaaaattgctttcatta

SEQ ID NO: 2311 - RNA, 21 nt, synthetic construct
  source 1..21: mol_type = other RNA
  modified_base 1: mod_base = OTHER; note = 2'-O-methyladenosine-3'-phosphorothioate
  modified_base 2: mod_base = OTHER; note = 2'-O-methyluridine-3'-phosphorothioate
  modified_base 3: mod_base = OTHER; note = 2'-O-methylguanosine-3'-phosphate
  modified_base 4: mod_base = OTHER; note = 2'-O-methyladenosine-3'-phosphate
  modified_base 5: mod_base = OTHER; note = 2'-O-methyladenosine-3'-phosphate
  modified_base 6: mod_base = OTHER; note = 2'-O-methylcytidine-3'-phosphate
  modified_base 7: mod_base = OTHER; note = 2'-fluorouridine-3'-phosphate
  modified_base 8: mod_base = OTHER; note = 2'-O-methyluridine-3'-phosphate
  modified_base 9: mod_base = OTHER; note = 2'-fluoroguanosine-3'-phosphate
  modified_base 10: mod_base = OTHER; note = 2'-fluorouridine-3'-phosphate
  modified_base 11: mod_base = OTHER; note = 2'-fluorouridine-3'-phosphate
  modified_base 12: mod_base = OTHER; note = 2'-O-methylguanosine-3'-phosphate
  modified_base 13: mod_base = OTHER; note = 2'-O-methylcytidine-3'-phosphate
  modified_base 14: mod_base = OTHER; note = 2'-O-methylcytidine-3'-phosphate
  modified_base 15: mod_base = OTHER; note = 2'-O-methyluridine-3'-phosphate
  modified_base 16: mod_base = OTHER; note = 2'-O-methyluridine-3'-phosphate
  modified_base 17: mod_base = OTHER; note = 2'-O-methylguanosine-3'-phosphate
  modified_base 18: mod_base = OTHER; note = 2'-O-methyluridine-3'-phosphate
  modified_base 19: mod_base = OTHER; note = 2'-O-methyladenosine-3'-phosphorothioate
  modified_base 20: mod_base = OTHER; note = 2'-O-methyladenosine-3'-phosphorothioate
  modified_base 21: mod_base = OTHER; note = 2'-O-methyladenosine-3'-phosphate
atgaacttgttgccttgtaaa

SEQ ID NO: 2312 - RNA, 21 nt, synthetic construct
  source 1..21: mol_type = other RNA
  modified_base 1: mod_base = OTHER; note = 2'-O-methylguanosine-3'-phosphorothioate
  modified_base 2: mod_base = OTHER; note = 2'-O-methylguanosine-3'-phosphorothioate
  modified_base 3: mod_base = OTHER; note = 2'-O-methylguanosine-3'-phosphate
  modified_base 4: mod_base = OTHER; note = 2'-O-methylcytidine-3'-phosphate
  modified_base 5: mod_base = OTHER; note = 2'-O-methyladenosine-3'-phosphate
  modified_base 6: mod_base = OTHER; note = 2'-O-methyladenosine-3'-phosphate
  modified_base 7: mod_base = OTHER; note = 2'-fluorouridine-3'-phosphate
  modified_base 8: mod_base = OTHER; note = 2'-O-methyladenosine-3'-phosphate
  modified_base 9: mod_base = OTHER; note = 2'-fluoroadenosine-3'-phosphate
  modified_base 10: mod_base = OTHER; note = 2'-fluoroadenosine-3'-phosphate
  modified_base 11: mod_base = OTHER; note = 2'-fluorocytidine-3'-phosphate
  modified_base 12: mod_base = OTHER; note = 2'-O-methyluridine-3'-phosphate
  modified_base 13: mod_base = OTHER; note = 2'-O-methylguanosine-3'-phosphate
  modified_base 14: mod_base = OTHER; note = 2'-O-methyluridine-3'-phosphate
  modified_base 15: mod_base = OTHER; note = 2'-O-methyladenosine-3'-phosphate
  modified_base 16: mod_base = OTHER; note = 2'-O-methyluridine-3'-phosphate
  modified_base 17: mod_base = OTHER; note = 2'-O-methylcytidine-3'-phosphate
  modified_base 18: mod_base = OTHER; note = 2'-O-methyladenosine-3'-phosphate
  modified_base 19: mod_base = OTHER; note = 2'-O-methyladenosine-3'-phosphorothioate
  modified_base 20: mod_base = OTHER; note = 2'-O-methyladenosine-3'-phosphorothioate
  modified_base 21: mod_base = OTHER; note = 2'-O-methyladenosine-3'-phosphate
gggcaataaactgtatcaaaa

SEQ ID NO: 2313 - RNA, 21 nt, synthetic construct
  source 1..21: mol_type = other RNA
  modified_base 1: mod_base = OTHER; note = 2'-O-methyladenosine-3'-phosphorothioate
  modified_base 2: mod_base = OTHER; note = 2'-O-methylcytidine-3'-phosphorothioate
  modified_base 3: mod_base = OTHER; note = 2'-O-methyladenosine-3'-phosphate
  modified_base 4: mod_base = OTHER; note = 2'-O-methyluridine-3'-phosphate
  modified_base 5: mod_base = OTHER; note = 2'-O-methylguanosine-3'-phosphate
  modified_base 6: mod_base = OTHER; note = 2'-O-methyluridine-3'-phosphate
  modified_base 7: mod_base = OTHER; note = 2'-fluorouridine-3'-phosphate
  modified_base 8: mod_base = OTHER; note = 2'-O-methyladenosine-3'-phosphate
  modified_base 9: mod_base = OTHER; note = 2'-fluoroguanosine-3'-phosphate
  modified_base 10: mod_base = OTHER; note = 2'-fluorocytidine-3'-phosphate
  modified_base 11: mod_base = OTHER; note = 2'-fluoroadenosine-3'-phosphate
  modified_base 12: mod_base = OTHER; note = 2'-O-methyluridine-3'-phosphate
  modified_base 13: mod_base = OTHER; note = 2'-O-methyladenosine-3'-phosphate
  modified_base 14: mod_base = OTHER; note = 2'-O-methyluridine-3'-phosphate
  modified_base 15: mod_base = OTHER; note = 2'-O-methyladenosine-3'-phosphate
  modified_base 16: mod_base = OTHER; note = 2'-O-methyladenosine-3'-phosphate
  modified_base 17: mod_base = OTHER; note = 2'-O-methyluridine-3'-phosphate
  modified_base 18: mod_base = OTHER; note = 2'-O-methylguanosine-3'-phosphate
  modified_base 19: mod_base = OTHER; note = 2'-O-methyluridine-3'-phosphorothioate
  modified_base 20: mod_base = OTHER; note = 2'-O-methyladenosine-3'-phosphorothioate
  modified_base 21: mod_base = OTHER; note = 2'-O-methyladenosine-3'-phosphate
acatgttagcatataatgtaa

SEQ ID NO: 2314 - RNA, 21 nt, synthetic construct
  source 1..21: mol_type = other RNA
  modified_base 1: mod_base = OTHER; note = 2'-O-methyluridine-3'-phosphorothioate
  modified_base 2: mod_base = OTHER; note = 2'-O-methylguanosine-3'-phosphorothioate
  modified_base 3: mod_base = OTHER; note = 2'-O-methyluridine-3'-phosphate
  modified_base 4: mod_base = OTHER; note = 2'-O-methylguanosine-3'-phosphate
  modified_base 5: mod_base = OTHER; note = 2'-O-methyladenosine-3'-phosphate
  modified_base 6: mod_base = OTHER; note = 2'-O-methylguanosine-3'-phosphate
  modified_base 7: mod_base = OTHER; note = 2'-fluoroadenosine-3'-phosphate
  modified_base 8: mod_base = OTHER; note = 2'-O-methylguanosine-3'-phosphate
  modified_base 9: mod_base = OTHER; note = 2'-fluorouridine-3'-phosphate
  modified_base 10: mod_base = OTHER; note = 2'-fluoroadenosine-3'-phosphate
  modified_base 11: mod_base = OTHER; note = 2'-fluorouridine-3'-phosphate
  modified_base 12: mod_base = OTHER; note = 2'-O-methyladenosine-3'-phosphate
  modified_base 13: mod_base = OTHER; note = 2'-O-methylguanosine-3'-phosphate
  modified_base 14: mod_base = OTHER; note = 2'-O-methyladenosine-3'-phosphate
  modified_base 15: mod_base = OTHER; note = 2'-O-methyladenosine-3'-phosphate
  modified_base 16: mod_base = OTHER; note = 2'-O-methyluridine-3'-phosphate
  modified_base 17: mod_base = OTHER; note = 2'-O-methyluridine-3'-phosphate
  modified_base 18: mod_base = OTHER; note = 2'-O-methyluridine-3'-phosphate
  modified_base 19: mod_base = OTHER; note = 2'-O-methylcytidine-3'-phosphorothioate
  modified_base 20: mod_base = OTHER; note = 2'-O-methyluridine-3'-phosphorothioate
  modified_base 21: mod_base = OTHER; note = 2'-O-methyladenosine-3'-phosphate
tgtgagagtatagaatttcta

SEQ ID NO: 2315 - RNA, 21 nt, synthetic construct
  source 1..21: mol_type = other RNA
  modified_base 1: mod_base = OTHER; note = 2'-O-methyladenosine-3'-phosphorothioate
  modified_base 2: mod_base = OTHER; note = 2'-O-methyluridine-3'-phosphorothioate
  modified_base 3: mod_base = OTHER; note = 2'-O-methylcytidine-3'-phosphate
  modified_base 4: mod_base = OTHER; note = 2'-O-methylcytidine-3'-phosphate
  modified_base 5: mod_base = OTHER; note = 2'-O-methyluridine-3'-phosphate
  modified_base 6: mod_base = OTHER; note = 2'-O-methyluridine-3'-phosphate
  modified_base 7: mod_base = OTHER; note = 2'-fluorocytidine-3'-phosphate
  modified_base 8: mod_base = OTHER; note = 2'-O-methyladenosine-3'-phosphate
  modified_base 9: mod_base = OTHER; note = 2'-fluorouridine-3'-phosphate
  modified_base 10: mod_base = OTHER; note = 2'-fluorouridine-3'-phosphate
  modified_base 11: mod_base = OTHER; note = 2'-fluorouridine-3'-phosphate
  modified_base 12: mod_base = OTHER; note = 2'-O-methylguanosine-3'-phosphate
  modified_base 13: mod_base = OTHER; note = 2'-O-methylguanosine-3'-phosphate
  modified_base 14: mod_base = OTHER; note = 2'-O-methylcytidine-3'-phosphate
  modified_base 15: mod_base = OTHER; note = 2'-O-methyladenosine-3'-phosphate
  modified_base 16: mod_base = OTHER; note = 2'-O-methylcytidine-3'-phosphate
  modified_base 17: mod_base = OTHER; note = 2'-O-methyluridine-3'-phosphate
  modified_base 18: mod_base = OTHER; note = 2'-O-methyladenosine-3'-phosphate
  modified_base 19: mod_base = OTHER; note = 2'-O-methyluridine-3'-phosphorothioate
  modified_base 20: mod_base = OTHER; note = 2'-O-methyladenosine-3'-phosphorothioate
  modified_base 21: mod_base = OTHER; note = 2'-O-methyladenosine-3'-phosphate
atccttcatttggcactataa

SEQ ID NO: 2316 - RNA, 21 nt, synthetic construct
  source 1..21: mol_type = other RNA
  modified_base 1: mod_base = OTHER; note = 2'-O-methyladenosine-3'-phosphorothioate
  modified_base 2: mod_base = OTHER; note = 2'-O-methylcytidine-3'-phosphorothioate
  modified_base 3: mod_base = OTHER; note = 2'-O-methyladenosine-3'-phosphate
  modified_base 4: mod_base = OTHER; note = 2'-O-methyluridine-3'-phosphate
  modified_base 5: mod_base = OTHER; note = 2'-O-methyluridine-3'-phosphate
  modified_base 6: mod_base = OTHER; note = 2'-O-methyluridine-3'-phosphate
  modified_base 7: mod_base = OTHER; note = 2'-fluoroadenosine-3'-phosphate
  modified_base 8: mod_base = OTHER; note = 2'-O-methylguanosine-3'-phosphate
  modified_base 9: mod_base = OTHER; note = 2'-fluoroadenosine-3'-phosphate
  modified_base 10: mod_base = OTHER; note = 2'-fluoroadenosine-3'-phosphate
  modified_base 11: mod_base = OTHER; note = 2'-fluoroadenosine-3'-phosphate
  modified_base 12: mod_base = OTHER; note = 2'-O-methylguanosine-3'-phosphate
  modified_base 13: mod_base = OTHER; note = 2'-O-methyluridine-3'-phosphate
  modified_base 14: mod_base = OTHER; note = 2'-O-methyladenosine-3'-phosphate
  modified_base 15: mod_base = OTHER; note = 2'-O-methylguanosine-3'-phosphate
  modified_base 16: mod_base = OTHER; note = 2'-O-methylcytidine-3'-phosphate
  modified_base 17: mod_base = OTHER; note = 2'-O-methyluridine-3'-phosphate
  modified_base 18: mod_base = OTHER; note = 2'-O-methyluridine-3'-phosphate
  modified_base 19: mod_base = OTHER; note = 2'-O-methyluridine-3'-phosphorothioate
  modified_base 20: mod_base = OTHER; note = 2'-O-methyladenosine-3'-phosphorothioate
  modified_base 21: mod_base = OTHER; note = 2'-O-methyladenosine-3'-phosphate
acatttagaaagtagctttaa

SEQ ID NO: 2317 - RNA, 21 nt, synthetic construct
  source 1..21: mol_type = other RNA
  modified_base 1: mod_base = OTHER; note = 2'-O-methyladenosine-3'-phosphorothioate
  modified_base 2: mod_base = OTHER; note = 2'-O-methyladenosine-3'-phosphorothioate
  modified_base 3: mod_base = OTHER; note = 2'-O-methylcytidine-3'-phosphate
  modified_base 4: mod_base = OTHER; note = 2'-O-methyluridine-3'-phosphate
  modified_base 5: mod_base = OTHER; note = 2'-O-methylguanosine-3'-phosphate
  modified_base 6: mod_base = OTHER; note = 2'-O-methyluridine-3'-phosphate
  modified_base 7: mod_base = OTHER; note = 2'-fluorouridine-3'-phosphate
  modified_base 8: mod_base = OTHER; note = 2'-O-methylcytidine-3'-phosphate
  modified_base 9: mod_base = OTHER; note = 2'-fluorouridine-3'-phosphate
  modified_base 10: mod_base = OTHER; note = 2'-fluoroadenosine-3'-phosphate
  modified_base 11: mod_base = OTHER; note = 2'-fluorouridine-3'-phosphate
  modified_base 12: mod_base = OTHER; note = 2'-O-methyladenosine-3'-phosphate
  modified_base 13: mod_base = OTHER; note = 2'-O-methyladenosine-3'-phosphate
  modified_base 14: mod_base = OTHER; note = 2'-O-methyladenosine-3'-phosphate
  modified_base 15: mod_base = OTHER; note = 2'-O-methylguanosine-3'-phosphate
  modified_base 16: mod_base = OTHER; note = 2'-O-methylcytidine-3'-phosphate
  modified_base 17: mod_base = OTHER; note = 2'-O-methyladenosine-3'-phosphate
  modified_base 18: mod_base = OTHER; note = 2'-O-methyladenosine-3'-phosphate
  modified_base 19: mod_base = OTHER; note = 2'-O-methyladenosine-3'-phosphorothioate
  modified_base 20: mod_base = OTHER; note = 2'-O-methylguanosine-3'-phosphorothioate
  modified_base 21: mod_base = OTHER; note = 2'-O-methyladenosine-3'-phosphate
aactgttctataaagcaaaga

SEQ ID NO: 2318 - RNA, 21 nt, synthetic construct
  source 1..21: mol_type = other RNA
  modified_base 1: mod_base = OTHER; note = 2'-O-methylcytidine-3'-phosphorothioate
  modified_base 2: mod_base = OTHER; note = 2'-O-methylcytidine-3'-phosphorothioate
  modified_base 3: mod_base = OTHER; note = 2'-O-methyluridine-3'-phosphate
  modified_base 4: mod_base = OTHER; note = 2'-O-methylcytidine-3'-phosphate
  modified_base 5: mod_base = OTHER; note = 2'-O-methylcytidine-3'-phosphate
  modified_base 6: mod_base = OTHER; note = 2'-O-methyladenosine-3'-phosphate
  modified_base 7: mod_base = OTHER; note = 2'-fluoroguanosine-3'-phosphate
  modified_base 8: mod_base = OTHER; note = 2'-O-methyladenosine-3'-phosphate
  modified_base 9: mod_base = OTHER; note = 2'-fluoroguanosine-3'-phosphate
  modified_base 10: mod_base = OTHER; note = 2'-fluoroadenosine-3'-phosphate
  modified_base 11: mod_base = OTHER; note = 2'-fluorouridine-3'-phosphate
  modified_base 12: mod_base = OTHER; note = 2'-O-methylguanosine-3'-phosphate
  modified_base 13: mod_base = OTHER; note = 2'-O-methyladenosine-3'-phosphate
  modified_base 14: mod_base = OTHER; note = 2'-O-methyladenosine-3'-phosphate
  modified_base 15: mod_base = OTHER; note = 2'-O-methyladenosine-3'-phosphate
  modified_base 16: mod_base = OTHER; note = 2'-O-methylguanosine-3'-phosphate
  modified_base 17: mod_base = OTHER; note = 2'-O-methyladenosine-3'-phosphate
  modified_base 18: mod_base = OTHER; note = 2'-O-methyluridine-3'-phosphate
  modified_base 19: mod_base = OTHER; note = 2'-O-methylcytidine-3'-phosphorothioate
  modified_base 20: mod_base = OTHER; note = 2'-O-methyluridine-3'-phosphorothioate
  modified_base 21: mod_base = OTHER; note = 2'-O-methyladenosine-3'-phosphate
cctccagagatgaaagatcta

(The sequence listing continues in the following parts.)
